United States Patent Application Publication US 2006/0046253 A1 - sequence listing, part 7

SEQ ID NO: 76708 - DNA, 5688 bp, Saccharomyces pastorianus
atgtcctacaacgatccaaacttgaatggacagtattacagtaacggtgatgggactggtgacggtaattaccctacgtaccaagtgacacaggatcaaagtgcgtacgatgagtacggtcagccaatctatacacaaaaccaactggatgatggttattatgatccaaacgaacaatacgttgacggtacacaatttcctcagggacaagatccttcacaagaccaaggtccttataataacgatgctagttactataaccaaccccccaatatgatgaacccgtcttctcaagatggagagaacttctcagattttagcagctatggtcccccatccggcacttatcctaacgatcaatatactccttctcaaatgagttatcctgatcaagatggttcttcaggggcctcaaccccctatggaaatggtgtcgttaatggtaatggccagtactacgaccctaatgctattgaaatggctttaccaaatgatccatatcccgcatggaccgcagatccccagtctcccctgcccatcgaacaaatcgaagatatcttcatagatttaacaaataaattcggttttcagagagattccatgagaaatatgtttgaccattttatgacccttttggactctagatcttctaggatgtccccagaacaggcccttttatcattacatgcggactacataggtggagatacggccaactacaaaaaatggtactttgccgctcaacttgatatggatgatgaaattggtttcaggaatatgaagttgggtaagctatcaagaaaggcaagaaaggctaagaagaaaaataaaaaagccatgcaagaggctagtcctgaagacactgaggagactttaaatcaaatcgagggtgataactcattagaagctgcggattttagatggaagtcaaagatgaatcaactttctccatttgaaatggttcgtcaaattgccttgtttttattatgttggggcgaggcaaatcaagtcagatttactccggagtgtctttgtttcatttataaatgcgcctctgattacttagattctgcacaatgtaaacaacgtcctgatcccttgcctgaaggtgattttttgaatagagttattactcctctttatcgttttattaggagccaggtttacgaaatcgtggatggtcgatacgtgaagagtgaaaaagatcataacaaagttattgggtatgacgatgtcaatcaattattctggtatccagaaggtatagcaaaaattgtcatggaagatggaaccaggttgattgatttgccagcagaggagcgttatttgaaattgggagaaattccctgggatgatgtcttctttaaaacttacaaagaaacacgttcctggctacatttagttaccaacttcaatcgtatttggatcatgcacatctcagtatattggatgtattgtgcttacaatgctccaactttttatactcacaactatcaacaattggtcgacaatcagcctttggcagcttataaatgggccactgcagcattaggtggtactgtggcaagtttgattcaagttgccgctactttgtgcgagtggtcattcgttcctagaaaatgggcgggtgctcaacatttgtcccgtagattctggttcttgtgtgtcattatgggtattaatttggggcctgtgatatttgttttcgcttatgataaggacacagtatattctactgccgctcatgtcgttggagcagttatgttttttgttgctgtggcaacacttgttttcttttccgtaatgccattgggtggattatttacatcgtatatgaaaaagtccacaagaagttatgttgcctcacagaccttcaccgcatcttttgctccattgcatggtttagacaggtggatgtcttatttggtttgggtaaccgtttttgctgctaaatatgcagagtcatatttttttctaatactgtcactaagagatccaattaggattttatctactacgtcaatgagatgtactggtgaatactggtggggtaataagatttgtaaggtccagccaaagattgttttaggtttaatgattgcgactgacttcattttgttctttttggatacctacttgtggtatatcgttgttaacactgttttctcggtcggcaaatcgttctatttgggtatttctatcttaactccatggagaaatattttcactagattgccaaaaagaatttattctaagatcttggctactactgatatggaaataaaatataaaccgaaagtactaatttctcagatttggaatgctatcattatctccatgtacagagaacatttattagccatagaccatgtacaaaaattgttatatcatcaggttccgtccgaaattgaaggtaagaggactttgagagcaccaactttctttgtttcccaagatgacaataattttgagactgaatttttccctagagattcagaagctgagcgccgtatttcattttttgcccaatctctatccactccaattccagaaccactaccagttgacaacatgccaacatttactgtattaactccccattacgccgagaggattctattatcattgagagaaattattcgtgaagatgatcaattttcaagagttactcttttggaatacctgaagcaattacacccggtagaatgggactgttttgttaaggatacgaaaattcttgctgaagaaacggccgcatatgaaaacaatgaagatgaacctgaaaaggaagacgctctgaaatctcaaattgatgatttacctttctattgtattggtttcaaatctgctgcaccagaatacaccttacgtacgagaatctgggcctctttaaggtcgcaaactttgtatcgcacaatctcggggtttatgaattattcgagggccataaaattactttatcgtgtggaaaatccagaaatcgttcaaatgttcggtggtaatgctgatggattagaaagagaactggaaaaaatggcaaggcgaaaattcaaattcttggtttcgatgcaaagattggccaagtttaaaccacatgaactagaaaatgctgagttcctgttgagagcttatccggacttgcaaattgcctacctggatgaagaacctcccttaagcgaaggcgaagagccaagaatttactcggccttaattgatggtcattgtgagattttagagaatggtcgtagacgtcccaaatttagagttcaactatccggtaatccaattcttggtgatggtaaatcagataatcaaaatcatgctttgattttttacagaggtgagtatattcaattgattgatgctaatcaagacaattacttggaagagtgtttgaaaatcaggtctgtcttagcagaatttgaggaattgggaattgagcaaattcatccttatactcctggtttaaaatatgaggaccaatccacaaatcatcctgttgcaattgtcggcgctagagaatatattttctcagaaaactctggtgttcttggtgatgtagcggctggtaaagaacaaacttttggtacattatttgcccgtactttggcacagattggtggtaaattgcattatggtcatccagattttattaatgcgacattcatgactactaggggtggtgtttccaaagcacaaaagggtctacatttaaatgaagatatttatgccggtatgaatgccgtacttcggggtggtcgtatcaagcattgcgaatattatcagtgtggtaaaggtagagatttaggttttggtacaattttgaatttcactactaagatcggtgctggtatgggtgaacaaatgttatctcgtgaatactattatttgggtacgcaattacctattgaccgttttttaacattttattatgcgcatccagggtttcacttgaataacttatttattcaattgtctctgcagatgttcatgttaactttagtgaacttgcatgctttggctcatgaatccattctgtgtgtttacgatagggataagccaattactgatgttttgtatccaattggttgttacaactttcatcctgcgattgattgggtgagacgttatacactatctattttcatcgtcttttggattgcttttgtccctattgtcgttcaggaattaatcgagcgtggtctgtggaaggcgacacaaagatttttccgtcacattttatctctatctccaatgtttgaagtctttgctggccaaatctattcttcagcactgttaagtgatatcgctgtgggtggtgctcgttatatttcaacaggtcgtggctttgctacatctcgtatacctttctctattctttattcaagatttgcgggttcagccatttatatgggatcaagatcaatgttgatgttattatttggtaccgtggcacattggcaagctccactattatggttttgggcatcattatcagccttaatctttgcaccattcattttcaatccacatcaatttgcttgggaagattttttcctagactacagagattatatcagatggctgtcaagaggtaataataagtaccacaggaactcatggattggttatgtaagaatgtcgaggtctcgtgttactggtttcaagcgcaaactggtgggtgatgagtctgaaaaatctgcaggcgatgcaagcagggctcatagaaccaatttaattatggctgaaattataccgtgtgcgatttacgcagcaggttgttttattgccttcacgtttattaatgcacaaactggtgtcaagactactgatgaagatagagtaaattccaccttacgtatcatcatttgcaccttggcgcctattgttatcgatattggtgttttattcttctgtatgggtttgtcatgctgctctggccctttgttgggcatgtgctgcaagaaaactggttctgttatggcaggcatcgctcacggtatcgctgttgttgtccatattgtctttttcattgtcatgtgggttttagagggttttagttttgttaggatgttgattggcgttgttacatgtatacaatgtcaaaggttgatttttcactgtatgactgtactgttgctgacccgtgagttcaagaatgatcacgctaatactgccttttggacaggcaaatggtacagcaccggtttaggatatatggcatggacccaaccgacaagggaattgactgcaaaagtcattgagctttccgagtttgcagcggattttgttttggggcatgtaattttgatcttccaactaccagtcatttgtattccaaagatagataagtttcactccatcatgttattttggttaaaaccatcccgtcaaatccgtcctcctatttactctttgaaacaagcacgcctacgtaaacgtatggtcaggaggtattgcagcttgtactttttggtactgatcatattcgcgggatgcatcgttggccctgccgttgcttcagcacatgtttcaaaagaccttggatctgggttgaaggatactttccataacttggttcaaccaaggaacgtatctaacaatgatacagggttccagatgtctacttataagagtcattattacactcatacgccatccttaaagacctggtctacgatcaaatga

SEQ ID NO: 76709 - DNA, 720 bp, Saccharomyces pastorianus
atgagctcaagtttgcctaggtctttactccgtttaggacatagaaagcctttgtttccacgatataatactttcgtgaactcatcggtaataactcatacgtcactgcttagagcaagattatatagtaatggcactggcgcaacatcaggaaagaaggatgacaagactaggaataaacctaagccattatggcctcaagtaaaatccgcttctacgttcaccttttctggcatacttgtgataggagctgttggtatatctgctattgttatttacctaattctttcagaactattttcgccttcaggtgatacacagcttttcaacagagcagtttctatggtagagaaaaacaaggatataagaagtttgttacagtgcgacgatggcattacgggaaaagaaagattgaaagcgtacggtgagcttataacgaatgacaaatggacaagaaacaggcctatagtatctaccaaaaaattagataaagaaggtaggacacatcactatatgagattccacgttgaatccaaaaagaaaatagcgttggttcacttagaggctaaagaatccaaacagaattatcaacctgactttatcaacatgtacgttgatgttcccggagagaagcgttactatttgatcaagccaaaattgcatccggtttctaattcgaagggctttctgggaattagatggggccccagaaaagattaa

SEQ ID NO: 76710 - DNA, 351 bp, Saccharomyces pastorianus
atgttactcacaccagccaagactacaagaacggaagactcagcaaactcaacagatgacagcagtaaaagcagtaattcattcatgcgtgccatagtttcttcccttatggttaagcccataacatctctgactaatacagtcacatgcagacaaagttcccatcacaatagctctccgagtaaaatcacaagatatgatttaatcaaagctgctgctgaaaatgacttgaaaaggagtaagtctcagggacgagaaaaatccagaagaaactctaatcgtagaaataatgaagaaatttttgtggccaatactgcttcagaaatccaacggactaaaagtagcatatag

SEQ ID NO: 76711 - DNA, 720 bp, Saccharomyces pastorianus
atgaatagtaccgccgctgcaataaatccaaatccaaatgttataccattcgatgacacgtacattctatatgattcgcatgactttctatcattccttagtgcatatttctcgctgatgcccatcctagtgctagctttctatttgtcgtggtttatcatcacaagagagttagaagcctgcattgtagcctttggccaattgatgaacgaaatattcaataacgtgatcaagaatataataaaacagccacgccccgtatcgttcggtgcgtcgttccaaaatgacactataagatccggttacgggatgcccagtgcacactcccaattcatggggttttgttttacctataactctctgaagatatacacttcctggaagaatctaaacttcttagaaaaatgcattttttctggtgcattggctttattatcgttttgcgtttgcttttccagagtttacttgcactaccacaatttagatcaagtaatcgtgggattcagcgtgggggcactgactggatcactttatttttttatagttggcatcataagagagcttggtttaatcaattggtttttaaaactacgtattgtcagattattttacatgacagattcttacaatctggcgcctttgacattgaaagagaattacgaggcgtattggaaaagaataaatcagcgatctttcaatgataaatccaaaagggattag

SEQ ID NO: 76712 - DNA, 264 bp, Saccharomyces pastorianus
atggtttcccaattattcgaagaaaaagctaaagccgtcaacgagctaccaacgaagccctccactgatgaattattagaattgtatgctctgtacaagcaagccactgtaggtgacaacgacaaggaaaagcctggtattttcaacatgaaggaccgctacaagtgggaagcctgggaaaacttaaaaggtaaatcccaggaagatgccgaaaaggaatacattgcccttgttgatcaactgattgccaagtactcctcttag

SEQ ID NO: 76713 - DNA, 669 bp, Saccharomyces pastorianus
atgaccgaattagattatcaaggaactgctgaggcggcttctacctcgtatagtcgaaatcaaacggaccttaagccgtttccttctgcaggcagtgcatcttcatcaattaaaacgacggaacctgtgaaagatcatagaagaaggcgttcttccagcataatttcacatgtggaaccggagacttttgaagatgaaaatgaccagcaacttctaccaaatatgaatgctacttgggtagaccaacgcggcgcttggattattcatgtggtcattatcatactgctgaaactattttataatttatttcctggtgttaccacagaatggtcgtggactctgactaatatgacatatgttattgggtcctatgtcatgttccatctgattaagggtacccctttcgatttcaatggtggtgcttatgacaacttgacgatgtgggaacaaattgacgacgagactttatatactccttcaagaaaatttttgattagtgtcccgatcgccctattcttagttagtactcattatgctcactatgatttgaaattgttttcatggaattgttttttgacaacctttggtgctgttgtcccaaagttacctgttactcatagattaaggatttctatcccaggtatcacaggtcgcgcccaaattagttga

SEQ ID NO: 76714 - DNA, 312 bp, Saccharomyces pastorianus
atgttattttttaccggcttagtaatactgagctacttacttgagggaaagaaagattggctacttattatgtatgaagcctcagattaccttgaattcctcaaccgtttgagcagtatgctcttcaaattcgaactttttgaacatctttcctccacattcctgattttttcacattcaaaacgcgctgtgaagctgttagaaatttacagatcgaggcatatttctatatatgatgtatttttattaagacacccaaagtacttccaatctgtagatattgcactttatctgaccagaagccagacttga

SEQ ID NO: 76715 - DNA, 1107 bp, Saccharomyces pastorianus
atggctagaaccataacttttgatatcccttcccaatataaactcgtagatttaataggtgagggagcgtacggaacagtatgttcagcaattcataagccttccggcataaaggtagctatcaaggaaatacaaccgtttagcaaaaaattgtttgttacaagaactatacgtgagatcaagcttttacggtatttccatgaacacgaaaacataataagtatactggataaagtaaggccagtatccatagacaaactaaacgctgtttatttagtcgaagagttgatggaaaccgatttacaaaaagtaattaataatcagaatagcgggttttccactttaagtgatgaccatgttcaatactttacataccaaatcctcagagccttaaagtctattcacagtgcacaagttatccatagagacataaagccatcaaacctgttactaaattccaattgtgatctcaaagtctgcgattttggactagcgaggtgtttagctagcagtagcgattcaagagaaacattggtaggattcatgacggagtacgttgcaacgcgatggtacagggcacccgagataatgctaacttttcaagagtacacaactgcgatggatatatggtcatgcggatgcattttggctgaaatggtctccgggaagcctttgttcccaggcagagactatcatcatcaattatggctaattctagaagtcttgggaactccatctttcgaagactttaatcagatcaaatccaagagggctaaagagtatataacaaacttacctatgaggccacccttgccatgggagaccgtctggtcaaagaccgatctgaatccagatatgatagatttactagacaaaatgcttcaattcaatcctgacaaaagaataagcgcagcagaagctttaagacacccttacctggcaatgtaccatgacccaagtgatgagccggaatatcctccacttaatttggatgatgaattttggaaactggataacaagataatgcgtccggaagaggaggaagaagtgcccatagaaatgctcaaagacatgctttacgatgaactaatgaagaccatggaatag

SEQ ID NO: 76716 - DNA, 1644 bp, Saccharomyces pastorianus
atgacgaaaataaccagagatgtttcgataacgacagaaaattcaaaatccacatctggatcggcaacggcttcatccgcatctttacctgagaacgaccacccaatattccatcaaccgcgagcaagaataagatctggttcgctgttcatcgaaggatctgattcatttccatcatcagaagtgaagtcatacaatgtttatattgatgatagcaagtatagtgaaatcctcaaaggagatacaaattcaagtagtactgatggtaaacaagtctttgaagatgctagagatgacaatttccatcaggaatcacatagagatctagaggattcaattttagatttagtacgacgagatccagaagtagcagcattccctttacctccgccaaattcaaatgagaggaacagaaattcctcaaacgggtcttccgctgaaactaacctaaatggacacagcagcagcggtaccatctctacttcggtgctgttgaatatgggttcggcagaaaagcacgctgggacgaccagaggagatcatatggaatcatcttcaatgaaatccttcgagaaactgggaaccagaccttcttctttattctatccaccacccgaaggaactgcgccgtaccagggaccaagggctaccgtctccggaaataagtctacaaggcaaacacaaggtacatactcatttccttctatgcggtatggtgtagatcttgtttctcctgtggaaggggctgttgatgtagcaaaaagcagagttcctaacagcacactaaatggtacttttcccgataaagcgtttatcccacatgaatttcaaattcctaaaaaggcctggaacagaataccagcgaataagtccactagcctcaaaaccccaagaaaccattccctattaattgacatattaaagccttttgaagcagctgaccttgctaatgaccagcgaagttcttccgctgttttaaaaaatacagtgcattctaatgggcagtataatccaactaatgaaacctctggaactcgaatgcaagatcaaaggcagaagaataccaacgaaattgatttagagaaaattcctaatcctcaagtccctcttggtatcgcaatggacaccatgcgtagtccaaaccaactacacgaaaaggaatacgaaagtaatatagaagctggtttagcttctggggtcggaaaaggtgacaatagtattaagcaacatcaatataaaaaaattcctcaagaaattgatcgagatcaacaattaagttttcaaatggaaacaatgcccattcaaaggatagattcctcctccatacgttcatttgattcccgaatatatggcttctccgagatttatagtattccaagggttataactacactgtgcatctgcctttttgttccgcccttattctttttcttttcaatcaatggaaataatggcgtttcaaattatagattaatgagaatgataatgaattatgaacatagaatcggcctcctcaaagggtttgaatgggacattgacgtacaatggttcaggacattgtgctttgtattaggatgtatagagatgttagctatctttgctagcataggaataggatttggtgtgggaataacaagagagtaa

SEQ ID NO: 76717 - DNA, 816 bp, Saccharomyces pastorianus
atgctctctcatatcgttgagtatgaatgccaatacactgatcagctttacaagaaacgtaaaatctggcacgatggtagactgaaatactttcagttaaacaacagattcatgctttatacggaaaaggataacgttttgttagctagtgaatttaaaataaattcaaaagagctgaaagcaattctaaatccagaaggttttgatattgaagaacataggatttttagtcagtttttggtgattatttcaaatattattgaggagtacgatagagatattcaagtggcagcaacgcatgttagggcatatccttcaaatttgtcggtgcaaaaacaacgccctcttatctcagacaatgcaccaagtttgaatcatatctcaactgcgagagaagttcattcgaacataaaagtcacaactcccaatcgcaagcagacagaggacaatgccaccaagggaggattcaacatcagcaaacgtactctgaaggtctataagcctttcaagaagcccaagaggatattaagtactaatgtggtaaatgaatcaaatagaccgagcataaggagccaaaagattcaggaagtgacaccacaactacacgaaacaaacacaagcactaaagtgcagacagccggaaaagttgcgttgaataatgataatattgcgcaaggtaattacgccacgattaccgaagaatctaaagtcagagacggttccgacagaaagaaagatatggcgaacctatccaaaagtggtaaaaggagagtgggcgggatacgaagaattgttcacgaacccctcggaatttga

SEQ ID NO: 76718 - DNA, 1002 bp, Saccharomyces pastorianus
atgtcagaaccttcagagaaaaaacaaaaagttgctacctcatctttagaacaattaaaaaaggccgggacccatgtggttgctgattcgggtgattttgaggctatttcgaagtatgaaccacaggattcaacaactaacccttctctgatattggctgcttcaaagttggagaaatatgcgaggtttatcgacgctgccgttgaatatggtagaaagcatggcaaaaccgatcatgagaaaatcgagaacgccatggataagattttggtggaattcggcacccagattttgaaggtagtcccaggaagggtttccactgaagtagatgcaaggttatcttttgataagaaggcgacggtgaagaaggctctccacatcatcaaactatataaagatgcgggagtacctaaagaaagagtcttgatcaagatagcttctacgtgggagggtatccaagctgctagagaattggaagtaaagcatggtattcattgtaatatgacattactgttttcctttacgcaagcagtagcctgtgcggaggcaaatgtcacattgatctccccatttgttggaaggattatggacttttacaaggccctttcaggcaaagactatactgcagaaactgatcccggtgttctttctgttaagaagatatacagttactataagaggcatggttatgcaactgaggtaatggcggcttctttcaggaatttagatgaattgaaggcgttagccggtattgataatatgactctcccactgaaccttctagaacagttatatgaatcaacagatcctattgaaaacaaattgaattctgagagtgctaaggaagaaggcgtcgaaaaagtctcttttatcaacgacgagcctcatttcagatatgttttaaacgaagatcaaatggctacagaaaaactatcagatggtatcagaaaattctccgcagacattgaagcactgtacaaactggttgaagaaaaaatgtga

SEQ ID NO: 76719 - DNA, 903 bp, Saccharomyces pastorianus
atgtcaccgtgttatggacaaaacagtgccatcgccaaggggtcttggaacagagaggttttacaagaggtgcaaccgatttatcattggcacgatttcgggcaaaacatgaaagaatattcggcatcacccttagagggggattccagcctgccttccagcctgccttccagcactgaggactgtttactactatcattagaaaacacaatcacagttatagccggaaatcagagacaggcttatgactctacgtcgtctactgaggaaggtacagcacctcaattacggccggatgaaatagcggacagtacacactgtatcacgtcattagttgatccggagttcagagatcttattaattatggacgtcaaaaaggagcaaatcctgtatttattgagagcaatacaacagaacaatcccattcacagtgtattctaggctatccccaaaaatcgcacgtggcacagctatatcacgaccccaaagtactcagcacaatttccgaagggcaaacaaaaagaggaagttaccactgttctcattgttctgaaaagttcgcaacgttagttgagtttgccgcgcacttagacgaattcaaccttgaaagaccgtgtaagtgtcccatagagcaatgtccctggaaaatattgggtttccaacaagcaactggtctgagaagacattgtgcttcccaacatataggagagcttgatatagagatggagaaatcattaaatctaaaagtagaaaaatatccaggactgaattgcccatttcctatctgtcagaaaacgtttaggcgcaaagacgcctataagagacatgtggccatggtgcataacaacgctgattcaagatttaacaagcgtttgaagaaaattttgaacaataccaaatag

SEQ ID NO: 76720 - DNA, 1158 bp, Saccharomyces pastorianus
atgttacgagtttctgaaaatagtctacggtttctgctgaaatgccattcaacgaacgtaagcatgtttaataggcttctgagtactcaaataaaggaggggagaagttccatagatgatgctggcattatccccgatggaactattaacgaaaggccgaatcactacatcgagggaattactaaaggcagtgatctggacctcttggaaaaaggtataagaaaaactgacgaaatgacttccaattttacaaattatatgtacaagtttcacagattgccccccaactatggaagtaaccagctcattactatcgataaggaacttcaaaaggaactggatggggtaatgtcatccttcaaagctccgtgccggtttgcatttggttacggctcaggagttttcgaacaagcgggatattccaaaagtcatagcaaacctcaaatcgatataatcttgggcgtcacatatccatcacattttcactctattaatatgaggcagaatccgcaacattattcaagtttgaaatacttcggttccgagttcgtgtctaaatttcaacagatcggcgcaggcgtatattttaatccatttgcaaatataaatggacacgacgtaaaatatggggtggtttctatggaaacacttttaaaggacatagctacttggaatacattctatttagcaggacgactacaaaagcctgtaaaaatattgaagaatgatttgagagtgcaatattggaaccaattaaacttaaaagctgcagctactttggccaagcattacaccttagagaaaaataacaataagtttgacgaattccaattttacaaggagatcactgccttaagttatgcaggtgatattagatacaaactgggtggagaaaatcccgacaaagttaacaacattgttaccaaaaactttgaaagatttcaagagtattacaagccgatttacaaagaagtggtcctaaatgattcattttatcttccaaaagggttcacattaaagaatactcagagacttttgctcagccgtattagtaaatcaagtgcattacaaactattaaaggtgttttcacagctggaatcacaaagtcaattaagtatgcttgggccaaaaaactaaaatcgatgaggagaagctag

SEQ ID NO: 76721 - DNA, 3078 bp, Saccharomyces pastorianus
atggcagcaggaaaattgaaaaaggaacagcaaaatcaatcagctgaacgagaaagcgctgatacgggtaaagttaacgatgaggatgaagagcatctatacggaaatattgatgactataagcatttgattcaagatgaggaatatgatgacgaggatgtacctcatgatctacaattaagcgaagatgaatataattccgaacgagacagttctttgttggcagaattctcggactacggtgaaatatctgaagacgatgaggaagatttcatgaacgcgattagggaagcaagtaactttaaggtaaaaaagaagaagaaaaatgacaaaggtaaatcttacggccgccaaagaaaagaaagagtgcttgatccagaggtagcgcaattactttctcaagccaatgaagcttttgtcaggaatgatttacaagtggccgaaagattatttaatgaggtaattaaaaaagatgcacgtaattttgctgcttacgagaccctaggagatatatatcaattgcaaggaaggcttaatgattgttgtaactcttggttcctggcagctcacctaaatgcttccgattgggaattctggaagatagtcgctatactgtccgccgatttagatcatgttaggcaggccatctactgcttttccagggtaataagtttgaatcctatggaatgggaatcaatttatcgccggtctatgttgtacaagaagacaggacagttagcaagagctttagatggatttcaaaggctttacatgtacaatccttatgatgcaaacatattgagggagttggccattctttatgttgattatgatcggattgaagattcaattgagctctatatgaaagtgtttaatgctaatgttgagagaagggaagcgatattagctgctttagaaaatgccttagattcttcagacgaagaaagcgccgcagaaggggaggatgcagacgaaaaggagccccatgaacaagatgaagataggcagatgtttcctgacatcaactggaaaaaaattgatgcaaaatataaatgcataccatttgattggtcttctttgaacattctcgcggaacttttcttaaaactcgcagttagtgaggtcgatggtataaagacaattaaaaaatgtgcacggtggattcaacgccgcgaaagccagacatattgggatcatgttccagatgattcagaatttgacaatagaaggtttaaaaacagtacctttgattcactacttgccgcagaaaaggagaaatcgtataacattccaatcgatattagagttagattgggattgttaagattgaacacagataaccttgttgaagctctgaatcattttcaatgcctgtatgatgagactttcagtgacgttgcggatttatattttgaggctgcaactgctttaacaagggctgaaaaatataaagaggctatcgatttctttacgccgttgttatcccttgaggaatggcgtaccactgacgtcttcaaaccactagcaagatgctacaaggaaatcgaaagttatgaaacggctaaagagttttatgaactagctataaaatctgaaccagatgatttagatattcgtgtatctttggcagaagtttactatcgcttaaatgatccagagacttttaaacatatgttagttgacgttgtagaaatgaggaaacaccaggttgatgaaacactgcacaggatttctaacgagaaaagttctaacgatacttcggatatttctagtaaaccgctgctggaggatagtaaatttagaactttcaggaaaaagaaacgtacaccttatgatgcagaaagagagagaatagaaagggaaagaagaataacggcaaaagtcgttgataaatacgaaaaggtgaaaaaatttgaactaaattcaggtctcaatgaagccaaacaggcatctatatggattaatacagtttctgaattagttgatatattttcgagcgttaagaacttttttatgaaaagtcgatccaggaaattcgttggaatactaaggagaactaaaaagtttaacaccgagcttgatttccaaattgaaaggttatctaaattagctgaaggagatagtgtgtttgaagggccgctaatggaggaaagagtaaccttaacttctgccacagagttgagaggattgtcgtatgagcagtggtttgagttatttatggaactttctttagtaatcgcaaaatatcaaagtgttgaagacggcctgagtgttgtggaaacagcccaggaagtaaacgtgttcttccaggatccagagagggttaagatgatgaaatttgtgaaactagctattgttcttcaaatggatgatgaagaggaattggccgaaaatttaagaggtttactaaatcaatttcaatttaatagaaaagttttgcaggtatttatgtattctctatgtcgaggaccctcttccctgaatattttgagctctaccattcaacaaaaatttttcttaagacaactgaaagcttttgacagttgtagatataataccgaggtaaatgggcaagcttcaattacgaacaaagaggtgtacaaccctaataaaaagtcgtcgccatatttgtactatatctatgctgttcttctctattccagtaggggctttctttcagccctacagtatttaactaggttggaagaggatatcccagatgacccgatggtcaatcttttaatgggtctgtcacatattcatcgtgctatgcagagactaacagcacaaaggcattttcaaatttttcatggattacgttatctatatcgttatcataaaataaggaaaagcctatatacggatttggaaaagcaagaggcagactacaacttagggcgtgctttccatttaatcggtctggtatcgattgcaattgagtactataatagagttctagaaaactacgatgatggaaagttgaaaaaacatgctgcctataacagtattataatatatcagcaaagcggaaatgttgagttggccgaccacctcatggagaagtatttaagtatttga

SEQ ID NO: 76722 - DNA, 1086 bp, Saccharomyces pastorianus
atgttttctggcttcagttcttttggcggcggaaatggttttgtaaatatgcctcaaacgtttgaggagttctttagatgctaccctatagctatgatgaatgatagaatacggaaggatgacgcaaacttcggcgggaaaatattcctgccaccaagtgctctaagcaaactatccatgttgaacataagataccccatgctttttaaactaactgccaatgaaactggacgtgtgacgcatggaggtgttttagaatttattgctgaagagggcagagtttacttaccacaatggatgatggaaactttgggtatacagccaggatctctactgcaaatttcatctactgatgtacctctgggccagtttgtgaagttagaacctcagtctgtagatttcttggatatttccgaccccaaagcagttttggaaaacgtactgaggaatttctcgactttgaccgtggacgatgttattgagattagttacaatggtaaaactttcaaaattaagatcttagaagtcaaaccagaatcatcatcgaagagtatatgtgtcattgaaacagatttagtaacagattttgctccacctgtaggatatgtggaaccggattacaaagcgctgaaagctcagcaagataaagaaaaaaagaattcttttggtaagggccaagttttggatccctcggtgcttgggcagggatcgatgtccacaagaatcgactatgcgggtatcgctaacagtagcagaaacaaactatctaaatttgtaggtcagggacaaaacatatctggtaaagctccgaaagcggagcccaagcaagatataaaagatatgaagataacgtttgatggcgagcccgccaagctagatctgcctgaaggccaattattctttggtttcccaatggtcctaccgaaagaagacgaagaaagtgccgctggtagcaaatccagtgaacaaaatttccaaggccaagggatctcactaaggaagagcaataagagaaaaacgaaaagtgaccatgattcgtccaagtccaaggctcccaaaagcccggaagtaatcgaaattgactaa

SEQ ID NO: 76723 - DNA, 564 bp, Saccharomyces pastorianus
atgcaagtctccccagctattgtaaaaggtatcgcagtctcatcattaggtttatacgccggtattttaacttcatctaccgtgatttctattaccaccccaataaatgttctaactcaacatttgaagaatgttttgtgcacattaggatgctggagcaccgttttaggtggtttagctactggtgcctttggactcagctactatctagctgcaccaggagaaagaccaaactaccttttgtgcggacttggtgtcgccccattatctgcagcctacctatacttagtatcactgttcaatcacaagctagccccaaaatgcacacgtgaccaaaatgatttagaaaagcaaaaggatgaaaaattaccccaacatcacccggaagtcaaagatggggaagctgcatgcccattctcaaagatgaacaacgccaaaacattaaaacctgaatccgaaagaagcgtaaaatgtcactcctacatgtcattgcacatgagcattgtaaccggtataacaatttttacctttggtaagtgtatcctagatggattcaaagcatga

SEQ ID NO: 76724 - DNA, 1110 bp, Saccharomyces pastorianus
atgtatacaaaactaagatctatacaatcaggaacatttagcacagtttataaagcatggagtactacacataaccgctacgtcgctttaaagattactcctaaatacaaaacttcagaagccaacatgaagaacgagtatgatgtaatgaagattttgaattcttgtaatcctcaccccaacatctgttcgatgctcgacttttacacggatgactcgtactacatcatggtgctagaatactgcgaatgtggtgatctttatgactttctagatattgctaagagtcaaggtagcccgtcgtctccatctttgattcaaattgatatgcaaaagataatcaaacaactgtgctcagcaatcagctttgctcacagcttgggtattgctcatcgtgatatcaaatcagaaaatattttgctaacgataaatggtgacatcaagttggcagactggggtcacgctatccaatcccctaaatctaacgacttccagattggtaccgataattacagggcgccagaaactttctctggccgcgttagtaactcttgttttaagaagaatttcgatcggtcatcggctccattgtataacacataccaagctgactattggtcattgggtgccaccatattttatctgatgttcggcgattgcctttttagagtctccaaatcaaagaaggttcagcatctaaaaaatttcgatgagtttgaaaaagatccatttgcattcatttacaggaaatacgtagtaccaaggctctcctgtggttacaatgatgaagaagacctacacgttagcctgcagcatatgaggcagtacatatggcaagatctacccgacatttatgatgtcttccatttgtgcaagattatggttgataccttattaaaggtatcgaacgttattgagaggtcgatggagaatttcatcaatgaagttgattctgcatggaacaaagatagctcgatggacagctgcttctcgtaccaaaataagattgatctgttttgggaacagtggtctgtgaacacggaagcagtaccagcaaagttccaattgaaaaattttgagaaaccttgcctaattcaagatggaaaataa

SEQ ID NO: 76725 - DNA, 852 bp, Saccharomyces pastorianus
atgttactaaagtttgtttgcagagccggcataatatctatcaaaggaatctttcctcgatggtactccaattctcaaaaagtggccaatttggggcaaataacagattatttagtggttaaaggtgttcccaatttgttacaaaaaatgttcaaggagtcagtgttggcggataacattgtttttagactatttccaacatcgcatccatatattccagtgttacatggaaaatcaaaatacatggcttctttgaatgcaatgcgaatgatagtacgaaagtttatcttgggcgatgaatgtcgcttgcatataagttcagtaaagattctaacatcgacatcgcatgatgaagaagttaaatctgctcttcagagttataataccataacatgtaatgacaaattggtgatcaaatggcaaagctgcataccggaagaccattgcaagattaccaaattagaaattaatgacagattgaaagaggagaaacgaggcaatggtgcaggcggttcattttcaatgaggtcggtaccagtcatagactacattttacatcctacagccaataatttgaaccaaagtgttatctctgagtaccttgaaaatgcagctgaaaggtcaatggaaaataaggtcaacgaaactcaaaattccaaagaagatgagaagaagaaaaatgatggcgacggtaaaagaagtaaaaaaaagagattatcccggctgattaagggaacattcatattcgaatttaacgaagaaaattcgaaaattctggttcataccattgaagatgttgaactgatccattacgagaagaaaattgccactcgcggtgcatttgcatgttaa

SEQ ID NO: 76726 - DNA, 1929 bp, Saccharomyces pastorianus
atgtcatctcagtttttcctgaaaacctctcaggatatagagctcttccaaagctacccaacttttgagcaatccaacacaaactccaaggatttccctgtcatttcctcggttttatcgccatgtggcagatttttggctttatctacgaaggagaacgtcaaagtttttacaggtccatgtttggataacgttctattaacaatgaagttgtccgacgtctatgacctacacttctctccagcaggtaactacttaagcacttgggagagagcgtctatacaagacccaaatcacaagaacgttaaagtttggtatttgaataaaccatttaagaaagattgcgtttcggaggatatagtccctgcttacgaatatcaagccaaatcccaaagcggttggtttttacaattctccaaattagacaattatgggctaagactttttaaacacgacttgaagattgttaaattaagctccgctaatgccgacaatttcgacttccaatctccgtttgctgtcttgtctgatgatgaaacgtcccaacatttcaccacctacctaatctctccagctgaacatccaacaatttgtactttcacaccagaaaagggtggtaaaccggctcaattaatcatatgggccctctctgaaggtaaaatcaccaagaaaattgcctccaaaactttctttaaagctgattcctgccaattgaaatggaatccattaggtaatgctattttatgtttagctattactgattttgattcctcaaacaaatcatattatggtgaaaacacactatacttactgtctttccaaggtgtcaacgggactttgggtggtaactctgtacgtgtttctttaaccactggacctgtccacgatttcacttggtcgccaacttcaaggcaattcggtgtcatcgctggttacatgccagcaaccatttccttttttgacttaagaggtaatgttgtccattcattacctcaacaagccaaaaataccatgcttttctctccctctggtcattacattcttatcgccgggtttggtaatttacagggctccgtggaaatcctagatcgtctcgacaaattcaagtgtgtgagtaaatttgacgctaccaacacttctgtctgcaaatggtcaccgggtggagaatttatcatgacagctaccacttcaccaagattgagagtggataacggcgttaaaatatggcatgtatcaggctctttagtatttgttaaagagttcaaggagcttttgaaggtagactggaggtcaccatgtaattacaaaactttggaaaacaaagacgaagcatttttcgagaaccatatcattaataactgggaaccgctacctgattcgaccacatcttcacttgatcctaaaatatccaataaatcagaattgcaaatacattctagcgttcaagagtacataagtcaacacccaaacagagaagcaagctccaatggaaacggatctaagaccaaagctggaggcgcttataaaccacctcacgcaagaagaacaggcggtggacgtattgtccccggagttcctcctggtgcagcaaagaagaccatcccagggctagttccgggcatgagtgccaacaaggacgccaacatcaagaacaggagaagaagagccaataaaaagtcaagtgaaacgtcacctgattctactccggccccatctgctcctgcctccacaaatgcccccacaaacaataaagaaacttctccagaggagaagaaaataagatctttactaaagaaattaagggctattgaaaccttgaaggaaagacaggccgtcggtgacaaattagaagatacgcaagttctaaaaattcaaactgaagaaaaagtgttgaaagatttggaaaagttgggttggaaggatgaataa

SEQ ID NO: 76727 - DNA, 1725 bp, Saccharomyces pastorianus
atgtcggaaggaagaacgtttctgtcacagttgaatgtcttcaacaaggagaactatcaattttcttcttctactacaaaaaaggaagtaagtaactcaacagtggatgctgacaacggtgcctccgattttgaggcaggccagcaatttgctacagaattggaccaaggtgaaaagcagttaggtattttgtcgtgtattgggcttatctgtaatagaatgcttggtaccggtgttttcgccgtttcctcgaccatttacacactatgtgggtctgtggggcttgcattaattatgtgggcagttggtgccattattgccatttctgggttatatgtatacatggaattcggtacggctataccgaaaaatggtggtgaaaaaaactacctggaggccattttcaggaaaccaaaattcttcattacctgtatgtatgctgcgtatattttcttcctaggttgggctgctggtaattccatcaatacagctattatgtttttaactgctgctgatactgaagtgaccaaatggaatcaaagaggtattggtgtggccgtcgttttttttgcattcctaattaattctctgaatgtcaagattggtctatatttgcaaaacattttaggtattttcaagattggtattgtcctcttcatttctattaccggttgggttgcccttggcggtggtctcaaagatggttatcaatctcacaactttcgtaatgcttttgaaggttctgaaaccgccactgcttatggtattgttaacgccttatatagtgttatttggtcgtttgtcggttactccaatgttaactatgcacttggtgaagttaagaaccctgtgagaactttgaagattgctggtcctacatcgatggtcttcttggctataatctacatttttgtgaacattgcttacttcgctgtggttccaaaagataagttaatttcttcaaaattgattttagctgctgacttcttcgatattgtgtttggcggccaagccaagagagcagcagccgcactggtcgggttgagtgccttaggaaatgttctttctgtcattttttctcagggtagaattattcaacaactaggacgtgaaggtgtgttgcccttttctaatttctttgcctcttctaagccattcaactccccaatggttggtttgtttcaacattttattgtttgtacagtaaccatcttagccccacctccaggtgatgcatatttgctagtccaaaatttaatttcctacccaatgaatattattaattttgctattagcgcggggttgctttggatatactggcaacgtagacaaggtaaaattgaatggaacccaccaattaaggccggtgtttttgttacgggatttttcacattatccaatttatacctgattattgctccttacgttccaccttcaaatggcgagtcggtgtattcaagcatgccatactggatccactgtgtaattgcttggggtattttcttctttggtggtgtttactacgttgtttgggcccaattattgccaagatggggccactacaaattggtttccaaggatgtgcttggtgaagatgggttctggagagtcaaaattgccaaagtttatgatgacactattggcgatgtcgatacacaagaagacggcgttattgaaacgaatataatcgaacattacaaaagtgaacaagaaaaatcgctgtaa

SEQ ID NO: 76728 - DNA, 2787 bp, Saccharomyces pastorianus
atggtggagcaagataatgggtttttacagaagctactcaaaacacaatacgatgctgtcttccatttaaaggatgaaaatggtatagaaatatatccaatattcaatgtactgccacctaaaaaagaatatccagactattacattataataaggaatccgatatctttaaacactttaaagaaacgattgccccattatacatcgccacaagattttgttaacgattttgcgcaaattccttggaatgcaatgacatacaatgcaaaagattcagtaatttacaaatatgccattcttcttgagtcttttattaaaggaaagatcgtgcacaatataagaaaacattatcccgaggtgacatatccatctctaggtcgaattccggaaatattcgcagagagtatgcaaccctccgatttatcctcgaaccccattaatacacaggaaaatgatgaaaaggctggcttaaatccagagatgaaaatggctttcgcaaaactagatagttcgatcactgaaaggaaaccaaccaaccaagattacaggatgcaacaaaaaaactcaccagcgtttccaacccattctgcttctataacaccgcagccgctggcttcacctactccagttgttaactatgcaaatattacctcggcgcatcccaaaacccatgttagacgcggtagaccaccagtaattgatctaccctatgtactgaggattaagaatatcttgaagatgatgagaagagaggtcgaccaaaataataagacgcttaccctctgttttgaaaaactaccagatagaaacgaggagccaacctattactctgtcataacagatcccatttgtctaatggatattaggaaaaaggttaagtccagaaaatatagaaatttccatagttttgaggaagactttcaattaatgctaacaaattttaagctttattattctcaagatcagagcaatataatacgagctcaactattggagaaaaacttcaatagattagtgcgaattgaattatccaaacctgatgaagactatttacctgaaggtgaattaagatatcctctagatgatgtagaaatcaatgatgagaaataccagataggtgattgggttcttttacataatccaaacgacatcaataaacccattgttggccagatttttagattatggtctactacagatggaaacaaatggttgaatgcttgctggtattttaggccagaacaaaccgttcatcgggtggataggttattctacaagaatgaggtcatgaaaactggtcaatatagagatcatcctattcaggatattaagggaaagtgctacgttattcattttaccagattccagcgtggggatcctagcacgaaagtcaatggtcctcaatttgtttgcgaattccgttataatgaaagtgataaggttttcaacaaaatcaggacttggaaagcttgcctgccggaagaactccgtgaccaagatgagcctacgatacctgttaatggaagaaaattttttaaatacccttctccaatagcagatttgttaccagcaaacgcaactctaaatgacaaagttccagaacccacggagggagccccgactgccccacctttggtaggcgctgtatatttaggccccaaattagagagggatgatctgggagagtattcaacttctgatgactgccctcgatacataatcagaccaaatgatccaccagaagaaggtaaaatagattacgaaacaggaacaataattacagataccttaaccacaagcagtatgcccagagtgaacagttcctccacaatacgtttacccactttaaagcagactaaatcaattcccagctccaatttcaggtcctcatcaaatactccactattgcatcagaacttcaatcagacttccaattttttgaaattagaaaacatgaataatagttctcataatttactatcacatccttccgttcctaagtttcaatcgccctctttattagaacagagtagtcgctctaaataccatagtgcaaaaaaacagacacagctatcatcaacagctcccaaaaagcctgcatctaaaagttttacattatcctcaatgattaataccttaactgctcatacctcgaagtacaacttcaaccatattgttattgaagccccgggtgcatttgtggttcctgtaccaatggaaaaaaatataagaaccatccaatcgacagaacgtttcagtagatcaaatctaaaaaacgctcaaaatctcggtaatactgctattaatgacataaatactgcaaatgagcaaataatatggttcaaagggcccggtgtaaaaatcacagagagagttattgattccggaaatgatttagtacgggtacctttgaatagatggttctgtaaaaacaaaaggagaaaactggattacgaagaaattgaagaagatgttatggaaccaccaaatgacttcagcgaagatatgattgctaatatttttaatcctccgccgagcttgaatttagatatggatttaaatctaagcccatcctcgaataactcttctaatttcatggatttaagcacaattgcaagcggtgataacgatgggaaagaatgcgatacggcggaggagagtgaagacgaaaacgaagatacagaagacgagcacgaaattgaagatatcccgaccacgtctgcttttggcttaaattcttccgctgaataccttgcattcagattacgagaatttaataaattatga

SEQ ID NO: 76729 - DNA, 738 bp, Saccharomyces pastorianus
atgcatagaatgtcctcgatagtgatttcattggctcatttctgcgacaagcatggcccaaggatcatatcagttacacaatccgcagaaaagggaacgctaggtgaagaattactagtgcctgattatccaactgaatcatattgcgaatcatgtcttttacagtttcctgaagagtcaactagatcgatgcggtgcttcatcgaagatgttccgtttataactacccaatattcttctataagataccaattgctaaattctattattaaaagagccttttctgaagaaacaatgatttatgataatatgccttttatattttttgatgatcttagaggattgaacatagttataggctttaaactgtatgatgaaaatgctagaggcaatgaaagaagatattgttttattttaacagtcgattccagaagccatgacgattctatgaaaatgttgagtgaacactggaactttatcatcggtggatttgataaaatgattgcatatattaaaaacattcataaaagcgaactcttggggaaaaataaaacggtggaaaacaatttggaaacattgaataataacgctttcattggctcatatttacgtgcaaacaaatctaaattcggctgtaatttggtgtctctgacggatgataaatttctcttcgtgcgaatacataaatggaattcatttttactccatacagtaatgaatgaaaataaattaccttga

SEQ ID NO: 76730 - DNA, 1026 bp, Saccharomyces pastorianus
atgtgtgcaaagaagctcaaatacgctgctggcgatgactttgtacgctatgctacacctaaagaggccatggaggaaactagacgtgaattcgagaaagagaaacaacgacagcaacaaataaaggttactcaagcacaaactcccaacactagagtccactcagctccaattcccttacaaactcaatataacaaaaacagagcagaaaatggtcaccactcctatggttctccccaaagttattctccaagacatacgaaaacacctgtggatcctagatataatgttatcgcacagaaaccagcaggcaggcctatacctccagcgccaacccattataacaacttgaacacttccgctcaacggatagcttcctctcaacggatagcttcctctcctcctcccctaattcacaatcaagcagtgcctgcacaactcttgaagaaagttgcacctgcttcgttcgatagcagagaagatgtacgagacatgcaagtggccacacagctatttcataaccatgatgtaaagggcaaaaaccgactgacagctgaggaactacagaacttactacaaaacgacgacaactcccatttttgtatatcatcagtagatgcgctgataaatttatttggtgcttccaggtttggcactgtcaaccaggcagaattcatcgccctatacaaaagagtgaaaagttggagaaaagtttatgtggacaatgatatcaacggatcgctcaccatttctgtaagcgaatttcataactcacttcaagaactaggatatctaataccttttgaagttagcgagaaaacatttgaccaatatgctgagtttataaacagaaatggaacaggaaaagaactaaagtttgataaattcgttgaggcgttagtttggctaatgagattaacaaaattattcaggaaattcgatactaatcaagaaggcattgcaaccatacagtacaaagattttatcgatgctacattatatttaggtcgtttcctacctcattga

SEQ ID NO: 76731 - DNA, 930 bp, Saccharomyces pastorianus
atgtctgccgttttcaacaacgctaccctttcaggtctagtccaagcaagcacctactcacaaactttgcaaaatgtcgcccattaccaacctcaattgaatttcatggaaaaatactgggccgcatggtacagttacatgaacaatgatgttttggccaccggtctaatgttctttttattgcatgaatttatgtatttctttagatgtttgccatggttcatcatcgaccaaattccatactttagaagatggaagttacaaccaactaagattccaagtgctaaggaacaactatactgtttgaaatccgttcttctatctcatttcttggtcgaggccatccctatctggaccttccacccaatgtgtgaaaaattaggtattactgtcgaagttccattcccatctttgaaaacaatggctctagaaattggtctattcttcgtcttggaagatacatggcattactgggctcaccgtctattccactacggtgtcttctacaagtacattcacaagcaacatcacagatacgctgctccattcggtctttctgctgaatatgctcatcctgctgaaactttgtctttgggttttggtaccgttggtatgccaattctttacgtcatgtacactggtaaattacacttgttcactctatgtgtatggatcaccctaagattattccaagctgttgactctcattctggttatgacttcccatggtctttgaacaagatcatgccattctgggctggcgctgaacaccacgatttgcatcatcactacttcattggtaactacgcttcctctttcagatggtgggattactgtctagacactgaatctggtccagaagctaaggcctccagagaagaaagaatgaagaagagagctgaaaacaatgctcaaaagaagactaactaa

SEQ ID NO: 76732 - DNA, 4077 bp, Saccharomyces pastorianus
atgactgattatattttgccgggtcccaaggccttatctcagttcagagtcgataatctaattaaagatataaactcctatacaaacagtacttctgtcatcaatgaattgcgttcgtgttacattcactatgtcaacggcatcgctcaaaatttgtctgaacaggacactaaattgctagaagttttgttgacttacgattctcctttagatattgctaacgatccattagcaagacaattaaacgatgctgtcgctaataatttacccagttcagctcttggcgaagacacatatttgattagagttgttcctagatcaggcactatctctccttggtcttccaaggctactaatattgctcatgtatgcgggctacaagacaaagttcaacgtattgaaagaggtttagccttactcataaagactgttccaggtttccctcttttggaaaatctaaatgatatttcattgaagtgtgtctacgataggatgacacaacaattatatctgaccgaaccaccaaatacgatgagtattttcacacatgaagagccaaagccattagttcacgttcctttaactcctaaggacactaaacagtctccaaaggatattttatccaaagctaatacggaattgggtttagctctagatagtggagaaatggaatatttgatccatgcattcgtcgaaactatgaaaagagatcctactgatgttgagttatttatgttcgctcaagttaattctgaacattgtcgtcacaagatcttcaatgctgattggaccattgatggaataaaacaacaattcaccttgtttcaaatgattagaaatacccataaattaaacccagaatatactattagcgcctattctgataatgcagccgttttggatagtgaaaatgatgcctttttctttgcaccaaattcaactacaaaggaatggacctctacaaaggaaagaattccattacttatcaaagtcgaaactcacaaccatccaacagccgtgtctcctttcccaggtgctgctacaggttctggtggtgaaatcagagacgagggtgctacaggcagaggttccaagactaagtgtggtttgagtggattctctgtcagcgaccttttgataccaggtaatgaacaaccttgggagttgaatattggtaagccttaccatattgcatctgcattagatattatgattgaggctcctttgggttcagctgcatttaacaatgagtttggtagaccttgtataaacggttacttcagaactttaactacaaaggttttgaatcaccaagggaaggaggaaatcagagggttccacaagccaattatgattgcgggtggtttcggtactgttagacctcaatttgctttgaagaacaccccaataactccaggctcttgtttaattgtacttggtggtcaatctatgctgattggtttaggtggtggtgctgcttcttctgtagcttccggtgaaggttccgccgatttggattttgcttctgtacaaagggggaaccccgaaatggaacgtcgttgccaacaagtgattgacgcttgtgttgccttaggtaacaataatcctatccaatctattcacgatgttggtgctggtgggttatccaacgctttgccagaattggttcatgacaatgacttgggtgctaaattcgatattagaaaggtcctctccttagaacctggtatgtcaccaatggaaatttggtgtaatgaatcacaagaacgttatgttcttggtgtttctcctcaagacttatccattttcgaggaaatctgtaagagagaaagagcaccatttgctgtcgtcggtcacgcaaccgctgaacaaaaattgattgtagaagatcctcttttgaaaacaactccaattgatttagaaatgccaattttatttggtaagcctccaaagatgtcaagagaaaccataactgaagcactaaatctaccagaggcaaatttgagcgaaattccttccctacaagatgctattcaaagagttctaaacttaccatctgttggctcaaagtcatttttgattactattggtgacagatccgtcacaggtctaattgatagggatcaatttgttggtccttggcaagtacctgttgcggatgtcggtgttaccggtacatctttgggtgagacaataatttccacaggtgaagccatggctatgggtgaaaaaccagttaacgccctaatctctgcatctgcttccgctaaattatctgtggcagaatctttattgaacatattcgctgctgatgtgaaatctttaaatcatatcaagctatctgctaactggatgtctccagcctctcatcaaggtgagggttctaagttatatgaagccgttcaagcattaggtctggatttatgtcctgcattaggtgttgctatccctgttggtaaggattccatgtccatgaagatgaaatgggatgataaggaagttactgcaccattgtcattgaatatcacagcatttgcaccagttttcaacactagtaaaacgtggactccattactaaatagaaacacagatgattctgtccttgtcttggttgatctatcagctaaacaagagactaagtcactaggtgcctctgctttgttgcaagtttacaaccaagttggtaacaagtcgcctactgtgtatgataacgccattttgaagggtttcttggaaagtttaatccaattgcatcaacaaaaggaggatatagtgcttgcctaccatgataggtctgatggtggtctactaatcactttactggaaatggcatttgcttccagatgcggcttagaaatcaacattgacggtggagacctagaaagtcaattaacaaacctattcaatgaagaattaggtgcagtattccagatttctgctaagaacttgagcaagttcgaaaaaatcttgaacgagaacggagttgctaaagaatatatttctattgttggtaagccatccttccaaagccaggaaatcaagattattaactccacaacaaatgatgtaatttacgccaattcgagatctgaattggagcaaacttggagtaagacatcttacgaaatgcagaaattgagagacaatccaaaaacagccgaagaggagtttgccagtatcacggacgatagagatcccggtttgcaatatgccctaacatacaacccagccgatgatatgaagatcggattagaattatccagtcaaaggccaaaggttgctatcttaagagagcaaggtgtgaacggtcaaatggaaatggcatggtgcttccaacaagctggattcaactcagtggatgtcactatgacagatttgctagaaggtaggttccatttggatgacttcatcggtcttgccgcatgtggtggtttctcttatggtgatgtcttaggtgcaggtgcgggttgggctaaatccgtattgtatcacgaaggtgtgcgctcgcaattttctaagttcttcaatgaaagacaagatacatttgcttttggtgcttgtaatggttgtcaattcttgagtagattaaaagatatcatacccgggtgtgaaaactggccaagtttcgaaagaaatgttagtgaacaatatgaagcccgtgtatgtatggtgcaaatatctcaagaaaaggacaattctagcgaggaatctgttttcttgaatggcatggcaggatccaaattgccaattgctgtcgcacatggtgaaggtaaagcaacattttctaaaagcgctgaacaactggaaaagttcgaaaaggatggtttatgttgtataaggtatgtggacaactacggtaacgtcaccgaaaggttccccttcaaccccaatgggtcgaccaatggtattgccggtatcaagtcaccaaatggtagagtgcttgccatgatgccacatcctgaaagagtttgcagattggaggccaattcctggtatccagagggcaaatacgaagagtggggtggatacggtccatggattagattattcagatctgccagaagatgggtcggttga

SEQ ID NO: 76733 - DNA, 951 bp, Saccharomyces pastorianus
atgttaaagaggttagccaatcgtcaaaatggttttgcgtcattctcgtgcagctcagtcggtctgcgatatggtaggactaatccaaatacaaagagaagcttttcactttttcaaagtgtagcggacacgtttttaacagtgcatgaagcctcacatataccatggatagtgcttgttcctttgactactatgacccttagaaccctcgtgacgctgccattcagtatatggcagcggaggagaattttgaaacaacaagaactgaggaaattagtacagccaataacgcccattattaaacttcgactggcagccgttactaataaaaagtctagaaatgccgccagaattagctccaacggttctttcatgccgttacaactacagaatgctggcgttttgacaccagaacaaattacactattggcagtgaaagagacaagaaagaggcagaaaaaattattcaagaagtacaatgtacccctatggaaaaatgccttactgccaatggtgcaaattcctctttgggtcacagtctccatgggcatcaggaccctaacagagacacagcttatagaaagtttttatccttcctggttttccgcactgggtttcagttcctttgatctaagctcaccgctagtagcaatgcctctactagcgcccattttggtggggactctggcggtattaaacgtggaactcaatggccgactgatgtttagctcaagtttgtcatcgcaaggtataaagacaatttcaaggaattcgacaagagtccaagaggcaatgactagtatactgaacgtatcgagactcggttgtgtcgttatgctagcaatgtcctcacaggctccattccttctttcgctctattggatatcatcacagctattctccctggtgcaaaatatcatattaaattggatttatccttaccaacgatga

SEQ ID NO: 76734 - DNA, 309 bp, Saccharomyces pastorianus
atgtctagtgaaagagcctgtatgctgtgtggcatagtgcagaccacaaatgcgtttaatagagatggttgtcccaactgtcagggtatttttgaagaggcaggtgtttctacaatggaatgtacgtcgccttctttcgagggcctcgtaggaatgtgtaagcctactaagtcgtgggtagcaaagtggctgagcgtagatcatagtatagctggtatgtacgccatcaaggtcgatggtagactaccagctgaggttgtggagctgttgcctcactacaaaccgagggatggcagtcaagttgagtaa

SEQ ID NO: 76735 - DNA, 369 bp, Saccharomyces pastorianus
atgatctacgctcagccactttgctacccacgacttagtaggcttacacattcctacgaggccctcgaaagaaggcgacgtacattccattgtagaaacacctgcctcttcaaaaataccctgacagttgggacaaccatctctattaaacgcatttgtggtctgcactatgccacacagcatacaggctctttcactagacatctcttacactgtacctcgttcgcttttgccaaactgaatgtggccaggtgtaattattacacagtacatccttcgagccctttcttaaatttcactttttcactcgatttcactcatagaacgtataaggtgacctttatcaacatcgagattaattatagatag

SEQ ID NO: 76736 - DNA, 1782 bp, Saccharomyces pastorianus
atgacaatttcgaataaatcgtggaggagctacttcccacatttgagaaaactacccgaagatgatcagtacttatactcagacgatactaactccagtatcatagctgaagaggagctacatcatagcgtagataagtcctcgaggacagacgttgcggcagaaactacagctgtagaacctcatcctcacaatttaaggcatgacttgccatatgaagtgagagatgaagctgggcgtaaatggtggaaatattttgatgaattcgagtatcgtgttaataaggaatacaagaaatcacgtaagtggtacgagtttttgtatcctaatcatactactcaaaccaaggctgaaagacggcttctttacaagctagacattattattgctttatacttttttatgttatgttggtccaagtcagtggatttgaataactacactaacgcatatgtttccaatatgaaggaagatttaaacatgaaaggtaatgattacgtttacacttctactattgctaatgttggtgccattgtcttccaattaccatttatgtatttgttaccaagatttccctctcatattattttgcctgtaatggacttgggctggacttggttcacatttgcatgttatagggcaaactcactagccgaactaagggcttacagatttattttaagtgcctttggcgctgcttactacccagtgtcccaatatatactaggttgttggtatgccccagatgaaattaattcaagagtctgtttattcttttgtgggcaacaattgggttccgtgacttcaggacttctgcaaagccgcatattcaaaagtttgaacggcgtccatggtctagcaggctggagatggatgtttctgatcgatgccattgcaatttctcttcccacggctattattggtttttttgttattcccggtgtaccatctaagtgttactctttatttctgactgacgaagaaatacgaattgcaagggccagaaataagaggaaccaaatcaaagatggtgttgataaaagtaagctagccccattatggagcagaaaactttggaagaaagtattttgtactccagcattctgggtacttgttgtttttgatacatgttcgtggaataacatgactgcgtatagtggttcatatactttgtggttaaagtctaatacaaagtactccattgcccaagtgaacaacctgagtgttatacccgcatgtttaggatttgcgtatgtgattttttgtgcctttggtgccgatttatttagatgtaagtggatattcatggtttttgctgctataatgaataccgtttcttgtgccttacttatcaagtgggatattccttcgaaagctaaatggtacgctttcttcaccacgtatttcagtgtggccgcatcgccttgtctatggtcgtttattaatgacttcttaaggtttgatcctcaggtgaaggctattacatggatcgccatttattccttctctcaatccacttacgcctggattcctaccttggcgtggcctaccgtggagtcaccacgttttaagactggttacaccgtgagcttaatttttggtgctatttacggtttatggacgtttgttgtactttttttttacaagagaaacgaaaagaaacatgctctaggtaatggtatcatcttgtatgatagtaataagggtgaagagcttccagaatttgtaaagaaaaatatggaggaaagagatggttactactatttaaagcggtcctcgtag

SEQ ID NO: 76737 - DNA, 879 bp, Saccharomyces pastorianus
atgacatcactgaatatcatgggaagaaagtttattctagaaagggccaaaagaaatgacaacattgaagaaatatatacttcggcctatgtctctctaccctcctcaactgatacacgtttgcctcacttcaaagcaaaagaagaggactgtgatgtttacgaggaagggaccaatttagtgggtaagaatgctaaatatacctacagatcccttggtagacatttagattttttgaggccaggattgagatttggcggttcgcaatcgtcaaagtacacgtattatacggtggaagtgaagattgataccgtaaacttgccactttacaaggattcgcgttctttggacccgcatgtcacaggtactttcactattaaaaatttaacaccagtcctagataaagttgttaccctttttgaagggtatgtcatcaattataaccaattcccgttatgttcactgcattggcccgctgaggagacgctcgacccttatatggctcagagagaaagtgattgctctcattggaagaggtttggtcattttggttctgataactggtcgttaacggaaagaaattttggtcagtataatcatgaaagtgcagaatttatgaatcaacgatatatttatcttaaatggaaggaaaggttcctacttgatgatgaggaacaagaaaatctgatgttggacgataatcatcatctggaaggcgcgtcatttgagggattttactatgtgtgtttagaccagctaacaggttcagtggaaggctactactatcatcccgcttgtgaattgtttcaaaaactcgaactcgttccaaccaactgcgacgcattgaacacctactcaagtggatttgaaattgcctaa

SEQ ID NO: 76738 - DNA, 1761 bp, Saccharomyces pastorianus
atgttttcacttagttcgctatctagcagcggtgggcattcagagcagaaggaaagagagagaataagttattttgatattagaataaactccccgtacaaggacataattttgatccaagggtcaccgttggaactgtcgtctatacctttatcaggaaacttagtgatttcagtgaaaaatgaaatcgtagtgaagaaaatttcgctgagattggtaggaagattcaaattggagtttttgcaagttggccgatataagaagaatagcagtagtttggcaagtctagtaaaggaaaagcgtaagattttcgaatgctattgggacaacttattggtttcttcaaaaggggatgttttagtcggtggggaaaatgcggaaaatcaacataacagtagtagcggtcgcagtacaagcaaccaagatatggacaccagcggcaacgcaatatttctaagcaagagatcactttcgagccctgttttcaacaaaataattcgaagaaagacccattcttcccacagaaaaatactagagctaccagaaaatggtgttacaggaacccctttcgagggtttaagagaaaacgcccgtagtagaagcagtagtagtaacaccctcaataacaatagccatagttatagtaacagagacgggtctggaagttcgtacttattcctaatgaaaagaggcaactacgaactacccttcaatacaatgctccccccagaagtgtgcgaaacaatcgagggactacaaagtggtagcatactgtattcctttgaagccattatagatggacgtcagttatgggatactgatctgagcgttcatacttctcctcacggtccaatcggtagcacaagtacgagcggcaatggtatgagaacgaagaataaaattatcatcaaaaagttcaagtatctcagaatccttcgtacattatcgatggacaatcttgccatgcaagaagaaattagcgtgggtaatacttggcgtgacaagttgcaatacgaaacgtccatcccgagtagggctgttcctattggtagcacaacccccgtgaagattaagattttccccttcgaaaagaacattcgtttggataggatagaaatggcgctaatccaatattacgcaatgaaggacagcagcgcacaaatttatgatgatgaaatagccgtcatgaaaattactcatctagcggacttcggcccgctgacggacaaacttgacgtcgattgtccctttacaattccagataacctcaaacaaataactcaagactgctgtctgcaagacaacctaatccgtgtcatgcacaaattgcaggtacgtattcttttacaacgtcaagtggatggcgaatacaagaacctggagatcaaggcgcaattacctatgttattatttatttcgccgcatctgcctatgaaaggccgtctagtgttgtttgataaacacgatggcaagatccacttccgccctggcgaattagtacccctttttttaaccacttaccccgcgcagggtctgactccaggcgttgaactgaactccactacaacggcgcacctcgcgctgccacaaccgccaccgaattatcacgagagcaccaacgatcatctcatgccggcgctacagccgctcggcgccgattcggtggcactgacagtgccgtcatacgagcaggcgcaggcgcaggcatcggcatcgtcttacgtgacagggtccgtacccgcttactgcgacgatgactga

SEQ ID NO: 76739 - DNA, 96 bp, Saccharomyces pastorianus
atggcttcaaaggaatacagtatgctaccactttgtagtccctcgattgtttcgcacacttctggggggagcattgtattgaagggtagttcgtag

SEQ ID NO: 76740 - DNA, 3468 bp, Saccharomyces pastorianus
atgaatagtaatgaactggatctaagaaataaatatttttatgagatattcggtaagaaaagaaaatcagatacttcaacccctactcagttgttctccggctccaaagttcagacaaccatcaatgaaatttctatcactaacgatgaggatgaagatagtactgaagatgaaaataaggcttcattgaaggattatacactagggcacgacaccggtgcacggtataggatagcaccggactgttcttcccaccaattaaaggcatctcctgtcctacatatttcaacaaaccttaattcaagtccacaatccttcacaggcgatcagatttcacctactaataaaaaaatttcaataaatgattcgaccagacaagataaaggtaacagttgcactaccacttcatcaccttctcaaaaaagatcgaatgttttgcttcctcacgtaagaaaacattcatctccttcactattatcattttccaaaaacagtggcagtcatatgggggatccaaaccagctatctacgcctccaactcccaaaagtgcaggtcacacgatggagttacacagttcattcaatggaaaacatagttcttctagcacctcttctttatttgcattagagtcactgaaaacccaaaatagacgctcatcaaactcttccaatcattctagtcaatatcgacgccatactaatcaacaccaacgtcatcattcaaggtccaaatcaagtcctgtctctctgacggaaatatccatgatcaaaggcacgcctttggtttatcctgcacttttatcactaatagcaattaaattcaaacagaccatcaaattgagcacgcataaaaagatggggttactttacagagattcctttacaggaaaacaagcaattgatactttatgcttgatcataggaagcttagatcgtaatttgggcatgttgatcggaaaatcgctggaagctcaaaaattgttccatgacgtactttatgaccatggcgtaagagattctgtactggagatttacgagttatcttcagaatcaatttttatggcacatcagtcgcagagttctacttcaattgccaacacattttcttcatcatcttcttcagttaattcgctccgtactaaaactgaaatagatggtgtttttgtcccattgacacattgttattcctctacatgctctctggaaaaactttgctactctatttcttgccccaatcgtttgcaacaacaggctaatttacatttaaaattaggtggtggtcttaagagaaatatttcgttagcactcgataaggaggatgatgaacgaatttcctggacaaattctgtaccaaagagcgtatgggaatcattatccaaacaacaaatcaaaaggcaggaggcaatatatgagttgtttactacagaaaagaagtttgtcaaatctttggaaatcatccgagatactttcatgaagaaattattagaaacgaatattattccatctgatgtaaggataaattttgtaaagcacgttttcgcacatatcaatgaaatatattctgtcaatagagaatttttgaaggctttagcacaaaggcaatcattaagcccaatttgtcctggaattgcagatatatttttgcagtatcttcctttctttgatccttttctgtcatacatagcatcaagaccatacgcaaagtatctaattgaaacccaaagatcagttaatcccaattttgctcgttttgacgatgaagtgtctaattcttccctgaggcatgggatcgattcattcctatctcagggtgtttcaagacctggtagatattcactgttggtaagagaaataatacacttctcggacccagtaacagacaaagatgatctacaaatgctaatgaaagtccaagatcttttaaaggatctaatgaaaaggattgatagagcaagcggtgcagcacaagatcgttatgacgttaaagtgttaaagcagaaaattctattcaaaaatgaatacgttaatctgggtttgaataacgaaaaaaggaaaatcaagcatgaaggtttactctcaaggaaggacgtgaacaaaacagatgcgtccttttcaggagacattcaattttacctactcgacaatatgctattattcttgaaatcaaaagctgtaaacaagtggcaccaacacactgtatttcagagaccaattccactccctttactgtttatttgtccggctgaggatatgccacccataaaaagatatgtgacagaaaacccaaattgctcagcgggtgtgctcttaccccaatatcaaacgagcaatcccaagaatgctattgtattcgcctattacggtacgaaacaacaatatcaagttactttgtacgcgccgcagccggccggattacagacattaatagaaaaggtgaaacaagagcaaaaaaggctccttgatgaaactaaacatattacttttaagcaaatggtaggtcaattctttcactcatacataaatactaatcgcgtcaacgatgtcctaatctgtcatgctggtaaaattttattggttgcaacaaatatgggactctttgttcttaattatgctacatcgatcaatcaaaaaccagtgcaccttctgcacaaaatatcaatttcacagatctctgtattggaagaatataaagttatgattcttctaattgacaaaaaactgtacggctgtcctttagacgtaatcgacgatgcagaaaatgcagattttcttttcagaaaaaattctaaagtgttatttaaatatgttgcaatgttcaaagacggtttctgtaatggtaaaagaatcattatgattgcacatcattttttgcacaccgtacaattattgattgttaatcctttgatatttgattttaatagcggtaattttaaaaaaaacctaaaggcaggcttggtagattttagcgttgattctgaacctctgtccttttcttttttggagaataagatctgcattggttgtaaaaaaaatatcaaaatattaaacgtaccggaagtgtgtgataaaaatggatttaaaatgagggagcttttaaatctacatgataacaaagttttagcgaacatgtataaagagacgttcaaagtagtttccatgtttccgataaaaaattcaacttttgcatgttttccagaactctgcttttttctcaataagcaagggaagagggaggagacaaagggatgttttcattgggagggggaaccagaacagttcgcgtgttcctacccttatattgtggcaattaatagtaactttattgaaattagacatatagaaaatggagaacttgtccgctgtgtacttggaaacaagatacgtatgttaaaatcatatgccaagaagatcttatattgttatgaggatcctcaaggatctgaaattatcgaactgttaaatttttga

SEQ ID NO: 76741 - DNA, 372 bp, Saccharomyces pastorianus
atggtattgcctctaatgtttatgtattgcaaacttgctatgttgtcacttgcagtaggttgctgtcctccagtcaagtacagactagccatcgcaataccattactgttcaatttatttagtcgaggttgtggtagggtcaacttcacgtcagttaagatagcattcatttgtggtgatactgactgcagtgtgccccaaacggtggtaccgttttttagttctatggtaacctgctcattgcgcagcttttttaaaaagttaaccaacttcataatctttttctcgacgatttataaacgatacttggagtcatctttcttcatgacaatttcattgtatatgaacatttcatatattttattattttaa

SEQ ID NO: 76742 - DNA, 729 bp, Saccharomyces pastorianus
atggctgtcaatgaatttcaagtggagtctaacatctctccaaaacaactgaataaccagtcagtgtcacttgttattcctcggttgacaagagataaaattcataattcaatgtactataaagtaaatctaagcaacgaatctttgagaggcaatacaatggtagagcttttgaaagttatgattggcgcatttggtaccataaaaggtcaaaatggtcatttacacatgatggttctcggtggcattgagtttaaatgcatcttaatgaagttaatcgaaatcagaccgaatttccagcagttgaacttcttattgaatgtaaaaaatgagaacggttttgactcgaaatatattattgctttgcttctggtttatgcgcggttacagtattattatttgaatggcaataacaaaaacgatgatgatgaaaatgatttgataaagttatttaaagtacaattatacaaatattcacagcattatttcaaactaaaaagtttcccactacaagtagactgctttgctcactcctataacgaagaactttgtataatacacattgatgaattagtcgattggttggccacacaggaccatatctggggtattccattagggaaatgtcaatggaataaaatatacaactctgatgaagagagtagttctagcgaaagcgaaagtaatggtgacagtgaagatgacaacgacaccagcagcgaatcatag

SEQ ID NO: 76743 - DNA, 474 bp, Saccharomyces pastorianus
atgtcatacaaacagtattttgatagtttgcctttgaaattgaagtcctttttccaaagataccccccttcaatcaagtattctccagtgtctacatctactaaagccattaatgccaaccctttcctaccaaataaacatccggtcacacaacgatttcatgatccgaaatattcacttagaagaatgagtgacgtatataagttggcactgcgttatggagtagaagagtttttaccaccgatcgaaaacactaagaaacttttcttcgaggagaaatacaataaaaagaccctcatgaaaggtgttctcttgcccaagggtcataagcatgaattgaaattaaacgaaaagctaaaaaaacgtgaagaagctttaaagaaggtagatgagttgattgcttccaagaagggttcgaagtatgccaagagagtagaaaaaatgaaaaaaaaccaaagtataggctggttctga

SEQ ID NO: 76744 - DNA, 1113 bp, Saccharomyces pastorianus
atgagcagtgccgcaaatgagggatgtgtttatttgttcattgtcgttttgcgattatcttcgttttcatgtgttaactcattcattcattcatttactcgttcacgcacacgcagcagttattccctcgacgagcgttcacttgtatcatatagcatagtttacgtagcaatgaataaaagcagcaaggcatttcaggtaccgaataagatcatcaccaaggaggatattactcccttgtccagatcgcacacaaagaaagcggacactcgcgggacagcagatggtaaaaacaccacagccagtgcagtcgaggccaccccaatcatcatcaccactgctcgttcgatagatactgccggttcactatctgagaacgccaccgaggacgatggcacccaaaacggagatttacacgatgatgacgatgatgacgacctcgaaagtacgctcggctatagttctgagcctgatcctctcttctccccatgccaccagccttccttcaccaacagcacatttagttacagtgcggacaatgaactacccatggaggaaaatcacaacaagaataatttccacgatagcagcgagagcagtatctttctaccacagatacagcaatcattctttttcggcgacaatagcaagagtgacgcaaataatacggacttctggaaggaagtaaatgacactgcagaagaggccatttgcctgcaggagacaagacaaagaaaatgctccctcgtggctctgcatccaggcgacgccaccacgagttcgaacgacacattgggaatagaggacttcatcaaagatgatatcaacagtgctgaagccatggaaccctccccatcttcatcaccatcttcctcccttcttgataatttggactacaatatcaagttattgtgctacagagacaatgagggcaagttcaccttgaaaaaaaggaagtttttgaagaattccctgcgctcatcctctgcaatttctaaaaagtggaaacccttgtctaaaagagataagctgttgaagagggccataagaagaaagagtggtgtttgccagacgttatcagctggttttggtatcggtgaattcatgttgtaa

SEQ ID NO: 76745 - DNA, 999 bp, Saccharomyces pastorianus
atgtctactcaatccggtatagtcgcagaacaagccttgctgcattctctgaatgaaaatctttcagcagatggcatcgtcatcattatagccaaaatttcccctgattctacctcggtacatcaaacgcaagtcgcacgtagcttcgaggaactggtacagttggcatcacaagaaagagaaccgttgtacatcttctataagccggaagggcttgataagtacttctttgtgtcattcatccccgatggttctccggtaagatcaagaatgctttatgcctcgacgaagaacactctggcaagacaggtaggttcaaactctttatccaccgaacagccattgatcacagatgcacaggacttggtggatttgaaaaattttgatagtgcccgtcctgctggccagaataagcccttgacacatgatgaagaaatgcaaatcgaaatcaataagcaacaggcacttttaaggaaaaacacatccgtcaagttggtttctcaggacagtgcttcgcctttatcgttaactttcagggtcaattctgagaaacctatcaatgaaatactggatagcgagggtaaaaatttaatcatatttcaaatcgatccctcgaacgaaaccatccagatcgtgcaatctgatacatgtccctccgtagatgaactgtacattgacttgcccgggccaagttacacgattttcaggcagggtgattcaagtttctttatctactcttgtccctctggcagcaaagtcaaagatagaatgatatatgcttctaacaagaatggatttatcaactacttgaaaaatgatcaaaaaatcgcatttagtaaagtggtagaaattggcgattttgtggaactagacaagtccttacttatggcaacaaataaagaagacagcctcgatcatggatccaatccagatctcccaaacaaaagcaatttgaaattcaacaaaccaaagggcccattgaggaaaagaagaacatag

SEQ ID NO: 76746 - DNA, 633 bp, Saccharomyces pastorianus
atggttgctaagaagaaaaacacgcttagaagcaaagcaagtgcaagaaatagccaaaattttggaccagacgtagcgaacaatggcattctggacgagagttatgacatagaatctgatccaagggcctttctgcaccaacctaaagaaactaaaaaggcaaagctacttaacagacagaatactttcttatctaacttgaaggggaaatccacacttagcgatggcataggtgccaattttgatggtatttctaaatcttccattagacgtaggaaaagaaagctaagagaagaactaaaaccaagaatgcaagatctgctcacttctttggagcaagaaaaggatttacggggcattattgaaaatagtagcaaagacatgaataacgatgatgacatcgacatgaattctaaaataaggtttgtggacacaaaggaaataaacttgaaaaagatagaacctggttctgttaggataaaaaagaatcagccaaatatcaggaaccaaaagggtgcaaaggcattggctgctaacgaaactgcaagattcaatcaggtcctaaccaatcaagatttccaaaaaaatccatttggcgccttaagagaggttatcaagctgcaaaaacaatga

SEQ ID NO: 76747 - DNA, 1956 bp, Saccharomyces pastorianus
atgagcgaatcggaagccaaatctaggtcggctacaccgccaagtaaagctaaacaagctactccaacaactacagctgcagctaatggagaaaagaaattaacaaacaaggagctaaaagaactaaagaaacaagaaaaagctgcaaagagagctgcaatgaagcaggctaatggtatatccattgaacaacagcaacaacaagcacaaatgaaaaaagagaagaaacaactacaacgtgagcaacaacagaaaagagagcaaaagcaaaaaaatgccaataaaaaaaaacaaaatgaacgaaacgtgaaaaagagcacactttttggtcatctggaaactactgaagaaagaagagcgacaattttagctttaaccagtgcagtatcatctccaaaaacttcgcgaatcaccgctgctgggttgatggtccccgtggtggctagtgcattatcaggatctaacgtattaacggcttcttccttgatgcccgtgggtccaaacgcgtcgtctactgtatctgcatcagctccagcttcaacaacaacgactcttcctgcctcttctgcagcactctctgccggtaccagttctgcgtcaacaaatactccaacagctatacaacaagagattgcttcgtcaaacgcttctgatgttgccaagacattggcatctatctcgttagaggctggtgagtttaatgtcattcccggtatatcgtcagtgatccctaccgtgttagaacaatcatttgacaactccagtttggtatcgtctgttaaggaacttttattgaataaagaccttattcatccgtcgatattattattaacttctcatctagcacactataaaatagtaggatccatcccacgttgcatagccatgctagaggttttccaaattgttatcaaagactatcaaacgcctaagggaactaccttgtcacgtaacttaacaagttatttgtcacaccagattgatcttttgaaaaaagctagacctttaagtgttactatgggtaatgctatcagatggttaaagcaagaaatttcattaattgacccatctacccccgacaaagccgccaaaaaagacctttgtgagaaaattgggcagtttgctaaagaaaaaatcgaactggctgatcaactaattatagacaatgcctctacacaaattgaagaatctactactattgtgacatatggttcatcaaaggttctaactgaactgttactgcataatgcaatcagtttaaagaaaaacatcaaagtgattgtcatcgattcgagaccactatttgaagggcggaaaatggccgaaactttaagaaatgctggtgtcaatgttatgtatgcacttattacaagtttggatacgatattcaatatggatgtggactatgtgtttttaggagcccattctatcctatctaatgggttcctatattcaagagctgggacagcaatgttggctatgagcgctaagagaagaaatatacctgtattagtctgctgcgaaagtttgaagttttcacaaagagtacaattggatagtgtcacatttaatgaactggcagatccaaatgacctggttaatatagattacgaaaatccagtcgagagacgcggtaataaaggtgcgttattaaaccaatttatcaaagaaagaaaatttgaaaagaaaaagctagcaatggagaataagccaaagggtaataaaattggcggtaagaaaggatctgaaggagaaagcaaggacgccagtaatgaagaagacagcaacagcaaaaatattttggatggttggcaagagttaccttcgttaaatattgtcaacatcttatacgatttaacaccaccagaatatattaaaaaagtgatcactgaattcggcgctttgccaccttcatctgtccctgttattttaagagagtacaaaggttccgcataa

SEQ ID NO: 76748 - DNA, 1020 bp, Saccharomyces pastorianus
atgggaaccataacagtggtgattaatgagggaccaatactgttgataagggcattgcaccgagcaacgaccaacaagaaaatgttcagaagtacagtttggagacgttttgcatctaccggcgaaattgcgaaagcaaagctggatgaattcttgatataccacaagacagatgcgaaactaaaaccattcatttaccgtcccaagaatgctcagatattgttaactaaagatattagggatccaaaaacaagggaaccattacaaccgagacctcccgtaaagccactgtcgaaacaaacgttaaatgattttatttattcggttgaacccaactcgacagaactactagattggttcaaagaatggacagggacctccataagaaagcgcgctatttggacatacatctcaccaattcatgttcaaaagatgttgactgcgtcatttttcaaaatcggtaaatatgcgcacatggtaggactcttatatggtattgagcacaagtttctcaaagcgcaaaatccatccgtatttgatatcgagcatttttttaatactaatatcatgtgtgctttgcatcgaaataggttgaaagactataaagatgcagaaattgctcagaggaaactgcaggttgcttggaaaaaggtattaaatagaaaaaataatactggactagcaaatattcttgttgcaacattaggtagacagattggatttaccccagagctgacgggcttgcaacctgtagatattagtttaccagatatccccaattcatcaagtggcgcggaactaaaggacttgctaagcaaatacgaggggatataccttattgcaagaacattattggacatcgatcaacacaatgctcaatatctagaattgcaagaatttatacgccaatatcaaaatgcattaagtgaatccagcgatccatacgacacgcatttgaaagcgttgggactgttggaaacaccacctcctcaggaatccaccgaaaaagaggaaaaatag

SEQ ID NO: 76749 - DNA, 1020 bp, Saccharomyces pastorianus
atgcacagaacttactctttaagaaattccagggcacctaccgcctctcaattacagaacccaccgccaccaccatctacaaccaaaggtagattctttgggaagggtggtctagcttacagctttaggagaagtgctgctggagcttttggcccagaattatccagaaagttgtctcaattggttaagattgaaaagaatgttttgaggtccatggaattgacagccaacgaaagacgtgacgctgctaagcaattgtctatttgggggttggaaaacgatgacgatgtttccgacatcactgataaattaggtgtcttgatctatgaagttagtgaattagacgaccaatttatcgatcgttatgaccaatacagattgactctaaagtccatcagagatatcgaaggttctgttcaaccatctagagaccgtaaggacaagatcaccgacaaaatcgcctacttgaaatacaaagatcctcaatcacctaagattgaggtcttggaacaagaattggtgcgtgctgaggctgaatctttggtcgctgaagctcaattatctaatatcacaaggtcaaagttgagagctgctttcaactaccaatttgactccatcatcgaacattcagaaaaaattgctttaatcgctggttatggtaaggctctcttggaactattggacgactctcctgtcactccaggtgaaaccaggcctgcttacgatgggtatgaagcctctaaacaaatcatcattgatgctgaaagcgcactgaatgaatggacactagactctgcccaagtcaagcctactttaagtttcaagcaggattacgaagacttcgaacctgaagaaggcgaagaagaggaagaggaagacggtcaaggcaggtggtccgaagacgaacaagaagatggacaaattgaagaacctgaacaagaagaagaaggtgctgttgaagaacatgaacaagtcgaacaccagcaaagtgagtctcttccccaacaaacaacagcttaa

SEQ ID NO: 76750 - DNA, 1722 bp, Saccharomyces pastorianus
atgccaataagatcaatcagctcagcttcacaaatgaacgtgttcggtaaaaaagaagaaaagcaagaaaaagtttactctctacaaaacggttttccgtactctcatcacccatacgcttctcaatactcaagaccagacggccctatcttactgcaagacttccatctgctggaaaatatcgcaagtttcgatagagaaagagttccggagcgtgtagtccatgccaaaggtggtggttgtagactggagttcgaactaacagattctttgagtgatattacatacgccgctccataccagaatgtgggttacaaatgtcctggtcttgttcgtttttccaccgttggtggtgaaagtggtacaccagacactgcaagagacccaagaggtgtttcttttaaattctataccgagtgggggaaccatgactgggtcttcaacaatactcccgtcttcttcctcagagacgctattaagtttcccgtatttattcattcgcaaaagagagaccctcagtctcatctgaatcagtttcaggacactaccatatactgggattatctaacattgaatccggaatcaatccatcaaataacttacatgtttggtgatagaggtactcctgcttcgtgggctagtatgaacgcgtactctggtcattccttcatcatggtcaacaaagaaggtaaggacacatatgtgcaattccacgtcttgtcggatactggttttgaaaccttgactggagataaggctgctgaactgtcaggctcccaccctgattataatcaggcaaagctgttcactcaattgcaaaatggcgaaaagccaaaatttaactgttatgtgcaaacaatgacacccgaacaagcaactaagttcaggtattcggtaaatgacctaacgaaaatatggccacacaaggaattccctttgagaaaatttggtaccatcaccctaacggagaatgttgacaattatttccaagaaattgaacaagttgcattcagtccaacgaacacttgtatcccaggtattaagccttctaatgattccgttctacaagccagacttttctcctatccagacactcaacgtcatagattgggagccaactatcaccaattgcctgtcaacagaccaagaaacttgggatgtccatactccaaaggtgattcccaatacactgccgaacagtgtccatttaaagcagtgaacttccaaagggacggcccaatgagttactacaatttcggtcctgagccaaattatatttctagtttaccaaatcaaactctgaaattcaaaaatgaagacaacaacgaagtatctgataagttcaaagggatagttcttgacgaagtaacagaagtttctgtgagaaagcaggaacaagagcaaatcagaaacgagcatattgttgatgccaaaattaatcaatattactacgtttatggtattagtccactagacttcgaacagccaagagctctatatgaaaaggtatacaacgatgaacagaagaaattattcgttcataacgttgtttgccacgcttgtaagatcaaagatcctaaagtcaaaaagagagttacgcaatactttggtttgctaaacgaagatttgggtaaagtcattgcagaaggcttgggagttccttgggaacctgttgaccttgaaggttatgccaagacttggtccattgcaagtgccaattaa

SEQ ID NO: 76751 - DNA, 1485 bp, Saccharomyces pastorianus
atgagctctgaagaggactatttcgatgagctcgaatatgaccttgccgatgaagttaatgaggaaaaagaagacatacaaactaaaaagctcactacggtaaattgtcaaacagaaaaattcaatccattcgaaattcttccggaaagtatagaattattcaggacgttggcactcatcagtcctgataggttatctctatcagagacagcacagattttaccaaaaattgtcgatttaaaaagaatccttcaacaacaagaaatagatttcattaaactgttaccgttttttaacgaaatcatccccctcatcaagagcaatataaaattaatgcacaattttctaatctcactgtacagtagacgttttccagaactatcttcattgataccatcaccattacaatactcaaaagtgataagcatactggaaaatgaaaattattcaaaaaacgaaagtgatgaactatttttccacttggaaaataaagcaaaattgaccagagagcagatcctcgttttaacaatgtccatgaagacgtctttcaaaaacaaagagccattggacatcaaaacgaggacgcaaattttagaagcaaatagcatattggaaaatttatggaaactacaagaagatataggtcaatacatagcctcaaagatatcaataattgcccctaacgtgtgtttcttggtaggcccggagatagcagcccaattaatagcacatgctggaggggttttggagttcagtcgcattcccagttgcaacattgcgtccattgggaagaataagcacctctcacatgagttacatacattagagagtggagtacgacaagaaggatatctatttgcttctgacatgattcagaaatttcccgtttctgtccataaacaaatgcttaggatgctttgtgcaaaagtatcactagccgcaagagttgatgctggccagaaaaacggtgatagaaatacagttttagctcataaatggaaagccgaactatcgaagaaagctagaaagctatcagaagccccgagcatttctgaaacgaaggctctacctattccggaggaccaacccaaaaagaaaagagctgggagaaaatttaggaagtacaaggaaaaattcagactatcgcatgtcagacaattacaaaataggatggaatttggcaagcaagaacaaactgttcttgattcctatggtgaagaagttggtttgggtatgtctaatacttctttacaacaagcagtaggagctacatcaggttccagaagatctgctggtaatcaagccaagctaacaaaggtaatgaagcacaggatttctgaggctaatcagcaagctgacgaattcctaatctccttgggtcataatacagagcaaccgaatctgtcgccagagatggttcaaatgcacaagaaacagcatactaacccagaagaagagaccaattggttttccggtcatggttag

SEQ ID NO: 76752 - DNA, 3315 bp, Saccharomyces pastorianus
atgaataagtggttaaacacattatctaagacattcacttttcggcttttgaactgtcattataggcgatcattaccactttgtcaaaacttttctctgaagaagtcgttaactcataatcaagtcaggttctttaaaatgagcgatcttgataatttgcctccagttgacccaaagactggtgaggtcatcattaatccgttaaaggaagatggctctccaaagactcctaaggaaattgaaaaagagaagaaaaaggctgaaaaactgttaaagttcgctgccaaacaagctaaaaaaaatgctgctgccaccacaggtgcatctcaaaagaaacctaagaaaaagaaggaagttgagccaatccctgaatttattgacaaaactgttccaggtgagaaaaaaatcttagtatccttggatgatccggctttaaaagcttataaccctgctaacgttgaaagttcttggtatgactggtggatcaagactggtgtttttgaacctgaatttaccgctgatggtaaggttaaaccagaaggtgtattttgcattccagcacctccaccaaacgtcactggtgccttacatattggtcatgctttgactattgctatccaagattctttgatcagatataacagaatgaaaggtaaaactgtcttattcttgccaggtttcgaccatgctggtattgctactcagtccgttgtggagaagcaaatctgggctaaggacagaaagactagacatgactatggaagagaagcttttgttggtaaggtctgggaatggaaagaggaataccatagcagaattaagaaccaaattcaaaaattgggggcttcttatgattggagccgcgaagctttcactttgagtccagaattgaccaagtctgttgaagaagcttttgttagactacatgatgaaggtgttatttatcgtgcgtccagattagttaattggtctgttaaattgaataccgctatctctaatttggaagtcgaaaataaggacgttaaaagtagaacgcttttatcagtcccaggctatgatgaaaaggttgaatttggtgttttaacatcatttgcttatccagttatcggtagcgatgaaaaactgatcattgctacaactagacctgaaactatatttggtgatactgccgttgcagttcatcctgatgatgaccgttacaaacacttgcatggtaagttcatccaacatcctttcttaccaagaaaaattccaattatcaccgacaaggaagctgttgacatggaattcggtactggtgccgttaagatcactccagcccatgaccaaaacgattacaataccggtaagcgtcacaatttggaattcatcaatattttgactgacgatggtttattaaacgaggagtgtggtccagagtggcaaggcatgaagaggtttgatgccagaaagaaggtcattgagcagctgaaggaaaagaacctatacgttggccaagaagataatgaaatgaccattccaacttgttccagatctggtgacattattgaacctttattgaaacctcaatggtgggtttctcaaagtgaaatggccaaagatgctattaaggttgttagggatggtcaaattaccatcacccccaaatcttctgaggctgaatatttccattggttgggtaacatccaagattggtgtatttccagacaattatggtggggtcatcgttgtccagtttactttattaatatcgaaggcgaagaacacgatagaattgatggtgactattgggttgctggtaggagcatggaggaagctgaaaagaaggctgctgccaaataccctaattccaaatttactctggaacaagatgaagatgttttagacacctggttctcgtccggtttgtggcctttctccactttgggttggccagagaagactaaagacatggaaactttttaccccttttctatgttggaaactggttgggatattcttttcttctgggttactagaatgattctattgggcttaaaattgaccggttcagttccattcaaggaagttttctgccactctttagtccgtgacgctcaaggtcgtaagatgtctaaatctttaggtaatgttattgacccactagacgttattactggtattaagttggatgatttgcatgcaaaattattacaaggtaacttagatccaagagaagttgaaaaagctaagatcggtcaaaaggaatcctaccctaacggtattcctcaatgtggtaccgatgctatgaggtttgcattatgtgcttataccactggtggtcgtgatattaacttagatatcttacgtgtcgaaggttacagaaagttctgtaacaaaatctaccaagctaccaagtttgcattgatgagactcggtgacgattatcaaccacctgccactgaaggtctatcaggtaacgaatccttggttgaaaaatggatcttgcacaagctgactgaaacctcgaaaattgtcaatgaagctctagataaacgtgacttcttgacgtccactagcagtatttacgaattctggtatttgatctgtgatgtttacatcgagaactctaaatacttgattcaagaaggctctgctattgaaaagaagtccgcaaaggatacattatatatcttgctggacaacgctttgaaattaatccatccattcatgccattcatttctgaagaaatgtggcaaagacttccaaagcgttccactgagaaggctgcctcaattgtaaaagcttcttatccagtttacgtatctgagtacgatgatgtcaaatcggccaatgcttacgacttggtcttgaacattaccaaagaagctcgttccttgttatctgagtacaatattttgaagaatggtaaggttttcgttgaatctaaccacgaggaatacttcaaaactgctgaagatcagaaagattctattgtctcgttgatcaaggccatcgacgaagtcactgttgttcgtgatgcttccgaaattccagaaggttgcgtattgcaatctgttaacccagaagtcaatgtacatcttctcgtcaagggacacgttgatattgatgctgaaattgcgaaagttcaaaagaaacttgaaaaggctaaaaaatccaagaacggtattgaacaaaccattaacagtaaggattacgaaacaaaggctaatacacaggccaaggaagccaataaaagcaagctggataacactgttgccgaaatcgaaggtttggaagctactattgaaaacttgaagcgtttgaaattgtag

SEQ ID NO: 76753 - DNA, 2067 bp, Saccharomyces pastorianus
atggttttagaaacgctgaaacaagggcttgacagcagtcaaatacatgaagctttaatacaactagattcctatcctcgcgaaccggtggatctagatgcctcgatggttctcataaaattcgtaattccagtttatccatcactaccagaaagatcgaaggtgatattgagacggctagcttctaaatcgtttacatttttatgccaaattgtcaccttctcaaggacaataagtggccgcgatggactgcaagagatacgcatataccaagaaattttagaagacatcatcagttttgaaccgggatgtttgactttttatttaaaggcaagcactactagcaaagcagaccgtgatagcattaaggcccttttctttgggagcaagttatttaatgtgttggccaaccgaattgatatggcgaaatatttgggataccttcggcttcagtggaaatttctacttgagaataatgaaacagatccacctgggtttttaggggaatggttagtttcatcatttttgcttaacccagtgctagcggcagatatgttattaggcgaattatttttattgaaagagtcgtatttctcttcttttcagaaaatcatatctgctagtagtctgatagatcaaaagaggctgattgctaagtttttattaccatatattcaagttatcgtgactttagaaaatttgaacgatgttaggaaaattctgcggcggtttgatctcgataaaatcataagtctgtccgtattatttgaaatacagtcgctgccattgaaggaagtgatagtacgtctgatgagcaaccactcttctacgaagtttgttagcgctttggtaagtaaatttgctgattttacagatgaggaagtagacacaaagacatgtgaattgcttgtactctttgcagtgcacaatctcaatcattcccagagagaggaaatagcacacgatgagcggtttttgaatggcgtgaccaaacatttaggtagcaatgaacgtgaggcaagggagcgtgcgatgtttattgccaagcttttatcaggcggtcatctgaagtacgaaagtgattttaaaatcaatataccgaatgtcaaattcgaaagcaatagcgatgataaaatcattgatttccaatctttaaaaaatccatccatatgcaatacccaaactgatgtgggtaaggataagattactgaggtctcgggtcatgttcaaagccttacattggactgcagtgatagcgatgatgaagatgagaacgatgagcgggagattgttaaacgaattgtatttttaaaagatttaatgaaagaatacgaaaaaactggggaatctcgaaaagctccattgataccacttctgaagcaaacagtgaaattgatacggcaaaaggcggattttcagttagaggttggctattatgcacaaggtattctgtcaagcattgtgtgcttgaataatgaatttgatgaaccgcttttcgagcagtggagaataaacgctctaacaagcatactggtcgtccttccagagaaggtgagtggcgctataaatattctattcaattcagaactgtcgttacagcaaaggatgtcactattgtcggctctgggtctttctgcaagagagttgagagggcttgatgatcctactattgtcaagcccaagtttgattttccaacaaatcgtttaccgtgggatgatcaaagccatcataatagtaggcttgttgaagttcaagagtcaacaagtatgataaagaagacgaaaacagtatggaaatctagaaaactaggcaaggatcgagaaaaaggaacgcaaaaccgctttagaaaatatactggtctattcttctatccgctagcacacggttggcttaatggaattgatgtaggcacgtacaatcagctttttaagtcgcattatttaacaacactgcgtatcatatactcttgcgctaacccggtccacgattttgaatctatgacggagttgatgaatcatataattagttcagccatagaggaaggaattcctctcaataaaggttag

SEQ ID NO: 76754 - DNA, 1041 bp, Saccharomyces pastorianus
atgtcaggtgtaagctctgttatgctcggtcttcgacctgctacaagaatttttttccgcagtaatatttcggtttcaccttcgaggacttttgtatcatatattggaagatcccagagcacgtcgatactcaaaaatgctcccaacttagaggacaatgtcacaaatcttcagaaaattataccgaaacggttcttttctcaaacatcaattttgaaatcaaggtggaagcctatattcaatgaagaaactactaatcgatacgtacgtttgaacaggtttcagcagtaccagcagcagagaagcggcggcaatcctctgggctctatgactattttggggctctctttaatggcaggaatatattttggctccccttatttgttcgagcacgttccaccctttacgtattttaagacgcatccaaagaatctggtatacgcgttattaggcatcaatgttgccgtatttggactatggcagctacccaaatgctggaggtttctacagaagtacatgttgctgcaaaaggattacgtaactagcaaaatttcgataatcggaagtgcgttttcacatcaagaattctggcacttaggtatgaacatgctagcgttgtggtcctttggtacttcactcgcaacaatgttgggagcatccaattttttctccttatatatgaatagtgccattgcaggttctttgttttcgttatggtatccaaaactggcacgcctagccattgtcggacctagcttgggtgccagtggagcgctatttggggttttaggatgtttttcatatctattcccacacgctaaaattttgctgtttgttttcccagtcccaggtggggcttgggtagcattcttggcttcagtggcatggaatgcagctggttgtgctttaagatgggggtcatttgattacgctgcgcatttaggtggctctatgatgggggtcttgtacggatggtatataagtaaagctgtagagaaacaaaggcagcgtcgccttcaggctgctggtaggtggttttaa

SEQ ID NO: 76755 - DNA, 552 bp, Saccharomyces pastorianus
atgtacaaaacatggcgtctatgcagaacacatacagtgggtgggttatgccatgatggaagtcatcggttcgtatctacgggaggggcaaagattggtaaaaaatttgaaaatatgaatcaaataagggattatttatcaagacctgtatggtccgtccacgaatatttaggcataaacactaaagaggaaaaactagagccaccgtctgctgaagctgtaaaaaaattgttgcggttatcaggtcttcccttggaaggagcagatattaaagaaattcaaatgcgacttgccaagcaattatcattcatcaacaaactccataacatacctgtcgaaggtgaaaagcacaccaaggaatatgatgctcggttggtgcaaagaaatacgaaacagctgaactacacaaagctacttgaaggcatcagccaccataagcaggatgctgagctaggagaagttagcggatcttggaaagcaactggacttgccgcggaatccaaaaatgcatattttgttgtcaaagagggactactcaaaaacaggaagtaa

SEQ ID NO: 76756 - DNA, 234 bp, Saccharomyces pastorianus
atggctgtagatgttcctcgtgcggtgattaataaacttatgctgtttactgcagcgatggtggtactgcccgtactcacttttttcattattcagcaatttacgccaaataccttaattagtggaggtttagctgctgcaatggccaatgttgttctaatcgtttacattgttgtagcgttccgcgaggatactgaagatcacaaagttgatggtaataaaaaggaagactga

SEQ ID NO: 76757 - DNA, 798 bp, Saccharomyces pastorianus
atggtgttcggtcagctgtatgcccttttcatcttcacgttatcatgttgtatttccaaaactgtgcaagcagattcatccaaggaaagctcttcctttatttcgttcgacaaagagagtaactgggataccatcagcactatatcttcaacggcagatgttatatcatccgttgacagtgctatcgctgtttttgaatttgacaatttctcattattggacaacttgatgattgacgaagaatacccattcttcaatagattctttgccaatgatgtcagtttaactgttcatgacgattcgcctttgaacatctctcaatcattatctcccattatggaacaatttactgtggatgaattacctgaaagtgcctctgacttactatatgaatactccttagatgataaaagcatcgttttgttcaagtttacctcgaatgcctacgatttgaaaaaattagatgaatttattgattcttgcttatcatttttggaagataaatctggcgaccatttgactgtggttattaactctcttggttgggcttttgaggatgaagatggtgacgatgaatatgccacagaagagactttgagccatcatgataacaacaagggtaaagaaggcgacgatgatattttaagctccatctggactgaaggactactaatgtgtttaatagtttctgcgttgctattgttcattttgattgttgcactttcttggatatctaatttggatatcacatatggtgcgttggaaaaatcaacaaacccaataaaaaaaaacaattaa

SEQ ID NO: 76758 - DNA, 1143 bp, Saccharomyces pastorianus
atgaattgtatccctagtccaattagtgaaaggaaaatccaaattaataatgaagattgtataggcaaggaaaatgctttccataccattccaagagaaagttcaattaacttgacacctcactctacgaatgaaaaaaaagttctatccgaggtaaacagtaacaaaatcgattctttacaactccctcgaggtaaattgcaaagagattccacccatttggaaaaaacaagaaagagacaattatcaaatgattcaaccgatcctatagagccaaaaactgtgaaaaaaataaaatgtcatcaatggaaaaatttggattcgatagagatggatgatccattcatggtagcagaatatacagattctatattttctcatctttacgagaaggaaatccaaatgctaccgacacataactatttaatggacacgcaatctccctatcatttgaaaagctccatgaggacgctgttaattgactggttggttgaagttcatgagaaatttcactgcttacctgaaacattatttttagcgatcaacctgctagatcgatttttatcacaaaatgttgttaaattgaataaattacaactactatgcatcacttgcctgttcattgcctgtaaatttgaagaagttaaattaccaaaaataacaaattttgcgtatgtgactgacggtgctgccactgtcgaaggaattaggaaggctgagctattcgttctaagttctttaggttataacatatctctaccaaaccccctaaatttcattaggagaatttcaaaagctgacaattactgcattgaaacaaggaacatggccaaattcatcatggaatattcgatttgttgtaataaattcgtccacctgaagccatcatatttagctgcaatgtccatgtatatcgccagaaaaattaaaaatgaaaattccaaatgggatgaaacttttattcattatagtggcggcattgatattgaatcagatccagcgtttaaggattttatcagtgaactagttgaagatattgctgtacctgatacgaatctagattccttgagacttaaatacaaaaagcctaaacatggcatggtttatttcaaggtttttgactggtgtaaacaaaaacgttga

SEQ ID NO: 76759 - DNA, 1203 bp, Saccharomyces pastorianus
atgacagcctcatcaaatgacgatgacctaatattcgaatgttatagcgatcctgagttaaaaaggtggacacaccttgctaatgcaaaagcttggaaaggtattctgaccgtgcagcagtacgctgatagggaacaattgctagggtcttcagagatttctcaaaagaataaatcaaatgaaatgatgacaaaatacccaaaaagttaccagtggcttgggcagaagtactttgttttaaaggatcgatctttgccagataatggaaaatttagtcaagttgtttccagttgcgaaactttaaacaggattggatattgtattcatccgggttctaatggaaaaatcgagccagctttgattgtatgcattgggggcgtctttacctttgaaaaccatcgcggcaagggctacgccaagaagatgattatcaaactgaatgaattttatgacaagattcgtgatgacgctaacaccgtactagaattgaaaaatttggtgattaacctttacagcgaagtcggagaatattattccgcattaggatacgagagtatgcatgttcccttgcaccgtatttctaaattagatgaacttactgagagatactgtggagaagatgatgaccatgatggtaagtacttgggatttgatgattacaggggtttagtaggactacatgagacacagttcaaagaaagcttattaagtttacacaaagaaaacccagagaaatttgtttttaccgttgcgccagactttgacattttcacatggtttcagtatcgtgatctttttatcatgaataaatcaggaagaagagcccagcaagatctgttttttggatacgcgttgagtgataacagccacatcatatggcatcacaattggaacggtgattctctgattattgtcaaaatccatatacctgaagaaacatttcaaaggaaagaattgaagctcaaaaaattactaaggaaggccatagaagagacaaagattcatggattgcaagaattagaattttgggacgaagaaattcccatcaaaaagtacccacaattgtttcagttattaacagagcttgaaaatgaatctaaagttttctcagaaaacggttccatcagtgctgttcgcccccccaaaggatatacagccgagcaggtaatttgggataacaataccaaattctgttggttttaa

SEQ ID NO: 76760 - DNA, 1170 bp, Saccharomyces pastorianus
atgtctctactaggcgccaggtccacttaccgttggttttcaatcgctgcatcaattccgactaagaatgctattggcaaatccacgtacctcttagcttcaagaaatcaacagtaccgaggcatcataacgtcaactgtagactgcaaaccaatcaatacaggtaagagcccaaatgatgattctcgaagagaaagatcctttggcaagaaaattgttctgggtctgatgttcgcgatgccaataatatccttctatttgggaacttggcaagtaaggagattgaagtggaaaaccaagctgattgcggcatgcgaaactaaacttacttatgaaccaataccacttcctaagtcatttacacctgacatgtgcgaggattgggaataccgtaaagttatacttaccggacacttccttcacaatgaagagatgtttgttggtccaagaaagaaaaatggagaaaagggttattttctgtttacaccattcattagagatgacaccggtgagaaagttctgatagaaagagggtggataagtgaagaaaaagttgctcctgactcaagaaatttacaccatttgtcgttgcctcaagaagaacacttgaaagtggtttgcttagtaagacctccaaagaaaagaggctcgctacaatgggcgaaaaaggatccaaattctagattgtggcaggtgccagacatatatgacatggcaagatcatcagggtgcacgcccattcaatttcaagccttgtatgacatgaaggaccatccaataatcgaggaacacacaagaaacgaggcttcacaaaacaattccacctctagcctgtggaagttctggaaacgagaacctacgactgctgtaaacggaacgcaagctgttgataataatacatcgaagcctcgttctaggcaggaaatgccgacagaccaaacaatcgaattcgatgaacgacagtttattaaagcgggtgttcccataggccggaagcccactattgatttaaagaataaccatctacaatatttggtaacgtggtatggcctttcgtttttgagcacaatcttcctcattgtggctcttaggaaggcgaaaagagggggcgttgtgtcccaagaccaactaatgaaagagaaactgaagcattcaaggaaatatatgtaa

SEQ ID NO: 76761 - DNA, 1434 bp, Saccharomyces pastorianus
atggctgacaattctacttccagattttatactaatctattgatagctaattatctcaaacataacggtctggaagatacattggctgcattcataagggagacagcgttacctctttctgccttagaaaagtccgatagttcaaatagtaatgtcggtgagataccgctagaagacttgcagagtgttgttgaagataggatttactacaaaagacagtctttcaaagataggtttaaaactctttcaataaacgatgatttagccccaattgacaatgctaagtatggaatccaaccttggaaccatagtttgaaatttagtattgatgtaaaattgaacaaatccttacccaaagataccttgttcattagcgcaacttttacagaagacagcaaatatatattactttcgtcagctactggatacctagtaatctacgacattgagaaagcgacgtcgaagtcatttaaaattaatgaaaaagtcaagagcatcgtcaagctgtacggacccattggtagctccggttaccaatatgtatgtccaatgaacggaagtttttacttgctaaataacgattttgaactggtgaacaacgcagtatggaaaattcatgccagaatgattacgcatataaagatctgcaatgttacggaatcatcttggtttgttattactagtggaatggataacttcctgcgattgagtttgttggagataaaaaacgggaacacttttctcacaaaactctccgaaataaagttggcttccaattgtacgtcgttgaatgtaatcgccaacggtgatgacggcaatggtcagaatagtttctctgtgtttcttaccagagcagaatacactcatatagcatgttactcaattatagatgcaaaaaatcttgttcattcatacaatattgccttaaacaatgcggaatttagcacgtacgctttcaacattcgagacgtaatggcagtagattatgttcattccaatactaaagatacgataggattatcacccagtaccatgctagttgtagccacgtcacataaaccatacatgagattgattttagtagaaatacctatgaatacaggccatccaaaggcaatgaaattggataaagttcagacttactacgataaaatcttacgaaattttgcgacagaaatatatcaagatgatttctcattaccaattctcggcaaattagaatcttctaatggtgtattggtaggaaatgatgaaggtatttacagtgttgatttgatgactggtgattccaggcttttaaatattcctggtgaggcaaactccttgcacgacaggataaagtgcatggatatcagtaaggaccaaatgagagtggtcgctggaacgtctactaagtcaatttacatcctaaatgtaattaaaaatgcacagtaa

SEQ ID NO: 76762 - DNA, 1629 bp, Saccharomyces pastorianus
atgtttggtttcagcggtagtaataacgggttcggaaataaaccagctggttcgaccggtttttcatttggacaaaacaataacaatacaaatactcaaccttcggcttcaggatttggttttgggggcagccagccaaattctgggacggctactaccggagggtttggtgcaaatcaggccacaaatacttttggaagtaaccaacaaagtagtacaggtggaggccttttcggtaataagcctgctcttggcagcctaggaagttcaagcactaccgcttcaggaactacagctgctggaacaggtttatttgggcaacaaacagcacaacctcaacaatccaccattggaggtgggttatttggaaacaagccaactaccacaacgggaggtcttttcggcaacagtgcacaaaccaatagtaccacaagtgggggtttatttggtaataaagtaggatccactggctcactgatgggcggcaatagcactcaaaacacatctaacatgaatgcaggcggactttttggtgcaaagcctcagaatactacagcgactacgggaggcctatttggcagtaagccacaaggatcaacaactaatggtggcctgtttggaagcggcacccagaataacaatacccttgggggaggtggcctttttggccaatcccagcagcctcaaacaaacactgcgcccggacttggaaacacggtatccacacaaccatcatttgcttggtctaagccttcaactggatctaatttacagcagcagcagcagcagcagcaaattcaagtaccgttgcaacaaacgcaagcaattgctcaacaacagcagctgtctaattatccgcagcaaattcaagaacaggtgttgaaatgtaaagaatcgtgggatccaaacacaacgaaaacaaaactcagggctttcgtgtacaataaagtgaacgaaacggaagccattttatatacaaaaccaggacaagtacttcaagaagagtgggatcaggcaatggaaaagaaaccttcccctcagacaattcccattcaaatatatggatttgagggtttgaatcaacgtaatcaagtacagactgaaaatgtagcccaagctagaataattttgaaccatattttagagaaatccacacaattgcaacaaaagcatgaattggacactgcgtccagaattttgaaggcacaatcaaggaatgttgaaattgaaaaaagaatcttaaaattgggcacacaattggcaaccctgaaaaatagaggactgccattgggtattgcagaagagaaaatgtggtcgcaattccaaactttactacagcggagcgaagatcctgcaggtttaggtaagactaacgaactttgggcacgtttggctatcttaaaagaacgtgctaaaaacatttctagtcaattagatagtaaattaatggttttcaacgacgatacaaaaaaccaagacagcatgtccaaaggcaccggtgaagaatctaatgatcgtattaataagatagtggaaattctgacgaatcaacaacgcggtataacatatttaaatgaggttttagagaaagatgctgcaattgtaaaaaaatataaaaataaaacgtaa

SEQ ID NO: 76763 - DNA, 828 bp, Saccharomyces pastorianus
atggtcaacagtcatagtcgcaatttctctcagggcgaaatggactttttgaatgatgatgaactagacttagatttaccggtaaccgcagaaatatcgaaagagttattcgcaacagaaatagagaagtatcgtgaatccgagactaatgggaccgatgttgataactttgatgtcgacagattcctagtgcagaaaaatttccattaccttcctctcgattcccttattagagatttgtctggactttcacaaaaaatggtacaaacattattagaacaaataagaagtaactacgacgactatctgactttttccaatacctatacagatgaagaaaatgaaactctaataaatttagagaaaacacaaagtgatcttcaaaaatttatgacacaattagatcatttgataaaggatgacatcagcaatacacaagaaattataaaggatgtcctggaatacctaaagaagttagatgagatttacggctctctgcgtaaccattcacaattgacagaagcgctctcacttggaaagagattgagtaaatctctccatgaaatgtgcggtatagaaccattagaagaagaaatttgctctggcctgattgagcagttgtataagttgattacagcatcacgtcgaatattggagtcttgtgctgattccaattcaccatatattcatcatctgcgcaatgactatcaagaccttctgcaagaatttcaaatctcactgaaaatcttgaccgaaaagtgtcttgaaaacccatcaagcctgcaaaacctatctttgacattagtctccactataaaaacggcatag

SEQ ID NO: 76764 - DNA, 1479 bp, Saccharomyces pastorianus
atggagagtcgaactacagggcctttaacgactgaaacctacgatggccccactgtggccttcatgatattaggtgccgccctagtattttttatggtgcccggattgggattcttgtactccggattggcaagaaggaagtctgcactagcactaatctgggttgtattaatggcgactttggtcggtatactgcaatggtatttctggggttactctctagctttttcaaagtccgctccgaataataaattcattgggaatctagattcgtttggctttagaaacgtgtacggaaaaaaattcgatgaagatgcctaccctgagctcgcgtatgcaaccttccaaatgatgttttcgtgcgtcaacttaagtattatcgctggcgccactgccgaaagaggcaggctgctaccgcacatggtttttctctttattctagctaccattggatattgtccagtgacgtattggatctggtcaccaggtggttgggcataccaatggggagtcctcgattgggcaggcggcggcaacattgaaattttaagcgctgtttccgggtttgtttactcttggtttttgggcaaaagaaatgaaaagttactgataaatttcaggcctcataatgtttcattggtcactctaggcacatccatactgtggtttggctggctgctatttaattctgcatcctcattatccccaaatttgaggtcagtttatgcattcatgaatacatgtctcagtgccattactggtgggatgacgtggtgtcttctggattacagatcggagaagaaatggtcgacagttggtctgtgctccggtatcatttctgggctggtggctgcaacgccaagctcaggctgtataaccctttacggttcacttattcaaggcattgtggcgggggtagtgtgtaactttgcgacgaagttgaaatactacgctaaagtagatgatgccatggacattctagctgagcacggggttgcaggcgtaataggactgattttcaatgccctttttggagcagactgggtcattggtatggatggcactacagagcacgagggcggctgggtaactcacaattacaagcaaatgtataagcagatcgcttacattgccgcatccattgggtacactgctgctgtaactgcaataatctgctttgtgctcggctacatacccggtatgaggctaagaatatcagaagaggcagaggaggcgggtatggacgaagatcaaattggcgaatttgcgtacgattatgtggaagtgagaagagattactatctatggggtgtagacgaagattcacaacgctctgatgtaaatcaccgggtgaacaacgctcatttggccgctgaacgtagcagtagcggtactaatagttcctcggatgggaatggagaaatgattcaatccgaaaagatcctaccaattcatcaagaagatcctgccaataggtaa

SEQ ID NO: 76765 - DNA, 216 bp, Saccharomyces pastorianus
atgtcaagacacaagtacaagttatggatgtgcatcgcaaagggaaaaaggggagtgggggaaagaaatacgtttgtccctaagtgctcttatgctcccttttgtgcttcagaggttcttgatcaattattaagaggggataactctatcgtatataacttttatcttaaaaatggttcaggtagtgtttatataggctcagtctttcttatctga

SEQ ID NO: 76766 - DNA, 1209 bp, Saccharomyces pastorianus
atgcgtgagaatgcaatgtctacaaagaaacttccctataaattatctggcagcagcaaaataacaacttccatacctaatgatttaatcatactgcgaaataattgcataaattcactgaacagttcctcgtccaaagctgacagcattacatgtatagatacgtggctaaaatacacagagggtttgttaacccacaggtacgaagctaataatgacgccgctctcattgaagaggagatagcgattgcgttaatcaatgttgccgtattttatcaagacatcggtattgaaacattgtacagagcttatgaatcttcacaaacgtcaaataacttatggacaacaagcgggacctatctaaagagaggtctaggcttaatctgctttcttggaaagaattttcaaataaacacagctaatgattgccaaaagatgcaggttctcaacgtccttaatcagctatcattagagtttcaattgctgcaacaactagggattgtcgttttagcactgtctaaactaagatcaaaaatcagcaaggatgctgttgcggaccttgagcctcaagaattggaagagctaggcaagtccagtgtcttttacgctaagctttgtattggatcttatagcactgcttcgcaatgccaaggaggccgtatagtggacgcattatttatgaattatttacagagtttgacctatctcttcctatcaatcaaccaatacaacattgatgagtgcggaattgccattgggatgctccaagaatcgatcaaaaaactgttaaatatagtacccaattcgcaactaaaagagttggacattttatcctcaaccgatattacaaagaagagggatcttataaagatgtcgtttaaaaggaaaatacatgggtctactttaaaaaaccaacggatatttgagaagaaggtgccattttcatccaaagcgtacatgatgccgttattgaaatcttcattagacgattttgttaccccactaacgatactgttaaggtacagataccagacaaccaatgagaattattccttcaaaacggttgaaaccgacgtttctaaattgaaggagcttttccccaggggaaaatcgtcagatattgaaggcactgtatggagtttccaagatggacatcttacatttgcagactcaaataatgcaacccacaattgcggtaattatttttga

SEQ ID NO: 76767 - DNA, 1542 bp, Saccharomyces pastorianus
atgtcaacacccacagcagcagatcacgcgaaggcacttgaaagaaagaacaaaggaaatgtttttgtgaaggaaaaacattttttaaaggccattgaaaaatatacagaggcgatcgatttagattctacacagtctatctatttttcgaacagagcatttgctcactttaaggtagataactttcaaagcgctttaaatgactgtgatgaagccattaaactggatcccaaaaatatcaaagcttatcatagacgtgcattatcctgcatggctctgctagaatttaaaaaggctaggaaagatttgaatgtgcttctaaaggcgaagcccaatgatccggctgctactaaggcgttacttacatgtgataggttcattagagaagaaagatttaggaaagctatcggaggcgcagaaaatgaagccaagatcagtttgtgtcagactttgaacttgagttcatttgatgctaatgcagatttagccaattatgaaggtccaaagttagaatttgaacagctgtatgacgataagaatgcctttaaaggtgcaaagatcaagaacatgtctcaagagtttatttccaaaatggttaacgatcttttcctaaagggaaaatatttaccaaaaaagtacgttgcagctattatctctcatgctgataccttatttcgtcaagagccatctatggtagaactagaaaataactctactcctgatgttaagatatcagtatgtggtgatacgcatggccaattttatgatgttttgaatttatttcgcaagtttggtaaagtaggtcctaagcacacttatctattcaatggtgattttgtcgaccgtggttcttggtcgtgtgaagttgcactattattctactgtttgaaaatattacatccaaataatttctttttgaacagaggtaatcatgagagtgataatatgaacaaaatctatgggtttgaagatgagtgtaaatacaaatattcacaaaggatatttaacatgttttcacaaagttttgagagccttccattggttaccttaattaataatgattaccttgtaatgcatggtggtttaccaagtgatccttcagcaactttgtctgatttcaagaatattgatagatttgcccaaccacctagagatggcgcctttatggaacttctatgggcggacccacaagaagccaacgggatgggtccttctcagcgtggtttaggacatgcttttggacccgacattacagatagatttctaagaaacaacacattgcgcaagatttttagatctcacgagttaagaatgggtggtgtgcaattcgagcagaagggtaaattaatgacagttttcagtgctccaaactattgtgatagccaaggtaatcttgggggtgttattcatgttgtaccaggccatggtattttacaggctggcaggaatgacgaccaaaatctaataattgagacattcgaagctgttgagcacccagatataaaaccaatggcctattctaatggtggttttggtttatag

SEQ ID NO: 76768 - DNA, 1719 bp, Saccharomyces pastorianus
atgtgtggtatctttgcagccttcaagcatgaagatattcacaacttcaaaccaaaagctctacagctatctaaaaaaatcagacaccgtggcccagattggtcaggaaatgccgttatgaattccaccattttcgttcacgagaggttggctattgttggtttagactccggtgcccagccaatcacttcagctgatggcgaatatatgcttggcgttaatggtgagatctacaaccacatccagctaagggagatgtgctctgattacaagtttcaaactttcagtgactgtgaacccatcataccgttatatttggaacatgatatcgatgctccaaaatatctggacggtatgttcgcattttgtctgtatgattccaagaaagatcgtattgtcgctgcaagagaccctatcggtgttgtcactttatacatggggcgttcttctcagtctccagagaccgtttattttgcctccgaattaaaatgtctaactgacgtttgtgacagtatcatttcgttccctcctggtcatgtctacgattctgaaacggacaagattactcgttactttaccccagactggttggatgaaaagcgtatcccatccaccccagttgactaccatgctatcagacacagtttagaaaaggccgttagaaagaggctaatggctgaagttccatacggtgttcttctatccggtgggctggactcttctttgattgctgcgattgctgctcgtgaaacggaaaaagctaatgctgatgctaacgaagacaacaatgttgacgagaagcaacttgcaggtatcgatgaccaaggccatctacacacatccggttggtctcgtttgcattcgtttgcgattggtctaccaaatgcacctgatttacaagcggctagaaaagtcgccaaattcattggttctatccaccatgaacacacttttacattacaagaaggtttggatgctttggacgacgtgatctaccatttggaaacttacgacgttaccactatcagagcttctacaccaatgttcttactatctagaaagattaaggcccaaggtgtcaaaatggttctttctggtgaaggctcggacgaaatattcggtggttatctatatttcgcacaagcaccttctgctgcagaatttcacaccgaatctgtgcaacgtgtcaagaacttgcatttggcagattgtttgagagctaataagtccacgatggcttggggtctagaagctcgtgttcccttcttagacaaagactttttgcagctatgtatgaacattgatccaaatgaaaagatgatcaagccaaaggaaggacgtatcgaaaaatacattttaagaaaggcattcgacactacagatgaaccagatgttaagccatacctacctgaagaaatcttatggagacaaaaggaacaattttccgatggtgttggctactcatggattgacggcctaagagacactgctgaaagggtcatttctgacgccatgtttgccaatccaaaggctgattggggcgacgatgttccaaccaccaaagaagcttactggtacaggctgaagtttgatgcttggtttcctcaaaagactgcggcagacactgtcatgagatggattccaaaggccgattggggttgtgccgaagatccttcaggtagatacgccaaaatacacgaaaagcacgtcagtgcttaa

SEQ ID NO: 76769 - DNA, 693 bp, Saccharomyces pastorianus
atgcctgtcccatctgttactgtcactaccgataatgaatatgaagacatatcgtccttttcttctattgactcttacaaaccggagccctttactgggttcaaagattctgaagctccagaacagcctcttttaaaaaacgataccattgttggaaaggggcaactggaagatgatagtaatgtagatgatcaacaccgtcattcagatgtgcattctcatcacagttctagtactttaaaaaggccaacttcaaattcgatagaaaagatggttacccacaatgctttagagggcaactcagaaacagttgattccttaaaagaagatggtttaaatttgaacaagaaagctcttccggatattaccgccccagtaacaaactcagctcacgatgctgcatttccagaagagtatcgtttagaaactgaaaccgggttggtcaaattgaagacgcttgaaagtttgaagagggaggactctcgcgtatcctcaactaaaaaagagcatattaacgaccatacagatatgcattcgacacgatccaaggttactacaaattctcaaggttcttctctagaaccaaacaagttgaacatggcagtagagaagaataagaagaggatcgaaaaatatcaaaaacataaatcagaaaaggggatcaaggggttttttcatagaattttcgattaa

SEQ ID NO: 76770 - DNA, 939 bp, Saccharomyces pastorianus
atgtgcattttaatggccacaagggcacatcctgactatgaactcatcttaatatctaacagagacgaattcttggcaagaaaaacacatgctacatgctggcataacaatgattttgtcctttcaccctacgatctggccaaaacctcagcagaaaaacaaatatttggcacttggtctggcataaataaagaaggaaaattagccactattcttaatttaaaacttgacaatgagcaaaataatatgaaatcaagatcccgtggtctgttaccatttatatttttgtcgatccataaagcagattttgaagattgggataattacaaaaagtttgaaggtcactatgatgggttgaagtccacaggtgattttaattttttttacggcgacgttatcaaaaagcaatataaagttattgattctctaggaagaacttttgatgtgttgagttctacctgtaggaaagatcttgattcttacatggttgtttctaatggtaaattttatgacagctccagtataccagggcaggcttgggaaaaagtaaaggtagcacgtgatagtttagaaaatctagttttagagaatattgaatcagatgaggagaaaataatatcaagttgctttcaactcgcctcgaagtcttcccttccaagcactatttcaaacccagatgtcttgcagatggtagatccaaatgtaaccatgaataccatatacgtaccacctttacggaggcctcccggggatgacttaggtgcctcaattcctgatggtgattactacggaactcgctctcaaatagttttactcgtgagtaaggattcaacgagagttacctttatagaaagggtcctttatagctcagatgaagacgtgcgcaagtattcggtaacctcacctaaggaggaaaaaaggtttaaattcaaattgtaa

SEQ ID NO: 76771 - DNA, 2142 bp, Saccharomyces pastorianus
atgccatccctgtctcaaccatttagactagcaactctcccaaaaattgcttcattgagcaatttttctttacaagcagattacgttcaagtcgcagatggcacctttaatgaatctacaaataacataacgttaggtatttccgggtcatctatatctcaatatattattaatcctacaccaaagttaacattcgattacccaataccctctacaaatattatcacggcatgcaatgctgagaaaggtcaagctaacattgacggaaatataaaagccagtaccgacgatgaagccaacgacgagaaggctatcaacacccaaaaaaaaagaaatgttgaaatttgggcctttggtttaatggtaaataaaggtaattatacgctaaacgttatcactaaggcactggaagataccactgatacctcaaatgaccatctgagtgagagtgatattgacaataaagcatacacgggatcagacgaatttttatctcagtataagatcaaggcgaaagccaaagtcatgagtattaaaattgacaccaagaacagcttagtaattgcaattttacagaacgggttgattgaaatttttgattttaagttaacacttttgcattcatttgatatatcttatgataacttaaaatatgctaaatggttcactgaaaatgggactgaatatgtttttgttctctgtccattacaggatgataaagtctgctataaattgctcgagctgacagattgtggcagtggaggaagttcgcccataaaagaattatcatctactatcatcgaaggattttcttttgaaaattcaaagctttgttatcaatttggaaaactttacaaattgaaccaggggaaaatatacatttactctttaccacattgccaattgcaacaagttattgaatttccgatggtggataaactcagtcctggagatgacttaatctctttccaacctgtttcagtaaacagagttctactgaccgtaaacaacgtcatttatctactagacttactgcattgttctactttaagccaaagagaattaactcacgtgaaaacattccaactattaaaatctgcagtgatcaattcggaaaagtcgcataattcaaaaacaatagcaattggtatttcaacgaaaaatggaccaaacccaacgtcttccttagaaataattaatattgatgttggaactaatacgttgaaggactcattaggcaagagttttcaagttggaaataatgatagctcagttattttaaagccgctatttgatgataaagacataaatgacaagagagtgaaatgtgacgacgtcagcggggattcaagcgttccagtcctccactgtaatgaagttattgaaaagctttcagcccttcaagataatgacattacatcatttgatgacatatttttcaaagaactaaaaatcaaagaagaacattatactgaaaaagatagatatatttctgatcctggctttttgaataaagttttagatctaattttcggaaagtttagcggaaatgattatccaaaaactttaacgtttttattgacacacccattgtttccattgtgtcgtacacgcaacttgctatccttactaagagaccaacctagattatttaaacaagcaattgtaacatacccaaacttgccattaaatgaactacttgaagaattgttttctatcagaaacagggaactattacttgatatctcatttaggattttgcaggatttcaccagagactctattaaacaagaaatgaagaaactaagtaaattagacgttcaaaatttcattgagttcataacaagcggtggtgaagacagctcaccagaatgcttcaaccctagccaaagcacgcagctatttcaactcttgtcccttgtgctagattctatcgggctattttcattagaaggtgctctattggagaacttaaccttatatattgacaaacaagttgagattgctgaaagaaataccgaattgtggaatttgattgatacgaaaggttttcagcatgggtttgctagctcaacctctgataacggaacttctcagaagcgagccttacccacttacaccatggaatacttggacatttga

SEQ ID NO: 76772 - DNA, 648 bp, Saccharomyces pastorianus
atggatttttacaaattagacgagaagctgaaggagttgaaaaggaaaagagtagatgtatctataaagagtaggaagttggctgacagagagattcaggaagtaagcgcaaatcgaaaaccaagagtatacagtatggaagacgtaaatgatgcagatgaatcagtaggagatacagaaagtcctgaaaaagagaaagcatttcattacacagtccaagaatatgatgcgtgggaacgtaggcatcctcaagggaagactgggcaaagccaaagaggtggaatttcctatgatcaacttgcaaaattgagttatgagaagaccttgcggaatctcgctacgcaaacacagaattcgagcaaacaggatagttccgccgatgaagaagacaataaaaacgtacccaagaagggtagaatcggcaaggtacagaaggacactaagacgggtaagataacaattgcagatgacgacaagctagttaataagttggccgtttctttgcaatctgagtcgaagaaaagatacgaagcaagaaaaagacaaatggaaaatgcaaaaacactgtatggagttgaaagcttcattaatgacaaaaataaacaattcaatgaaaaattgagcagggaatcaaaaggatcagaataa

SEQ ID NO: 76773 - DNA, 525 bp, Saccharomyces pastorianus
atgctatcagctgcagataatttagtgcgcatcataaatgctgtttttcttattatatccataggtctaatcagcggcctgataggtacacagacaaagcatagttctcgagtgaacttttgtatgtttgccgcggtttatggtctggttacggattcattatatgggtttttggctaatttctggacatcattaacatacccagcaattttgcttgttttggattttttaaatttcatatttacgtttgtagcagccaccgctttggctgtaggtataagatgccattcgtgtaaaaacaaaacatatctggaacagaataagatcatacaaggctcaagctccagatgtcatcaatctcaggctgctgttgcgtttttttacttttcctgttttctattcctcatcaaagtgactgtggccacgatgggtatgatgcaaaatggtggatttggctctaataccggattcagcagaaggagggcaagaagacaaatgggcatacctacaatttcccaggtttaa

SEQ ID NO: 76774 - DNA, 864 bp, Saccharomyces pastorianus
atgtctaattctgccaaacttatcgatgtcatcaccaaggtggcgttgcccattggtataattgctagcgggattcagtactccatgtatgatgtgaagggtggttctcgtggtgttattttcgacagaatcaatggtgtaaagcaacaggttgtgggtgaaggcactcatttcttggtgccttggctacagaaggcgatcatatacgatgtgaggacgaaaccaaagagcattgctaccaatactggtacgaaggatttgcaaatggtgtcattgaccttgagagtcttacatagaccagaggtcttacagctacccgcaatataccaaaatttgggtctcgattacgacgaaagagtgttaccatctatcggcaatgaggttttaaagtctatagtagctcaatttgatgctgctgagttaattactcagagagaaattatttctcaaaaaatcagaaaagagctttctacgagggccaacgaattcggtattaagttggaagatgtctctatcactcatatgacgtttggtcccgaattcacgaaagcagttgagcagaagcagattgcacagcaagatgccgaaagagccaaattccttgtcgaaaaggcagagcaagagagacaagcttctgttatcagagctgaaggtgaagcagaaagtgctgaattcatttcaaaagccttagctaaagttggtgatggtctgttattgattagaagattagaagcttctaaggacatcgctcaaacattagcaaactcatctaacgttgtctatttaccaagtcaacattctggtggtggtaacagcgagtcttcgggatcaccaaattccttgcttttgaacattggccgttaa

SEQ ID NO: 76775 - DNA, 3369 bp, Saccharomyces pastorianus
atgacgaaaaagaaagcagctactaattatgctgaaaggcaaaatttagccagtgaagattcttcaggtgattcggttcattttaaggactttattcccttacaagagttactgaaagataaaaattatgttccatcggtggaaaatttggagaagatcttatataatgaaaccatgtttaatgatcagaaaatatgctctaacctattgcttgaggctctcataattacgttgttcacaacaatttcagggaagtcagctttacgattaattcagacttcttctttgaaggaaagaaaatcctgggcccagtcctttgaaaataacagttctagctatgcttccatagtactgagttggaaagataatgatatattactcctgaaattcttaaggtttttattagcaaataaaacggcccctcttcaaattaatcggtacaatcttccagaatacaaactcccgttgagctttttaattgtttcaaaaattactattccgtccatattactcaatgaaacgtataatttgttaaaggactatttgtattcgataactggccgtatagagagtttgataagctgcagctccacatttgataagccagcacttgtcgttagaaaaattttaaaagattacaatagaatgatagaatgccgaaatttttatttctggtattcctttaatgctgagaacagagtaaatcttacttttagtgataacattagcctgttaatggaaaatgatgaaggcaatgctggaagtggccttgacgatagccgttttgatcatcaaaaacaaccgagagaggcgataatgggccgaacaataaatgaccaggaacaaatatattcattcgaactgaaccaagatggaacgcttgaaatacccaacgttatggagcattctttactaagacacgagcttctttttaaaatattaaatctcactacggtattgacgccattattggaactacaattttctacgctatgtggcttagtagatccattaatgcagcctactcccaatgataagcatattatatcgatagactttctttttcagctttttttgggattaatgtctcagtcgatcaagacttctcaagaacacaacgaccattatgactggaaattttatatgtgttttaacatgcaaaaaattattgatgctaccatgttgaggctcaactgctttgattttgatatattaaactcggtaaacaatacagataatgcagttcattggaagacgcaacttcacagatggctaccgcatggcctgaatacacaagacttggaattactctatatgattgatatactggcggtatataccatctacaagttgtatgaaaaaatacctatacaactaaacccatttttattttcattaatatccttatggaaaaacctctcctgtgttatacttttagccttagaaattgatagaattgaagaggagaatggcacttacgaaacgccgcttatggttcgcgccacaattcgtggagccgcagcattgaggtctgtaatagctaccgttctcaatggattagtgaaaaataatgatcatgatttcaagcacgagtctttaaacacattcatgtcgccctatggaagaaaattgtgtcatggtgctttatatgccgatttaaggtcacatactgcatctctacttgcgcttggagcaagcatcgaagatgtaacagatttatttgccgatttacagtcaggtgatagatttgatgaggatattagatatatgtttgattatgaatgtgaagattatgatgaatctttctctgaaagcgatcatggaggattggatgaaagcgttgttaacccaacagaaaaaataacatctggtagtaataatgttttctttcggagacggtgcaattgcatcttcaatgatgataagttggtggcagaggatggtgcaaatgaagcctttgggtcaacaaatagcgaaaacgttgaaggcacaatgcataataataggaatgcggtacataacgcgactacagccacttctgatcacgtcgttacgtcacctaacccactttccgttagatcaagaagtacttttgaatttgactatagtggggaagattggagggatgttcccagagatttcaatatgtactattcgccatcttattcattcatccatgagcctaagttagatgtcatatttagtttgactctacgtggcgcaacagaaaagttgaataaggaggaatccatattgttagtgcgttcagttgcatcgtgtgtaaggaacgagcaggaccaaatgattttagcagacctggagtctaatttttccgcaagtataaacggcgatgtagaaggtgaaggaaataccaaaatgtccaagatagataatgaagatctcagaagaaccacgccggatgatatttatgaaatatggtctgaagaatcagcatttgaaaggatgctaaacgtgaatcacgacgttgcgtggagattaatggatgaaatgttaatgtgcaccggttataggagaatattgatatggttccttacgcatttggagttaaaacattcgttgatatattacgtttttgaactaataatggggttacgtggaaaaccgttttccggagaagccagtgatcaagataaaaaggatgatatgatatatgagatcttgaagaaaaagcagaagaatgaagatgcttcaggacttcccttttcaaggcaaggacctatcgtattatctgatattgagactaaaatgttactgcaggagttttttatgaatgctgctatttttttgtcatcaaaaaacaacgaagaagagaatgaagacggcgagaaaatctccttgtactcccttggtttggttaggttgatctgttacatggtgcagacactcatcgcgaacgacaagtttttttttaccaaatcagaatgcacttttgagcttcaaactttactgatgacatggattggcatccttcctgaagccaaagatttattctttaagatcaagacaaggctcgccatggaagaagaggatagtgccgatactatgcagcatgagggcaggaagaactctgacatagagaagaagctaaacgctaagccagcttctgaactgaatctgaaattgttaaacctgtttccctcaaagcctgcaaacaaagacgatagttcccctattaacacgttgcgcagttttatcgctgattactccttcgacacccaggtgaaccctccaggaagaagggtggtgttctacgatggtaagattttgccattgcccaaagccgataagcctatcccacttcatgaatatataacactcgcagagctcgatgttggagacagtgagtga

SEQ ID NO: 76776 - DNA, 777 bp, Saccharomyces pastorianus
atgggttccagaagatacgattccaggacaacaattttctcccctgagggacgtctatatcaggttgaatacgcgctagaatccatttcacatgcaggtaccgcaattgggattatggcatctgatgggattgttcttgcagcagaacgcaaagtcacaagtactttactagaacaagacacctctaccgaaaaactttataagttaaacgataaaattgcggttgccgttgctggactgactgcagatgcagaaattctaataaatacggctagaattcacgctcaaaattaccttaaaacctataatgaagatataccagtagaaattttggtgagaaggctaagtgatataaaacaaggttacacgcaacatggtggtttaagaccatttggtgtgtccttcatctacgccggttatgacgatagatacggttaccaattgtatacatctaatccatcgggaaactatacagggtggaaggccattagtgttggcgctaacacatcagcagcacaaaccctacttcaaatggactacaaggatgatatgaaagtcgatgatgccattgaactggctttgaaaacgttatccaaaactaccgacagtagcgcgctgacttatgacaggttggaatttgctactatcagaaagggtgctaatgacggagaagtgtatcagaagattttcaagcctcaagagataaaggatatattggtaaagactggtattaccaagaaggatgaagacgaagaagctgatgaagatatgaaataa

SEQ ID NO: 76777 - DNA, 726 bp, Saccharomyces pastorianus
atgtctgcgtcactagtgaatcgatcattgaaaaatataaggaatgaattagaatttttgaaggaatcaaacgtcatatcaggcgacattttcgaattaatcaatagtaagttacctgagaaatgggatggaaaccaaagatcgccccaaaatgcagatacagaagagtacgttgaagctttatatgattttgaagctcaacaaaatggagatttgtcattgaaaacaggtgataaaatacaagttttagaaaagatttctccagattggtatagaggcaagtcaaataataagatcggaatattccctgcaaattatgtgaaacctgctttcacgagatcagcctcacctaaatctgcggaagctgcttcaagctcgactgtttctcgtcccagtgttccacctccatcatacgaaccagccgcatcacagtatccttcacagcaggtttcagcaccttatgcacctccagccggttatatgcaagctccgcctccacagcaacagcaggcgcctttaccatatcctccacctttcactaattactatcaacagcctcagcaacagtacgcaccacctccacagcaagcaccggtggaagcacaaccacaacagagcagtggggctagtagtgccttcaagagttttggtagcaaattgggaaatgctgctatatttggcgctggttctgctattggtagtgatattgtcaacagcattttttag

SEQ ID NO: 76778 - DNA, 375 bp, Saccharomyces pastorianus
atgcacctccagccggttatatgcaagctccgcctccacagcaacagcaggcgcctttaccatatcctccacctttcactaattactatcaacagcctcagcaacagtacgcaccacctccacagcaagcaccggtggaagcacaaccacaacagagcagtggggctagtagtgccttcaagagttttggtagcaaattgggaaatgctgctatatttggcgctggttctgctattggtagtgatattgtcaacagcattttttagtattctgtcacgaaatatttgtttcagtgatttgaacttacccaatgattttcgtagcttgaaagagagaaaagctcatacagaatacggatatgtgatggttgcttaa

SEQ ID NO: 76779 - DNA, 2871 bp, Saccharomyces pastorianus
atgagatcatcgattttgtttctactaaaattgatgaaaattatggatgttcagcaacagcaagaagctatgtcatcagaagataggtttcaggaactggtggactccctaaagccaagaactgcgcatcagtacaagacctactatactaagtacatacaatggtgtcagctcaatcaaattataccgacaccggaggacaattctgtaaatagcgtcccctataaagacctgccaatatctgctgaactgatacattggtttttgttagatacattaataaccgatgataagcctggagagaaaagagaagagactgaagatcttgatgaggaggaggagaattcattcaagatcgctacgttgaagaaaattataggcagtctcaattttttgtcaaaattgtgcaaagttcatgaaaatccaaatgctaatatagacacaaaatacctggagtcagtcaccaagcttcatacccattggatagattcacaaaaggcaatcaccactaatgaaacaaataacacaaatactcaagtgctgtgtccaccattattgaaagtgtctttgaatttatggaacccagaaactaaccatctctctgagaaattttttaaaacctgttctgaaaaattaagattcctggtggattttcaattaagaagttatttgaacctttcatttgaagaaagatcaaagatacgatttggttccctcaagctcggtaaaagggacagagacgctataatttatcataaagtaactcattcggcggaaaaaaaagatacgccgggccaccatcaactccttgcattattaccccaagattgtccatttatctgccctcaaactacattagctgcatatttgtatttaaggttctatggtataccatctgtttcgaaaggggatggctttcccaatttgaacgctgatgaaaatggctcacttttacaagatattcccatactaagaggcaaatcactgacaacttatcccagagaggaaacatttagtaattattatacaaccgtgtttaggtattgccacttaccttataaaagaagagaatatttcaacaaatgtaaccttgtttacccaacttgggatgaagacacttttagaacatttttcaatgaagaaaaccatggaaattggttagaacaacctgaggcctttgcgttccctgacaaaataccgttcgacttcaagaaaatcatgaacttcaaatcgccctacacttcgtattctacaaacgctaaaaaggacccttttccgcctccaaaggatttattagttcaaatatttccggagattgatgaatataaaagacatgattatgaaggtttgtctcagaattcaagggattttctagatttaatggaagttttacgagaaagatttttgagcaatctaccatggatttacaaattctttcctaatcatgatatattccaggaccccatttttggaaattccgattttcaatcatacttcaatgacaaaactatacattcaaagggttcacccattttatcattcgatatactaccaggctttaataaaatctataagaataagacaaatttttactcactcttaatagaaaggccttcgcagttgacatttgcttcgagtcataatccagatacacaccccactcaaaaacaagaatctgaggggccattacaaatgagtcaacttgatactacacaattaaatgaattattgaagcaacagagtttcgaatatgtgcagttccaaacactttctaatttccaaattttattatcggtattcaataaaatttttgagaaattggagatgaaaaaatcttcaagaggctatattttacatcagcttaatttattcaaaaataccttggatgaaagaattaagaaatctaagattgacgatgccgataaatttatacgtgataatcagcccattaaaaaagaagaaaacattgtgaatgaagatgggcctaacacatcaaggcggacaaagaggccgaagcaaattagattactctcaattgcggattcctccgacgaatcctccacggaggattcaaatgtattcaaaaaggacggtgaatccatcgaagatggcgcatatggagaaaatgaagatgagaatgactctgagatgcaagagcagttaaaatctatgataaacgaacttataaactccaaaataagcacttttttacgggaccaaatggatcaatttgaattgaaaataaacgctttattagataaaattcttgaagaaaaagtcactcgtattatcgagcaaaaacttggttcacacacggggcagttttcaacgttgaagaggccacaactatacatgacggaagaacacaatgttggatttgatatggaagttcctaaaaaacttaggaccagtggtaagtacgcagagactgtgaaagataatgatgatcatcaagccatgtcaactactgcatcgccgtctcctgagcaagatcaagaagcaaagagctatactgacgaacaagaatttatgctggacaaatccatagacagcatagagggaatcattcttgaatggttcaccccaaacgctaagtacgccaaccaatgcgtgcattcaatgaacaaatcaggtaacaagtcgtggagagctaattgtgaagctttatacaaggaaagaaaatcaattgttgaattctatatttatttggtaaatcatgagagtctcgacagatacaaagcagttgatatttgcgaaaaattacgagatcagaacgaaggttcattttcgcgcttggcaaagttcctaaggaagtggaggcatgaccatcaaaattcatttgatggtctgttagtatatctatctaactga

SEQ ID NO: 76780 - DNA, 1404 bp, Saccharomyces pastorianus
atgcgaatctcaaaaaatagccataagcgacaaagaacgaggctatatttcctcgttacatttattatttattcgataataccctgccgtgcggtactcgtgccttggctggatgatgacccatttgaagcaacgcttctagaaatgggggatgaaccatggagtaaggacatcctttcaagcacacctccgttacatccatctgaagttaccgaggataacaaaagcttaaaacaaaggggcaatgtaccgcaatatgtcatcgataatagccctctgctccatttatatagtgaagaaaagtactggccagctgatgttaaggattttgtaaaaagattccagttgagagaccacagtggggagaaaattatcaatgaacaccttcgtgacttaagtgacttacaagagtattattcggtagagttagagaacggaacgtggggccgagtatccagtgaaggtacatatatgacaagtttagatgattttgataaggaccctgactggttgttgggtgaacaaccagaatatggtacaggtcacataaagaaagcaccagcagttctttttgtcgttgacaaaggaaatggttgggtagacgcgttctggttttatttctaccccttcaattggggtccttatattatgggctccggaccatggggaaatcatgtaggggactgggaacattctttagtacgattctataaaggagaaccacaatatctatggatgagtgcgcatgggggtggtagtgcctataagttcgaagccattgagaaaatcaaaagattgcgtcgtgttgacggtaaattgacaaacgaggttattaagaagcctttaatatttagtgcaagaggcacacatgcacattatgcatcagtcggtcaacatgcgcacgatgttccgtttttctttatgccattgagtgactttactgatagagggccattatgggatccttctttaaactattatgcctatacagtgactgtgggggaaaaaatgacaccatgcggcgctgaagaaactaaaatgggactagaatggctatcgttcaaaggcgcttggggcgataaacaattaagacctagggatcccagacaaaaatggtgcccatttcaatggaaatatattgacggaccaaaaggtccactattcaaaaatatggaaagggtttctttatgccaaagatttaaatggtggaatttttggaagggctgcccggcaagaagatatataaaaagaggggaaggtttggatgcggaaaagaatgatcttgtgggtgacaattgtggtatcttgctgtacaacataaggccaaagtggctgcgtagcatactccgttttttgacgtggaggggaagcgtatgtttcattatggactactttacagggtaa

SEQ ID NO: 76781 - DNA, 1233 bp, Saccharomyces pastorianus
atgttttccatattcaattcaccatgtgtttttgaacagctgccatcttttagtcagcccctacattcgcgttattttgattgcagttctccagtgagctattatccagaatgtaaaaggaggaaagcaataaaagctaacctaagagctccaaaaaaaagcgatgcaaattgttcagaacctttgaggtatgcacttgctgaaacaccaaatggttatacattaagcttgtctaagcggattccatatgaacttttttcaaagtacgttaatgagaaattaggtgagctaaaggagaaccattacagaccaacttaccatgttgtccaagatttttttggaaaccagtattatgttgaagatgaagcggatgaagatgctctattgagatctgcattgaaagatctggattttagagccataggaaagaaaattgctaaggatcttttccaagactacgaaatagaattgaatcatagaggtgatgaattgagcatattgagtaagaaggataaaatctttaaggaattctctctagaccaagtgtttgaagatgtttttgttattggctgtggagttgaaaacatagatgatggctcgagagaaaaatatgcacttttaaagattggtttagttaagcatgaggaagaaatttccgaaggtggcatcaacgaaccaaagatgccaataattgaatccaaaatagacgagtctcacgatgatgttaacatgtctgaatctttgaaggaggaagaagcggagaaagcgaaagaaccactaaccaaagaagaccaaataaaaaaatggatagaggaagaaagattgatgcaggaggaaagcagaaaatcagaacaggaaaaagctgccaaggaagatgaagaaaggcaaaagaaagagaaggaagccagattgaaggcaaggaaagaatctttgataaataagcaaaaaaccaagaggtcccagcaaaaaaaattgcaaaattccaaatcattgcctatctctgagattgaggccagcaataaaaataataatagcaattctggttcagcagaaagtgataatgaaagtataaacagtgattctgatacgactttggatttctctgtgtctggtaatacactaaaaaaacacgcttcacccgtattagaagacgttgaggatgaggaagttgacagatacaacgagttcctaagcagatctcccaagggaaactctattattgaggagatataa

SEQ ID NO: 76782 - DNA, 981 bp, Saccharomyces pastorianus
atgtctgctacctctactgctacttccacaagtgcctctcaattgcacttaaactctactccagttactcactgcttatctgacatcgttaagaaagaagattggtctgactttaaatttgctcccatccgcgaatccactgtctctcgtgctatgacttctcgttatttcaaggatcttgacaagtttgccgtttctgacgtgattattgtcggtgcgggctcttcaggtttatccgccgcttacgtcatcgccaagaacagaccagacttgaaggtttgtattatcgaaagttcagttgcaccaggtggtggtagttggttgggtggtcaattatttagtgccatggttatgagaaaaccagctcatttgttcttacaagagttggaaatcccttacgaagacgaaggtgactatgttgtcgttaagcatgccgctttgttcatctctactgtcctttcaaaggtcttgcaattaccaaatgttaaactgttcaatgctacctgtgttgaagatttggttaccagaccacctaccgaaaagggcgaagtcaccgttgctggtgttgtcaccaactggacgttagttacccaagctcacggtactcaatgttgcatggaccctaacgtaattgaattggcaggttacaaaaatgacggaactcgtgacttgagtcaaaagcatggtgtcattttatccactaccggtcatgatggtccatttggtgctttctgcgccaagagaatcgtcgacattgatcaaaaccaaaaattgggcggtatgaagggtctggacatgaaccatgccgaacacgatgtcgttattcactctggtgcatacgccggtgttgacaacatgtactttgctggtatggaagttgctgaactggatggattaaaccgtatgggtccaacttttggagctatggctttgagtggtgttcatgctgctgagcaaattttgaaacactttgctgcttag

SEQ ID NO: 76783 - DNA, 162 bp, Saccharomyces pastorianus
atggggttcctccctgagtgtaatttaacgtgtgctttcttattgcattcgtttacattccctattgctcattgcccttctttcagttgggcatttttttttttcacaattaggccgcccttttttcccaaattggcacttgtttgtacgatctttagctag

SEQ ID NO: 76784 - DNA, 867 bp, Saccharomyces pastorianus
atgatggtacccaggattagtgcttcaccagttttcaagaggatatttcttcgatggggattggtaactttacccatacagaaaaccgtatcccatacactgcgcagggactttagtgccccttgtaggagtatggtaaaatgccttctcctacgacctgggataagtgtgcactcagcacaagacaaaaaattctacagtacagaggaaaaaagtagtcagcttgatgaaaataaaagcaaaagtaacaacgggaagaaaaatgagccacacggtattaaaggattaatggctaagtatggttattctgcactgatcgtatatatcctcttaacttgtgttgatttgccattatgttttctgggagtccactcactaggtgaagagaagattaagatctatctgaacagaggtaagcaattgattgggatgggtgagcctgacgaaagcaaagtcattcaagatgttagaaggaaacaggctcatcgcgaagcagtgcaagcagagaatgctgacaaagtggaggacgcatcgaggaaaactttcaatgagagatggcaagagatgaaggacagcacgttgttggccgaattgctaattgcgtatggcatacacaagagtttgatcatcgttagagtacccctgacggcagtgctaacgccatccttcgtcaagcttctgcagaggtttggcatcgacttgatgaagaagcagaaaaaggtattccaaacgatggcctctggtgccaaaataagatacaaagggaacaaccctagcgatttcatcaagaatgagggcacagcgctcgacattacaaagcgcaaaccaagaaccaaaggccagaaatggtttgatggcctaatgtga

SEQ ID NO: 76785 - DNA, 2595 bp, Saccharomyces pastorianus
atgtacatggccagatgtggccccaagaataatgtgctgtgtttcccatttcaactttcctttctattttcaaaacgactaataaataagcgtttcaagtataccctacaaactgaagatgaaaagaatatgatggggagtttaagtaaaaataaaataataacacctgaagacgttgagttcaaattagcacaattacgagaattttctaatactttaaaagaacgcattcacaacactaaatcggtgaattcagatggccaccaaagcaatagtatcgcaccaatctcagaagactcaaggaatgttaatgtcaccaaaatatcatctgttcctaatgaagaaaaatccaaaaatctatcagatttgattcattcttcgtttttagaaaaaatggatcacctcgtaccaaaagttataagagaaagagtagcagacgacgacatacttgcaaaaaacctttttgatagatcacacagtaattgggcacctgtcatagataggctttatgtcagtgagaaacggttcatggatattgattccagagaattttctgtttggttaaatggtacagtcaaatatttgccatttcatagtatactacacttggatgaaatgctattagaacaaatcaatggagatgttgtaaaatttaatacccacatgtacgaatgtatctttaacaacttaggaaatttaaaaccaactaattttaatcaggatggtactaacgataaagttatcctcaaaatgaaagagttgttagagaggtatgataaggcattaaaaataactgaagaaagaattaacaaaaaagaaggattcccttccaaagtaccaaagatgacgcaagcaatacttaataattgtttaaaatactcgaccaagtgttcaagctttcacgacatggattattttattacaaaattcagagatgattatggcataactcctaataaacaaaacctaactactgtaatacaattctactctaggaaggaaatgactaagcaagcctggaatacttttgacaccatgaaatttttatctaccaagcatttccctgatatctgcacatataacacaatgctgcgaatatgcgagaaggaacggaattttcctaaggctttggacttatttcaagaaattcaagaccacaatataaaacctacaacaaacacttacataatgatggcaagagtgttggcttcttcgagcagtaatgccgttgtcagtgagggtaaatcagactctttaagattactgggatggaaataccttcatgagttggaggacaagaatctttacagacataaaaaggatgacttaaatttatttttggctatgatggcattagccgcgtttgatggtgatattgaattaagtagagctctatattacttgttcatcgcgaaaaagtacaaaactttgtgcgcaaattggaaaggaaacattctcgtagatcaagatacaatttggaagtcaactttaatgccagaaatgctgaattatttgatgcttgcttatgcaagatttgatcccagaaatttgccagtcttatccggttatgaaaaaggcattgaattgagaagaaaatttcttcgcgaatttgattcctccatgaggttagatgatacagacaaattggtcaaatttaaattaccatttcttccaattagtgacctaaattcggaggcacaagtattggcggaatctaacgcaatctggagtttcaatttggaaaatggaggaacgcgcaatacattgacatcttcaaatgaagcggcgttggaggatatcaaaaaatataggcaattacttgattcgtttgcgcaggaagcagaggatttcaacgagtttaagtttaaagttatgtacgaagtgacgaaaatgcaaagagaaagtattaatgtgaacgtcttcaataaaatttcactacacacatatttgtcaattcccataaacttaaaacaacagaaggaattcttgcgaaggttgacgttcttcactttccaacaacacgaatttgaagctgtcataaagcgtttgtatgaaggataccgtaatattccttcgtcccatacgcgtgaccaaaattcaatatcaactgaagctatctcagtatccaaacctgagaccacggaggacctcaacttaataatgcatgatatatggtatattacatgtttgaggcacaaaatcatgatggacaccacgttatatgagctggtgatgaaagccgctatagaatttcaaaatgaggacttagcaaagaaagtatggaatgataggggtaaatttaggacgactgtaccgtttctgaaaatggaccaaagaataagaatagcaaaggatcagaaatttgcccatttaatggttgaattcttcacaaagcaaggaaagtattcggacgcaatagctatcatattgtcttcaaaaaatcgcttcaattggacttattccatggttaggaatttgcataaagcattagaagaaatcgaggatagaaatagcgttgaaatcttactggatgtagtaaacaaaaagtcacacgcaaaggccctgaagtgggaggaacaagaacttaacatgtag

SEQ ID NO: 76786 - DNA, 336 bp, Saccharomyces pastorianus
atgaaatggaaagtgttgcagttaaagacgcaagaaatcaaagtcaacaatttagcaaaatcgagtctccatcaaccaggctccctagttctgcgaaacaggatacgaaacaatcaaacaataagcaatcatcaaaaggtttatataacaaatcttcacaaggacaagctaaagttaaacaatctactccggttaatgaaaagcacaaaccgtcacatgccgttccgaaatctggttctagcaacaggacaggaattagcgctacttcacaacaaaagaaaaagaagaaaaacgcttccacttgcactattctatagtcacttaattttattataa

SEQ ID NO: 76787 - DNA, 819 bp, Saccharomyces pastorianus
atgagagactataaattagtagtattgggtgctggtggtgtcggtaaatcctgcttaaccgtgcagtttgtacagggagtttatttggatacgtatgatccaacgatcgaagattcttacaggaaaaccatcgagatcgataacaaggtattcgacctggaaattttagatacagcgggtatagcacaatttactgcaatgagagaattatacataaagtcaggaatggggttcctgttggtatattcagtaacagatcggcaatctttggaagaattaatggagctaagagaacaggtccttaggatcaaagattccgatcgcgttccaatggttctaataggtaacaaggctgatctaatcaatgaaagggtaataagtgtggaagaaggtatagaggtaagcagtaaatggggtagagttcccttttatgaaacaagcgctttgttgaggagcaatgtggatgaagtgttcgttgatttagttaggcaaatcattcggaatgaaatggaaagtgttgcagttaaagacgcaagaaatcaaagtcaacaatttagcaaaatcgagtctccatcaaccaggctccctagttctgcgaaacaggatacgaaacaatcaaacaataagcaatcatcaaaaggtttatataacaaatcttcacaaggacaagctaaagttaaacaatctactccggttaatgaaaagcacaaaccgtcacatgccgttccgaaatctggttctagcaacaggacaggaattagcgctacttcacaacaaaagaaaaagaagaaaaacgcttccacttgcactattctatag

SEQ ID NO: 76788 - DNA, 654 bp, Saccharomyces pastorianus
atgggaaaggcctgtttgaataaagaagtcggcacttacgaatgtgagggggaaagagatacctactcattttttacctctctctcagatatacaggattcaagtagtaacgaggaacaatgtggggtaggaagtatattgagtgaagatagtttcacgtttgaagggtccaacgtgagcatacggttattttccttggacttaaatgccttaaatgaaaatgagaatggatccaagaatcctgtgaaatttaccattccgccaaaaatagaacaaagaaaggaagcaagacaaagagagaaacgtttaaggagggtggcagtactacctgagaattcgagaaactaccttgttgaatcaagtatggattcaagtagggaatacagtcaaccattttttgactggaggcatgaaatggtagaacatggagaggagagtgtaaaaccgtgtggttgtcataaatcgagaaaagcaaaatgcttcaaagaactggagatggagaatatagaaaagggcgatataaagaagagtctcttttacagagacataattgaatggtgcagagactatgaagtcaataaaactagggaagtctgtgttccgtctatacacgagttttacctacatggaaatggaagtgacaacctcttttga

SEQ ID NO: 76789 - DNA, 1071 bp, Saccharomyces pastorianus
atgtcagtatcttacaagggaacaatttctaagacacattctgtttttaaaccagaaaaaggaaggtattatatttacggggcctttgggtgcccattcactcatagagccattcttgccaggtctttgaagaaattagaacctgctctagggcttgtgttatctcactggcaattagactccaagggtgcccgtttcttatctgctccacaccggccggaaaaatataaagagagattctttactgccactggtggcattgcttcagctaaattagacgaatctgaggagttaggtgatgtgaacaatgactctgcaaggttgttcgtggatggcgctttcgacccggtggaaaatatatcaaggttaagcgagttgtactacttaaatgatcctaagtaccccggtacaaagttcactgtgcctgttctgtgggattctaaaacaaggaaaattgttaacaatgagagtggcgatatcataagaattttgaacagtggcgtgtttgatgaatttatccaaagcgaagaaacgaacgtaatcgatctagttccgcatgatttgatagacgagattgataagaacatcaaatgggttcatccgaagattaatcttggtgtctataaagtcggattagcagaaaacggaaagatttacgaaactgaagtaaaaacactgtttgaaaacttgcagaagatggaatgtgtactaaaagaaaattataagcgcttagaggagcaattcagtggtaacaaacagaaaatcttggctaaatattttgttttaggacagaggttaactgaagcggatatcagattgtatccatcaataattagatttgacgtcgtgtacgtgcagcacttcaaatgcaatttgaaaactataagggatgatttcccgtaccttcatttgtggttgattaatctatactggaattacgcagagtttagatttactacagattttaatcatattaagctcttttacatcaggatggaagtaagtaggaacaagatcaatcagtttggtatagtgccattaggcccaaagccagacatttctagattatga

SEQ ID NO: 76790 - DNA, 1278 bp, Saccharomyces pastorianus
atgacagatcccagaagaagaacaggccgtcatttcttgacaccggagaatttatcctctacattacaaatcacaaacttacctccagaatggaaccaagatataattacttcggtcgtggccggttctggtccagttatagatataaaagctaagaatgacccgagaactggtaaactaaccggtgtactgttcgattatttgactagtaaagattgtaaacgcgcttgggaaattttaaatagaattgaaaactttcccgtaaagatagagcaaataatcccaccaaattataaggaccatcttagagaaacagcaaataaaaattctcaaaagcaggtattacaacttaatagagattcgtaccccttcgaggcgggtttggagctacctttcgaaatggtgacagaagtccccattcctaggcgaccaccgccaccacaggctgcaaataacacaaactctgtatcaaataacacaaacattcaattccccgacatactaagtaaagcatctaaacacttgccaagtttccaagatggctcgattattgcaccagacaaaatttcacaaaatttaagtaaaattccgccgttgcaacttattgaaattatatcaaatttgaaaatattatcaaaccaagaaaacatccaaaaatcgcaattagaatctttcttagatactaacagtgatatcacaatatcagtgacccaagccctactagaaatgggatttatagactacagcgtggtgactaaagtgttgaaatcccaagttggcgaggccccatctttgctttcgagtaataacacaagtaattcgaacacccccgtaagcgtaattagaaataacactccgttgcatgtaccttctaatgaagtcagcaacaatcctaacaatatgccactgaacgtagctatgccaatgcctatgtcgacaccaccatttatccctttacctctgcaacaacaaccgttcggttttgcgccaccgggccctttcatgcctccagctcaaggcccctccatgggacagcctgtgttggcaaatcaactcggccaggtccagcaacaaaatataagttctacagaaggaccctctaacgcgaataaagcgaatgacagcggcaccattaatatggcgaaactgcaattactacctgaaaaccaacaagatatgatcaaacaagttcttactttgacacctgcccagatccaaagtttaccaagtgaccagcaacttatggtggaaaactttagaaaagaatatataatctaa

SEQ ID NO: 76791 - DNA, 753 bp, Saccharomyces pastorianus
atgaatgttcaagacagaaggaggttattaggccctgctgctgccaagccaatggcgtttagcaacactactactcatgtgccagaaaagaaatcaacagatttgacacctaaaggcaatgaaagtgaacaggaactttctctacataccggtttcatcgaaaactgcaatggatctgcattagtagaagctagaagcttaggacaccaaacatcgctcattaccgctgtctatggaccacactccattagaggatccttcacatctcaaggtactatatctattcagttaaagaacggtcttctggaaaaatataacacaaatgaactgaaggaagttagcagctttttaatgggcattttcaattcagtagtaaacctatctcgctaccccaagtccggcatcgatatcttcgtttatttaacgtatgataaggatcttacaaataatcctcaggacgacgattcgcaaagcaaaatgatgtcttctcaaatatcatctctcataccacattgtatcactagtataacgctagccttagctgatgccggcatcgaattagtggatatggcaggtgccggtgaggccaatggcactgtcgtatcattcatcaaaaatggagaggaaattgtaggtttttggaaggatgatggtgacgatgaagatcttttggaatgccttgatcgttgcaaggagcaatataaccgttatagagatttaatgataagctatttaatgaaccaggaaacttag

SEQ ID NO: 76792 - DNA, 1251 bp, Saccharomyces pastorianus
atggctaagactactaaagtaaaaggtaacaagaaggaagttaaggcttccaaacaagccaaagaagaaaaagctaaggccgcctcttcctcttcctccgaatcttcatcctcatcttcatcttcatctgaatctgaatctgagtctgagtctgaatctgaatcttcatcttcatcttcatcctctgattctgaatcctcttcttcatcgtcttctgacagcgaaagtgaagctgaaaccaagaaggaagaatccaaggattcctcttcctcttcctcttcctctgactcttcttccgacgaagaagaagaagaagaaaaagaagaaaccaagaaggaagaatcaaaagaatcttctagctctgattcatcctcatcttcatcttctgatagcgaaagcgaaaaggaagagtctaacgataagaaacgtaaatctgaggacgccgaagaagaagaagacgaagagtcttccaacaagaagcaaaaaaatgaagaaaccgaagaaccagctactattttcgttggtagactatcgtggtctattgatgacgaatggttgaagaaggaattcgaacacatcggtggtgtcattggtgccagagttatttatgaaagaggtaccgatagatctcgtggttatggttacgttgattttgaaaacaaatcttatgctgaaaaggcaattcaagaaatgcaaggtaaggaaattgatggtagaccaatcaactgtgatatgtccacaagcaagccagctggtaacaacgatcgtgccaagaaattcggtgataccccatctgaaccatctgacactttgttcttgggtaacttatctttcaatgctgacagagacgctattttcgaattattcgctaaacacggtgaagttgtttccgtccgtatcccaacacatccagaaactgaacaaccaaaaggtttcggttatgttcaattctccaacatggaggacgccaagaaggctctagacgctttacaaggtgaatacattgacaacagaccagttagattagacttctcttctccaagaccaaacaacgatggtggtcgtggcggtagccgtggttttggtggtcgtggcggtggtcgtggcggtaaccgtggattcggtggtcgtggtggcgctcgcggtggccgtggcggtttcagaccatctggttctggtgctaatactgctccattgggcagatcaagaaataccgcttctttcgctggttcaaagaaaacatttgattaa

SEQ ID NO: 76793 - DNA, 618 bp, Saccharomyces pastorianus
atgacaccaccgatgtgttcgaattccttcttcaaccattcgtcatcaatagaccacgatagtctaccaacgaaaatagtagctggttcttcggtttcttcatttttttgcttcttgttggaagactcttcgtcttcttcttcttcggcgtcctcagatttacgtttcttatcgttagactcttccttttcgctttcgctatcagaagatgaagatgaggatgaatcagagctagaagattcttttgattcttccttcttggtttcttctttttcttcttcttcttcttcgtcggaagaagagtcagaggaagaggaagaggaagaggaatccttggattcttccttcttggtttcagcttcactttcgctgtcagaagacgatgaagaagaggattcagaatcagaggatgaagatgaagatgaagattcagattcagactcagactcagattcagattcagatgaagatgaagatgaggatgaagattcggaggaagaggaagaggcggccttagctttttcttctttggcttgtttggaagccttaacttccttcttgttaccttttactttagtagtcttagccatcttatattatcctgcctgggttgagtga

SEQ ID NO: 76794 - DNA, 1026 bp, Saccharomyces pastorianus
atgagtttagaggctacagattccaaggccatggttttgttgatgggcgtaagaagatgtggaaaatcatccatttgtaaagttgtttttcataatatgcagcctttagatacattatatctagaatcaacctcaaatccttctcttgagcatttctctactctcattgacctggcggtgatggagcttcccgggcagctaaattactttgaaccgagttatgattctgaaagattattcaaaagcgttggggcactagtttatgtcattgattctcaagatgaatatatcaatgcgatcacaaatctggcgatgattattgagtatgcctataaggttaatccctccatcaatatagaggtcttgattcacaaggttgatggcctaagtgaagatttcaaagttgatgctcaacgtgatataatgcaacggacaggtgaagagctgcttgaactggggctggatggtgttcaggtttctttttatttaacttcaatttttgatcactcaatatatgaggcattttcgaggattgtgcagaaactgataccggagctgtcttttctggagaatatgctagataatttaattcaacattcaaaaattgagaaggccttcttatttgatgttaattccaaaatttatgtttccacagattctaaccctgttgatatacaaatgtatgaggtatgctccgagttcatagatgtgacgattgatttgtttgatttatataaagcgcctgttctaagaaatagccaaaagagctcggacaaagataatgtgataaatcctcgtaatgagctacagaatgtatcacaattagctaatggcgtcattatttatttgaggcagatgattagaggcttggcattggtggcgattataagacctaatggtacagacatggaaagctgcttaacggtcgcagattacaatattgacattttcaagaaggggttggaggatatttgggcaaacgcaagagccagtcaagctaaaaatagtattgaggacgatgtgtga

SEQ ID NO: 76795 - DNA, 1038 bp, Saccharomyces pastorianus
atgagttacggcttaacaggtacctcttctaagctaagaggaactagttcaatattttcatggactcaggtgaggcacgtttctcgtagaagaatagcctatccattttatccattcaagaaattgggaagacaacacccgaagaagcatgatacaaacttaaagactgctatgagacagtttttaggtccaaaaaattacaaaggagaatatgtcatgaacaagtattttacggttccgacgaatcatgtacctaactacattaagccagatttggaaaggggacaaagtttagaacacccggtaaccaagaagccattgcaactaaggtatgatgggacattaggtcctcctcctgtagaaaataaaaggttacaaaacattttcaaggatagattgttgcaacctttcccttcaaatccacattgtaagacgaattacgtattaagcccgcaattgaagcaaagcatttttgaagagattactgtggaaggactttctacccaacaagtttctcaaaagtatggattaaaaattcctcgtgtagaggctattgttaaactggttggcgtggaaaacagctggaacagacggaatagagtatcttctgatttgaaaactatggacgagactttatatagaatgtttcccgtcttcgactcagatgcctcttttaaacgggagaatttaagcgaaattcctgttccgcaaaagactttggcgtcaagatttctcaccattgcagagtcagaaccttttgggcctgttgatgcagcccatgttttagaattagagcctgctgtagagaccttaaggaatttgtctactgtcggggaacattctagtggccatcaacaatccactaataagaatacgaaggttgtatatggtgagcttgtcgaaggtgaaagatcacaatataaatttactaacgcaaaggttggaaaagtgggataccgttacggtagcggaaatagggataacaagaaagacagaagaattggctttaataaactgggccaaatggtatatatataa

SEQ ID NO: 76796 - DNA, 708 bp, Saccharomyces pastorianus
atgtcagagaaattccctcctttggaagatcaaaacattgatttcacacccaacgacaaaaaagatgacgacaccgattttttaaaaagagaagcagagatacttggagacgagttcaagactgaacaggatgacatattggaaacggaggcttcccccgccaaagatgatgacgaaattagggattttgaagagcaatttccagatatcaactccgcaaatggcgcggtctcgagcgatcaaaatggtagtgctactgtacctagtggtaatgacaatggcgaggcagatgatgatttttccacattcgaaggtgcgcctgccaatcagagtacagaatccgttaaagaggatcgttctgaagttgtagaccaatggaaacaacgtcgtgctgtagagattcacgaaaaggatttaaaggacgaggagttaaaaaaggagttgcaggatgaagctatcaaacatattgacgatttttacgattcttacaataaaaagaaggaacaacaattggaagatgctgctaaggaagctgaggctttcttaaagaaaagagatgaattttttggtcaagacaatacgacctgggatcgtgcacttcaattaattaaccaagatgatgccgatatcattgggggtagagacaggtctaagtttaaagaaattcttttgagattgaaaggtaacgcgaaggctcccggtgcttaa

SEQ ID NO: 76797 - DNA, 1131 bp, Saccharomyces pastorianus
atgaaacacaatcgtccaaatggtactgggaaagcagtttctggcttcaagcagataataagaaggcttctactcctcttgaacaagaagagaagaaaacaactcgtcatcatcttgaaaagaataacccaagtctatggaataaacctagtattttatgtcaaaaaatggaaattgaaaaaattacagggtgaaaatattcaaataaatgatattatgccatggctaagagagtctactatattagtcttgctgaacatactatatccaactttgatgaagttcccatttttaaaaaatcattatattcactggtcttccattgtaggaatatcgttaatgcttaccaagggtgaggtaccttcgtggattatcgcacactttcttgtggaagctatagcctccaaattaaagatcgcaaaattaacacaatggttgaaaaaaaaaaatttttcccagggtacattaataaaattccagcaaattcttgtgtgtttagcgattattgtattatttgccaaactggacaggagttcgttaccattccgtgtgctttttgaccataggccatttttaatagatttcttcacaatcaatgccattttcacagttttggcagtatatcacagaacattaaaattcttttttacttcagggacgaaatcaaataagaatgtcggcggccatgaagtcaggaacttttctcaataccttggggtcaagaaccataatgattggcccatatcttcatcaaatttgaagcatgtaatggacagactaaatgaaatacatgaagttacaattgatgataattatgcaaatataaacgaaaagataataaattcatatttcaccaagggtttttttccaagtctaaaatggactatattaaggcagtgtatcgaatatttattcgtcaggaaaaggcgcagattaatgggcaacaaattgcgatgcatcgtgatgcttcttacattcaccttcgtggatccaacaagtaaaatgaaaattagcccatttttcgcaaaattctttgcgaagtccttggttaatgtttacttgaaaaagtattggcattgcaactttgggaaatatatactattctttttgtttcagcttagtattatgtga

SEQ ID NO: 76798 - DNA, 1215 bp, Saccharomyces pastorianus
atgtcaactctcaaagttattgaggtatatacacagaatggactgagaaaggtacggccctattataacagaagatcagcgttcgtgaaggggcgctggttgggtaagttactaatagacgttctcgttagtgaatttaaacttcgcccaagagcttattatttggaccaaataaggaaaggcacatataggttgatccgagatggtgtgccgctggtaccagatcatctcatgactaccataatcaagaatcatgatgttttagaaacaactacgcataagcacgaaccgccggtaaaacaatggtgtagccaggaagttgaagcggaggatttacctggcagaatagcgggattcaatattgtttttgaaaatgagagtatcctcgtcattgataaacccagtggtataccagtgcatccaaccggtcagttttaccagaacacaattactgaattactgaagttacatggtgtagatgctcttccttgttatcggttagacaagatcacatcaggcttgttgatattggccaagaacagtcagagtgcgggggaaatccagaagagtattcgttcaagagatatgattaagatctacttggcaagggtcaagggaagatttcctcactccgaattgatattggacaatgaaagtgcggcggaaacgacttttgaggacacttccaaagttacagtggaaatgacacccatatattctatcgatccaaagagacagtttccagttggtttatcggcatcgaaggatgctattaccaagttctacccaataagatacttctctcatgctgatgaaactgtcgtcgcttgtaagccaataactggaagaacacaccaaattcgaatccatttagctaggctcggtcatcccatcgtcaacgatagtgtttattgttcgcatattacaaaataccccgaaaggcttaagtttataactcagtttcctagatgggaggatcagcaggatttagatgctgaggaattgaaagtgaggtttcaaaaatttgtcgatgagacaaaaaacaattgtcggacaatggaaacattttgtcctgaatgtcatactgttgatttaagggatcctgtgctatcagacctagaattatggttgcatgcttggaagtatgaggagattaatggcaaattcaagttcaaaacagatttaccaaaatgggcacaattggacaatagttaa

SEQ ID NO: 76799 - DNA, 279 bp, Saccharomyces pastorianus
atgggtaaaagattttcagaatccgccgcaaagaaagcagctggcttagcaagaaaaagagatcaggcacatgctaaacaaagagcacaaatggagcagctagaagcggaggaagcttctaaatgggaacaaggttcgaggaaagagaatgccaaaaaattagaggaagagcaaaaaagacaagaaaaagcaagagctaaaaaggagcgcgatgcgttgctagccgcagaggaggagcaactgggcaagggtggcaagggtaaaagaaaaatgaaataa

SEQ ID NO: 76800 - DNA, 1728 bp, Saccharomyces pastorianus
atgcaatgtcgatcaattgtgcatcgtctgtactctaaggtctcccacgtaacgacgccaattttctatcccaatgccaaaccgcacctcggccatctttactccaacttattaagtgacgtttaccatcgatggcaattatttaaaggtaatctatccttctttaccacaggtactgatgaacatggattgaaaatccagtgtgctagtgaaagcaatggcttcgatcagccaaaaaagttcgtcgataagctatacccagagtttgttcaattagacaaaatatatggcattaattatacaagatttataaggactacggatcctgaccacattgaaaacgtggtgaaattatgggaactttgtttgaaaaatggctatatttacatgggcgaacataagggttggtattccatttctgatgaaacattctatcctgaatccaaggttattaaagaccccaaaaatgatggtaagtatctgaatacagaatcgaaaaacgaagtagtttatcagtcagagacaaattacttctttaggctatccttatttaacaagaaaatagttgaccatataagaaagaatccagatttcatttttcctgcttctaaaagagaccaaattctaaaagaactagaaaccggtgggacattgccagatttatcgatatcgagaccctctgcgagacttaaatggggtataccgactcctaatgatccgtcccaaaaagtttatgtgtggtttgatgccttgtgtaactacctctcctccatcggtggcataccgtccatcttgagtgatgctactgaagtagtttcaagacattatagcgacaaatcaaacgtaaaaggccaattgttaataccatacccaaaagaagtgcagcgaaacaccattcacgtgataggaaaggatatcgcgaaattccataccgtatattggccttcttttttactggctgctggactgcctttaccaagacaaattgttgttcatggacactggctctgcaatggaatgaaaatgtccaaaagtttgggtaatgttgtagatccgattgatatggcacgttattatggagccgatattgtgcgttggttcttgttagaaaattctaaactggaagaggacggcgattttcaagaagccaaattatacgagacaagagagcttttagtatccaaatggggcaatctgatcaacagatgttgtggctcgaaatccaatattgaaagagctgttatgaaatttagcgacaaggcaaattttcaatttcaggagattttccaaaatgaaccaatagtctccgaacgaattgagaatctggctaaactactcaacaaatcacaagaggtttttgacgaaaaaatagccatattccagtatcctcaactgctaaggcatgtttggagtattatcaacgatgcaaatactttggttcaaaatagtagaccttgggagagggaattagatcaacaagacactataatatttttggctatggaaacgtctagaatcctctccattttatgccaatccattataccatctctctcacaaagtttcctagatcgtattgatgtttcaaaggagaaaaggactataaattatgctagattgggttccgataaaacatatggaaagcaatctaacaagaaaggccgagaagtacctttgaaaaaaattccattcaggttgccagaggaacaaacgaatatgaggtcatga

SEQ ID NO: 76801 - DNA, 747 bp, Saccharomyces pastorianus
atgtctttctacaatactagtaacaatgctaataatggcggtggcttttatcagccttctgcacaatttgccgttccccaagggtcaatgagttttcaaaataccgtcggttcttctaatactggcaacgataacaatttgggtgttgcccccgaccctttgcctgtaggtattttacatgctctttcaactaagggatatgcacatgaacctccattactggaggaaattggaataaatttcgatcatatcataacgaaaactaaaatggttcttataccaatacgttttggtagtggtgtgccacaagaaattctaaacgattcagatttggctgggcctttgatattctttttgttattcggactttttctattgatggctggaaaggttcattttggatatatctatggtgtcgctttgtttggtaccatttctttgcacaatctatcgaaattaatgagcaataacgatacttccattcaaacgaacctacaatttttcaatacagcgtccatcttaggatactgctttttgcctctgtgcttcctttctttactgggcattttccatggtttgaacaacactacaggttatgttgtatcagtactatttgtaatttggagtacttggacctcgtctggatttttaaattctttgctccaattgcaaaatgcaagattgctaattgcctacccactgttgattttctacagtgtttttgccctcatggtaatttttgtctga

SEQ ID NO: 76802 - DNA, 1107 bp, Saccharomyces pastorianus
atgggtattatcgacaaaatcaaagccatcgaagaagaaatggccagaacccaaaaaaataaggccacagaacatcatctgggtcttttgaaggggaaattggctagatacagacaacaactgctagctgatgaagctggtagtggtggtggaggagggtctggttttgaagtggcaaaatcaggtgacgctagagtagttttaataggttacccctccgtcggtaagtcctccttattgggtaaaattaccaccaccaagtctgagatcgctcattatgctttcacgacattgacatccgttcctggtgtattgaagtaccaaggtgcagaaatccaaattgtggatcttccaggtattatttatggtgcttcgcagggtaaaggtcgtggtaggcaagttgttgccacagcaaggaccgcagatctagtattaatggttttagatgccacaaagagtgaacatcaaagagcatctttggagaaggagctggaaaatgtaggcatcaggcttaataaagagaaaccaaatatttactataagaaaaaagaaactggtggcgtgaaagttacgtttacctcccctccaaagaccaatttaaccgaacaggcaatcaaaatgatcttgagagattatcgtatccataatgcagaagttctggtaagagatgaccaatgtacgattgatgattttatcgatgttattaacgaacaacatagaaattatgtcaaatgtctttatgtgtataataagatagatgcagtatcattagaagaggtggataaacttgccagagagccaaacaccgttgttatgtcctgtgaaatggatttgggattacaagacgtcgttgaagaaatttggtaccagctgaacttgagtcgtgtgtatacaaagaagagaggtgttagaccagtatttgatgatcctctagtggtaagaaataattccactattggtgacttatgtcatggtatccacagggatttcaaagataagttcaaatacgcattggtttggggttcttctgccaaacattctcctcagaagtgcggcttaaaccacaggattgatgatgaagatgtagtttctttattcgcgaaatag

SEQ ID NO: 76803 - DNA, 513 bp, Saccharomyces pastorianus
atgcagtgcgcgataactcccagagaggtagtaatagcaaaacaaagacagtataagcattatttgggtatggaaagaccattgtgggtacgttggttgaaggtctatgcaattggtggcgctattattggaagcgggtttctgcttttcaagtacacaacgccaacagatcaacagttaatcagccagctttccccagaattacgtttacaatatgagagggagaaaaaactacgtcagtcggagcagcaggctttgatgaaaattgttaaggaaacttctcaaagtgatgatccaatttggaagacgggcccccttcaatcaccttgggaaaggaacggtgataacgttcaaagcagagatcactttgctaaggtgagagcggaggaggtgcaaaaagaagagttggctaggatcagaaatgaactgtctcagctaagatctgaaacggaggagaaaacaaaggaaatagtccaggataagcagggtaaaagctggtggcgtttctggtag

SEQ ID NO: 76804 - DNA, 348 bp, Saccharomyces pastorianus
atgcatcgactacgagcgtattgtgttatatcagctctgtccgatacactgcttgccttttgtacgagctcggccgagctatacgaaggcccgctacggcagtatcgcattaaagcgacgcaaattcgccgatggtttggtagaagagcttgcagaacgattcccattcgccacgatcccgtagagtgccctgaaccacgctcatgtccatgttcataccattcacgtttgtggagcaaacgtttaggccgaacgcaaatctcaaggcgcctgcagactgcgagaagattaaatcccgaacgtagtacggcttggtcgtatcttgcgagacaagtcctgtattactga

SEQ ID NO: 76805 - DNA, 1608 bp, Saccharomyces pastorianus
atggaagatatagaaggatacgaaccacatatcacgcaagagttgatagaccgtggccatgcaagacgtatgggccacttggaaaactactttgctgttttgagtaggcagaaaatgtactcgaattttactgtttacgcggaattgaataaaggtgttaataagagacaactaatgcttgtcttgaaactattacttcagaaatactcaactcttgcgcatacaatcattcctaagcattatcctcatcatgaagcgtactactctagcgaagagtaccttagtaaaccttttccacagcatgatttcataaaggtgatttctcatcttgaattcgatgacttgattatgaataatcaaccagaatacagagaagtcatggagaaaatctcagaacagttcaaaaaggatgatttcaaagtcaccaataggttaatcgaattgattagccctgtaatcatacctgtgggtaatccgaagaggcctaattggagattgatttgtttaccaggtaaggatactgatgggtttgaaacgtggaaaaacttcgtttatgtcactaaccactgcggctccgacggtgtcagtggatcgaattttttcaaagatttagctctactcttttgtaaaatcgaagaaaaagggtttgattatgatgaagagttcatcgaagatcaggtcatcattgactatgatcgagactacactgaaatttctaaattgccaaaaccgattacggatcgtattgactacaagccagcattgacttcattacccaaattctttttaacaaccttcatttatgaacattgtaattttaaaacctccagcgaatccacacttacagctagatatagcccctctactaatgctaatgctagttacaattacttgttgcatttcagtactaaggaagtagaacaaatcagagcccagatcaagaaaaatgttcacgatgggtgcaccctaacacccttcattcaagcgtgctttcttgtagccctgtatagactagataagctgttcacaaagtctcttctcgagtatgggttcgatgtggctattccaagcaacgcaagaaggtttttaccaaacgatgaagagttaagagattcttataaatacggctccaacgttggaggttcgcattacgcctatctaatctcctcattcgacattcccgaaggtgacaatgacaagttttggagtcttgtcgaatactactatgaccgctttttagaatcgtacgacaacggtgaccacttgattggtctgggggtcctacaacttgattttatcgttcaaaacaagaatatagacagccttcttgccaactcttatttgcaccagcaaagaggcggtgcaatcatcagtaatacaggacttgtctcgcaagatacgaccaagccgtactacgttcgggatttaatcttctcgcagtctgcaggcgccttgagatttgcgttcggcctaaacgtttgctccacaaacgtgaatggtatgaacatggacatgagcgtggttcagggcactctacgggatcgtggcgaatgggaatcgttctgcaagctcttctaccaaaccatcggcgaatttgcgtcgctttaa

SEQ ID NO: 76806 - DNA, 2169 bp, Saccharomyces pastorianus
atgaagggaaactttaggaaaagagatagctccaccaactcaagaaagggtggtaattctgacagcaattatacgaatggaggcgtccctaatcaaaacaacagttcaatgttctatgagaaccctgaaattacgagaaactttgatgaccgtcaagattatttgttagccaatagtataggctctgatgtaacagtaactgttacttcaggtgtgaaatataccggtttattagtatcttgtaatttggaatctactaatggtatcgatgttgtattaagatttcccagggttgctgattcaggagttagtgattctgtggatgacttggctaagactttgggagaaaccttgctgattcacggtgaagatgtcgctgagttggaactgaagaatattgatttgtctcttgatgagaaatgggaaaattccaaagcccaagaaacaacgcccgccagaacaaatattgaaaaggaaagggtaaatggagaatcgaatgaagttacgaaattcaggactgatgttgatatttctggttctggtagagaaattaaggagcgtaagttagaaaaatggacacccgaagaaggcgcggaacattttgatatcaacaagggtaaagctttggaagacgattctgccagttgggatcaatttgctgtgaacgagaaaaagtttggcgtaaagtcaacttttgatgaacatttgtatacaacaaagattaacaaggatgaccctaattacagtaagaggttgcaaaaagccgaaagaatcgctaaggaaattgaatcgcaaggaacttccggtaatattcatattgcagaggacagaggtatcataattgatgattctggtctagatgaagaagacttatactctggtgttgatagaagaggagatgagttgttggccgctttaaaaagcaattctaagcctaattccaacaaggggaataggtatgtcccacctactttaagacagcaacctcatcatatggatccagcaattatctcttcgagtaattctaacaaaaatgaaaatgccgtttccacggatacctctactcccgcagcagcaggtgcgccagagggaaaactcccacaaaagacttctaagaataagaaaagtttgagtagcaaagaagcccagattgaagagttgaagaaattttccgagaaatttaaagttccatatgatattccaaaagacatgccagaagtcttaaaaaggtcaagctctacattaaaatctaattcttcgttgcctccaaaaccgatcagcaaaaccccttcggccaagactgtttctcctactacacagatttctgcagggaaatcagaatctagaagaagtggcagcaacatatctcaaggccaatcatctaccggccataccacgagatctagtacttcatcgagaagacgtaatcatggttccttttttggtgccaagaaccctcatactaatgacgccaagagagtgttgttcggaaaaagttttaatatgttcatcaaatccaaggaggcccacgatgaaaagaagaaaggcgatgatgcctcggagaatatggaacccttctttattgaaaaaccttattttactgcgccaacctggttaaatacaattgaagaatcgtataagacatttttcccagatgaggatacggcgattcaagaagctcaaactaggttccaacaacgccaattgaactccatgggcaatgctgtgcctggtatgaatccagctatgggcatgaatatgggcgggatgatgggctttccgatgggaggtccatcggcatcaccaaatccgatgatgaatggctttgctgctgggtcaatgggtatgtacatgccatttcaacctcagccaatgttttatcacccatctatgcctcaaatgatgccagttatgggtagcaatggggctgaagaaggaggaggaaatatttcgccccatgtccctgcaggttttatggcagctggccctggcgctcctatgggtgccttcgggtatccaggagggatacccttccaaggaatgatgggatcaggtccatctggcatgccagcgaacgggtcggcaatgcacagtcatggccatagtagaaattaccatcaaactagccaccatggccaccataatagtagtaccagtggccataaatag

SEQ ID NO: 76807 - DNA, 1221 bp, Saccharomyces pastorianus
atggcagctgatagaggtaattttttacaaaatattgaaaatgattcaattaacaatggccaggctatggatctgtcacccaaccgaagttcctctgaaagcgatagcagcattcttatgaatgtgaatgatattaaaactttacgtctggacgtagcaccagaagctaaaagcacccaatcaaagaagtcgcttttttatgagaactctgatgatgctgaagaaggagaaatagaagagcgcacgaacaaagaagaaggacaataccatcataaaggatctaaacaacttcgatttgaggttggcaaggaaagtacaggtaaattgcaatctcatctatcggatggaagcgcaacaagtggagagggcaatgtacgaccttgggaattcaggaaggtaatacaagctgagtatagagaaaggttgccgcgcaattatgaattaaagcattggaaaaagccttctaaaataatgataggatccatacttcgtttattagagactaacactgtaagcgctcttgattctgtctttgagaagtacgaaaaggaaatgaaccaaatgacgcatggcgataataatgaggttaaaagaatatattctaagaaggaacgtttgcttgaaataatcctcacaaagataaagaagaagctaagacaggccaaatttccctctaggatatcggaaagagatctagacattgagtatatttattctaagcgacaatttattcaaaaccggtattcacaagaactacaaaataatgagagattggaagcaattctttcacgtgaacaaaaccttttggaggaaactaggaagttgtgcatgaatttaaaaacaaacaacaagaaacgactcactgagaagctaatacaaaaagatctgcatccagtacttaacaaagcaatggaatatacttatggcttagaatctactaatggatttatgcatcctgatggcccagtaacttttagaaatgatagccacgaattgaacctgatgttgaacgaccccataaaaagtacagccgatgtgaggcttgataaggaggaagtactgtcgttgttaccttctttgaaagaatatacgaagaaatcaaaggaacttaaggaaacaatgggtcaaatgatttcggattcacatgaagaagaaatcaaagaggtttttgtaccgcaccatgagtcgcaccaagataagaccgaagaagatatacactag

SEQ ID NO: 76808 - DNA, 1038 bp, Saccharomyces pastorianus
atggaagcacataaccaatttttgaagactttccaaaaagaacgtcatgatatgaaagaagctgaaaaggatgaaatccttttgatggaaaacagccgtagattcgtgatgttccctatcaaataccacgaaatctgggctgcttacaagaaggttgaagcctctttctggactgcggaagaaatcgaattggctaaggacactgaagatttccaaaaattgactgatgaccagaagacctacatcggtaacttgttagccttgtccatttcttctgacaaccttgtcaacaagtacttgatcgaaaacttttctgcccaattgcaaaaccctgaaggtaagagtttctacgggttccagattatgatggaaaacatctactctgaagtttactccatgatggttgatgccttcttcaaggaccctaagaacatccctctattcaaggaaattgccaatttgcctgaagtcaagcataaggctgctttcatcgagagatggatttccaacgatggcagcttgtatgctgaaagactagtagcatttgctgcaaaggaaggtattttccaagctggtaactatgcttctatgttctggttgactgacaaaaagattatgccaggtttagcaatggccaacagaaacatctgtagagacagaggtgcctacactgacttttcatgcttgctatttgcccatttgagaaccaagccaaaccccaagatcattgaaaaaatcattaccgaagccgtggaaattgaaaaggaatactactcaaactctttgccagtagaaaaatttggtatggatttgaagagcattcacacctacatagaatttgtcgctgacggtctattacaaggtttcggtaacgaaaaatactacaacgccgtcaacccattcgaattcatggaggatgtcgctaccgctggtaagaccaccttctttgaaaagaaggtttccgactaccaaaaggccagtgacatgtctaagtccgctaccccatccaaggaaattaactttgatgatgacttctaa

SEQ ID NO: 76809 - DNA, 318 bp, Saccharomyces pastorianus
atgggtctatcatctatctttggcggtggtgcaccatcacaacaaaaggaagcagccactactgcaaagacaaccccaaaccctatagccaaggagctgaaaaaccaaattgctcaagaactggctgtggctaatgcgactgaattagtgaacaaaatttctgagaactgctttgaaaaatgcttaacttcgccatacgctaccagaaacgatgcgtgcattgaccagtgtttggctaaatatatgagaagttggaatgtcatatcaaaggcttacatctccagaatccagaacgcctccgcttctggcgaaatctaa

SEQ ID NO: 76810 - DNA, 1185 bp, Saccharomyces pastorianus
atgtcctctgctgccacggttgaccctaatgaggcgttcggtctcattaccaagaacttgcaagaagtcttgaacccacaaatcatcaaagatgttctcgaagtacaaaagagacatttgaaattatactggggtaccgcgcccactggaagacctcattgtggttattttgttcctatgaccaagcttgctgatttcttgaaagcaggttgtgaagtgactgttcttttagcagacttgcacgcctttttggacaacatgaaggcgccattggaagtggtgaactatagggccaaatactatgaattgaccatcaaagctatcttgagaagcatcaatgttccaattgaaaagctaaaatttgttgttggctcttcttaccagctaactccggactataccatggatatctttagattatccaacattgtttcacaaaacgatgctaaaagggcaggcgctgacgttgtcaagcaagtcgccaatccattattgagtgggcttatctatcctttaatgcaagcgttggacgaacaattcttagatgttgattgccaatttggtggtgtcgaccagagaaaaatttttgtcttagcggaagaaaatttaccaagtttgggctacaagaaaagagcacatttaatgaaccctatggttccaggtttggctcaaggtggtaaaatgtctgcctctgatccgaattcaaaaatcgaccttttggaagaaccaaagcaagttaagaaaaagatcaatagtgcattttgtagccccggtaacgtcgaagagaatggtttactgtcatttgtccaatatgtcattgcaccaatccaagaattgaagtttggtacaaatcacttcgaattcttcattgatagaccagaaaagttcggtggtccaattacctacaaatccttcgaagaaatgaaattggcttttaaagaagaaaaattgtccccacctgatctaaaaattggtgttgctgacgctatcaacgagctattggagccaatcagacaagaatttgccaacaacaaggaatttcaagaggcctccgaaaagggttatccagttgccacaccacaaaagtcgaaaaaggctaagaaaccaaagaataagggtactaagtacccaggcgctactaagaccaacgagattgccacgaaactagaggaaaccaaattgtaa

SEQ ID NO: 76811 - DNA, 1185 bp, Saccharomyces pastorianus
atgacttcacaattgaatgaattagtggaatttctgcattcaccacaacctgccgtaagacagattgccattgataatctagttggatttagtgctggtcccacttcaaaagttttcaaaaatgatagctacagacccattaaggatataataaaaatgatcatggatccagaacacggcacccgtgttattattcagcaaggtgtcactatattggtcaatttatctgaagacaagttagtaagaaatattatattgagcgatgacaagaagttcttaaaatttttggtttggaaaattgtcgatttaaccaatccaaatgccgatataatgtgtatcttattaagcaacttagccaaggatgacggcattcttgctgtcctgaatatcaaaaggaattcaagcggtgaagaggtcgatgatggtttgaagttagcagctttaaataaagaagttttcaaaagtttgagagccatggattgtttaatggattgctttgtcaagggttatgataaaaaattaacaaaatatgccagtttcaattatttagcctttttttttgcggatatctcgaggtttaaattgggcaggatgtattttattgaagagcaggaatacgatggagttgttcctatttcaaaattgctagtatttaccgaaaaatatgatgcaaaggtaagaagagaaggtgtcgcttccacaattaaaaattccctatttgattctgaaactcatgaaaggttactcaaagatgaaaaaataaacttgttaccttacatcctgctacctattgctagtgctaaagattctgaaattgatgaggaagatatgttcaatttaccagatgaacttcaattattaccagaggacaaggaaagagacccgattcctgcaattatatgctgtcatttagaaagtattcttttgctatgtacaacgcatgctggaagagaatacttaagagacaagtccgtttatccactagtgagggagctgcataaaaacgttgagaatgaagatattggtgaattatgttacagaattgttaatatgttaatgagaggcgagccaggtgcgggagcagtggaagagatgccatcaaagaatgcggaagaggaagaagaggaggagagtgaagaagaagaagatgacgacgaagaagatgaaattgtcgaagtggcctag

SEQ ID NO: 76812 - DNA, 3069 bp, Saccharomyces pastorianus
atgaatttagatttaggttctactgtacgaggctatgaatcagataaagataaagacacatttccgcaatcgaaaggcgttagctcatctcaaaaagagcagcatagtcaactgaatcagacaaaaatagcttatgaacagagacttctaaatgatttagaggatatggatgatcctttagatttgtttttagattatatgatatggattagcaccagctatattgaagtagattctgaatcaggtcaagaagttctccgaagtacaatggaaagatgcttgatttacatacaagatatggaaacctataggaacgatcccagatttttaaaaatttggatttggtatataaatttgtttcttagcaacaacttccacgagagtgaaaatacttttaaatatatgtttaacaagggaatcggaacaaagctttcgttattttatgaagagttctccaagctactagaaaatgctcaattttttctagaagcaaaggtgttattagaattaggggctgaaaacaattgcaggccttacaacagactattaaggtcattaagcaattatgaagacagactccgagaaatgaacatcgtagaaaaccagaacagtgtacctgattcaagggaaagattgaagggaaggttaaattatagaacagcaccatttttcattcgtaaatttttaacctcatcgttgatgactgatgacaaggaaaatcgtgcgaacctgaactctaatgttggagttggtaagtctgctcctaacgtatatcaagattctatagtggttgctgactttaagtcagaatcagagaggcttaatttgaatagctctaaacagccctctaaccaacgcttgaatggaaataaaaaaacttcaatatatgcagatcaaaagcaatctaacaatccagtctacaaactaatcaatactccgggacggaaacctgaacggatagtttttaattttaatctaatatatccagaaaatgatgaggagttcaacaccgaagaaatattggcaatgattaagggactttacaaggtacagcgcagaggtaagaagcacaccgaagattatacaagtgacaaaaataagaagaaacgtaagctcgatgtgctggtagagagacggcaagacttaccttcatcacagccacccgttgtccccaaatctacgcgaattgaggtgtttaaagatgacgataatcccagtcagagcacacaccataaaaatacacaggtacaagtgcaaacgacaacgtctattttacctttgaagcctgtggttgatggaaacctcgcacatgagacaccagtaaagccctcactaacatccaacgcttcccgttcacctacagtaacagctttttcaaaagacgctataaatgaggtcttttccatgttcaatcaacattattcaaccccgggtgcgctattagatggtgatgataccactacaagtaaattcaacgtcttcgaaaattttacccaagaatttacagcaaagaatattgaagatttaactgaagttaaagatcctaaacaagagacggtgtcacaacaaactacctcaacaaatgaaaccaacgatcgatatgaaagattgtcgaatagtagcacacggccagaaaaggcagactacatgacgcctataaaagaaactactgaaacagatgtggtacctataatccagacacctaaggaacaaataaggataggagataagaaatcgggggataatacagaaacacaaactcaattaacaagcacaaccattcaaagttctccatttctcacacaacctgaaccacaagcagaaaagcttttacaaactgcagaacattcggaaaagagtaaagagcattacccaacgatcatacctcccttcactaaaataaaaaatcaatcgcctgtcattattgaaaacccacttagcaataatttaagagcgaagtttttatccgaaatttcgcccccattattccaatataacaccttttataactacaaccaagaattgaaaatgagttctctattgaaaaaaatccatagggtatcccgcaacgaaaacaagaacccaattgttgacttcaagaagacgggtgatttatattgtatacgcggagaattaggcgaaggaggttatgccactgtatatctagcagaatctagtcaaggacatctgcgagcgttgaaagtagaaaaacctgcaagtgtatgggaatattacataatgagccaagtggagtttaggttgaggaagagcacaatattaaagtcaataatcaacgctagtgctttacacttgttccttgatgagagctaccttgttttaaactacgccagtcaaggtacggtcttggatttaattaatttacaacgggaaaaggcaattgacggcaacggaataatggatgaatatttgtgcatgtttatcactgtcgagctaatgaaagtacttgaaaagatacatgaagtgggaataatacatggcgatttgaaaccagataactgcatgatcagattagaaaaaccaggcgaacccctgggtgctcattatatgcgcaatggagaggatggctgggaaaacaagggaatctatttaatagatttcggtagatcatttgatatgacactgttaccacctggaacgaaattcaaatcaaattggaaggctgatcagcaagattgctgggaaatgcgtgcgggcaagccatggagttatgaagcggattattatggattagcaggcgtcatacattcgatgctttttggaaaattcatagaaacaatccagctgcagaatggacgatgcaaattgaagaacccattcaaaaggtattggaaaaaagaaatatggggcgttatatttgatttactgttaaatagcggtcaagcttccaatcaagctttgccgatgactgaaaagattgttgaaataaggaatttgatagaaagccatctggaacagcacgcagaaaatcacttaagaaacgtaattctaagcattgaagaggagttatcacattttcaatataaggggaaaccgtcaaggagattttag

SEQ ID NO: 76813 - DNA, 366 bp, Saccharomyces pastorianus
atgtcttcctgctctgtgtcttcattacgacggaagcgatctgaagaggtaatatcgtttgtggtttggtttatgccaggtgaatccttgctacttaatggaaatgcagaatcagttttggaagttagttcggtaacaaatgtagtagattctttttcattctcgaaagctggagaagtagccggcttgaatccgtcaactacatctgcccaatattcctttttcaatgggtttctaggcatttttgattttgaggttgtatatctgtatttgtgtactaatgagtcagatagcgataatattatacgtcaaaaaaacttgggaaggacaatgaattgtaataacgctgatgatatgctgttttaa

SEQ ID NO: 76814 - DNA, 1812 bp, Saccharomyces pastorianus
atgcctagaaacccattgaaaaaggaatattgggcagatgtagttgacggattcaagccggctacttctccagctttcgagaatgaaaaagaatctactacatttgttaccgaactaacttccaaaactgattctgcatttccattaagtagcaaggattcacctggcataaaccaaaccacaaacgatattacctcttcagatcgcttccgtcgtaatgaagacacagagcaggaagacatcaacaacaccaacctgagtaaagatctatccgtgagacatcttttaactctagctgtcgggggtgcaataggtactggtttatatgtgaatacgggtgctgctttatctacaggtggtccggccagtttagttattgattgggttattatcagtacatgtctttttactgtgattaactctcttggtgagctgtccgctgcttttcccgttgttggtgggttcaatgtttacagtatgcgttttattgagccttcatttgcattcgcagtgaacttaaactatttagcacaatggctagttcttctacccttggaattagtggccgcatctattactataaaatactggaatgataaaattaattccgacgcctgggttgctatcttttatgccaccattgcactggctaatatgttggatgttaagtcatttggtgagaccgaatttgtattgtccatgattaaaatcctctccatcattggctttactatcttaggtattgttttgtcctgtggtggtgggcctcacggcggttacattggtggtaaatactggcatgacccaggcgctttcgtagggcacagctcgggaactcagtttaagggtttatgttcagtttttgttaccgctgccttttcttattctggtattgaaatgactgctgtctctgctgctgaaagtaaaaatccaagagaaaccattcccaaggcagcaaagagaactttttggctgatcaccgcctcctatgtgactatattgactttgattggttgcttggttccatccaatgaccctaggttactaaacggttcaagttcagtggacgctgcctcatctcctctggttatcgcaattgaaaacgggggtattaaaggtctaccatcattaatgaacgccattattttgattgctgttgtttctgtggctaacagtgctgtttatgcatgttcaaggtgtatggtcgccatggctcatattggtaatttaccaaaatttttgaaccgtgttgacaagaagggtagaccaatgaacgctatcttgttaactttgttttttggtttgctttcctttgtggctgcaagtgataagcaagctgaagtctttacatggttgagtgccttatctggtttatcgacaattttctgctggatggccattaatctttcccatattagatttcgccaagccatgaaagttcaagaaaggtctttagacgaattacccttcatttctcaaactggcgttaagggatcctggtatggttttatcgttctatttctggttcttatagcatcgttttggacttctctgttcccattaggtggttcaggagccagcgcagaatcattctttgaaggatacttatcctttccaattttgattgtctgctacgttggacataaactgtatactagaaattggactttgatggtgaacctagaagatatggatcttgataccggcagaaaacaagtagatttgactcttcgtagggaagaaatgaggattgagcgagaaacattagcaaaaagatccttcataacaagatttttacatttctggtgttga

SEQ ID NO: 76815 - DNA, 1233 bp, Saccharomyces pastorianus
atgctaagtgcaatttccaaagtctccactttaaaatcatgtacaagatatttaaccaaatgcaactatcatgcatcagctaaattacttgctgtaaagacattttcaatgcctgcaatgtctcctactatggagaaaggggggattgtgtcttggaaatataaagttggcgaaccattcagcgcgggcgatgtgatattagaagtggaaacagataaatctcagattgatgtggaagcactggacgatggtaaactagctaagatcctgaaagatgaaggctctaaagatgttgatgttggtgaacctattgcttatattgctgatgttgatgatgatttagctactataaagttaccccaagaggccaacaccgcaaatgcgaaatctattgaaattaagaagccatccgcagatagtactgaagcaacacaacaacatttaaaaaaagccacagttacatcaatcaaaaccgttgacggcagccaagccaatcttgaacagacgctattaccatccgtgtcattactactggctgagaacaatatatccaaagaaaaggctttgaaggaaattacgccatctggttccaacggtagactattaaagggtgatgtgctagcatacctaggaaaaataccacaagattcggttaacaaggtaacagaatttatcaagaagaacgaacgtctcgatttatcgaacattaaacctatacagctcaaaccaaaaatagccgaacaagctcaaacaaaagctgccgacaagccaaagattactcctgtagaatttgaagagcaattagtgttccatgctcccgcctctattccgtttgacaaactgagtgaatcattgaactctttcatgaaagaagcttaccagttctcacacggaacaccactaatggacacaaattcgaaatactttgaccctattttcgaggaccttgtcaccttgagcccaagagagccaagatttaaattttcctatgacttgatgcaaattcccaaagctaataacatgcaagacacgtacggtcaagaagacatatttgacctcttaacaggttcagacgcgactgcctcatcagtaagacccgttgaaaagaacttacctgaaaaaaacgaatatatactagcgttgaatgttagcgtcaacaacaagaagtttaatgacgcggaggccaaggcaaaaagattccttgattacgtaagggagttagaatcattttga

SEQ ID NO: 76816 - DNA, 741 bp, Saccharomyces pastorianus
atgtcaagactagaaatatactcgccagaagggctacgtctcgatggacgtcgatggaatgaactccgccgttttgaaagttccatcaacacacatccgcacgctgcagacggttcatcctacatggaacaaggtaacaacaaaattatcactcttgttaaaggtccaaaagagccaagattgaaatctcaaatggatacctcaaaggctttattgaacgtatcggtaaacattacaaaattctccaaattcgaaagaagtaaatcaagccacaagaatgaaaggcgtgttcttgagatacaaacctccctggtgaggatgtttgagaagaatgtcatgctgaatatctaccccagaacagttatcgatatcgagatccatgtccttgagcaagatggcggtattatgggatctttaatcaacggtattaccctcgctttaatagatgccggtatatcaatgttcgattacataagtggtatatccgtcgggctgtacgatactaccccattattagataccaattcattagaagaaaatgctatgagtacagtgacactaggtgtggtagggaagtcagaaaaactttctcttttattggtggaagacaaaattccgttagataggttagagaacgttcttgccatcggcatcgcaggtgctcatagggtaagagatttgatggatgaagaactgaggaaacatgctcagaaaagagtcagtaacgcctctgctaggtag

SEQ ID NO: 76817 - DNA, 2454 bp, Saccharomyces pastorianus
atgagcactgaacaggtcggtagaaagaaatcgtatagatgggttagcgcatctcaagcaagttatgacggcgctggatgggacagtagtgacgaatatgactactcttccgaggatggcacaaaaggttcagaaattcacaagcaaaaaatatctaatttgcctagtttacccaagctcaattatacagatgttagtggtgagcatgatgaaaatacgggtgaaaataaagacagcaatgataataacgtcagtaagagtgatattagtcctagtgacaaggaagtaggctatctctcagatggggtgcctaaacttatggcttcaagagagtctgtggaattacaagcgaaaaaatccagcgagcactccaaatcagattatctttcgtcgacagcatctttgaaaagtccaagtgaaaacaaaaaatcaccacatacaaatagggctgtaaacgaagacctagacaatttgatagagcaaatatcaagggagatgacaccagaaattaggcaaacatctgattttcggcgtgattcagacagttgtgacgaaatccaaaacgaagcaccattaggggaagcggtaccctcttcatcatctcctgtagaagaagatgaaaaatcacattccttaggggtttcaatggatactaatgaagctgataccactttcaatacgccaacaaagaatggaaatgaacatttgagtagtgatggcgatgtttctgagcagaaagacgacgagtttaaagtgtccgaaagaggctaccttgcagatattctgcctgcggagaaagaggagaatttacaacaggaagatgatggtgaagtcgagagctcaggagctttggaaaagaaagaaaaaagtgaagaaaagactagtattaggaataggaactctacatctagtgggcaagataaagtagcaaagccgaaacccgtagcaaatgaaacaaaaactagtgataatggatatcgaaattcttttttcaatgattatcagcattcgtcagactctgaagaagatgataacaacgaaggcaacagtggtagtagtgatgatgataatcgatcttcggttagtgataaacatgctgatattaaccagcaatcgaaacaacttgatacaactgacgatgatgcattgtcgtataccgaatcaataaaatattcgacaaatgagacagaagaagaagataatgaagataatgaatccatagaagacaaaaacgaagataatgaatccatagaagacgaaaatgaagatacagatagctataaattttctaatagggaaaaaggttccattctacttacgagtgatgaagaggaggaggaaaaaggtatgagctctgattcagatgaaggcagtctcaaggcgcccaaatcaggttatttctccaaaatgattggtaatgatgataaaggtgattcagcattgcaacctaatcaaatagacaccattgaaaataccaatttgtcaaatagcggttctgaattggaaaacagcgatggcagcgatgaggaagaccacataaatgaagacaaagttttggaagaaagttcagttaaagactccactgatgttgattcttggaagccggacagtgaggccttacgatcagggttcgtacaggatacagccaataagaaagcgccaccaggttacgtgatcgattctaacgggaagctagtagatttaacacctgctagtatgaaaccacgtgttgtatcgacttattcagagatggagagtacttgggatgcattcccttccaaaggcgaagatgacgatttggagacaatcagggacactaagactatatacgacaacaatacgatttataatgttcccggtttgattggtaaccaatcaaatttgccacctctaccgatggacgcacaggaacaattaaatgcaggaaacgataatagtacaacagataatgataatagtaacaatactgccaatgatttggcagcgcgcagtgcatctttcaaaagtgaaaacagaacagtatctcaaggcgaaatgacaagcgtccatgaacccagtactgaagaaatggcgaaattggggcagcagaataacttaccgaaattagatatgaataaactactgaacagtaagacttcgcacgccggtaagatagaacagttgagaaattataagcgtgagctagatggatatgatacggggatacaaacatggataaattatacgctaaaatcatcctctaataaggataaggatttcatagctgaggagtataagcagcatagtcacgttagggaagcatatgcgaacgcggacgatttgagtaagaagcatactgtcattaatacggttgctagtgtcaaccaaaatgtaacgcacttaaggagaaaagttttccagcattctatgaaaccaaaggatttattcgcatcaataggtaagaaaaaactgtaa

SEQ ID NO: 76818 - DNA, 1644 bp, Saccharomyces pastorianus
atgactaaatcggttggtgatgaagagtcacggtacattgaggaccctagttttgcagcagccgctgcatttacaggcggcagggacggggtttcgtacagtaatcagcgatttgctgagggttccggccattcttctgacttagcaaagtcattagaagactatcggcctcctgatgaaaagccgtcctcattgtcatctgtgggggaaggtggcgctaatgaggaagagaagggcggtaacgacggcggtcccttggcaagaattcaaacagggcttttttctccaagactgcgaaatcataggaaaaagattctctcgaagtttgttttgaacaacttcttcattgcttgcgtgtgtgtatcgctcatatcgatttactggggtgcctgttacggaacagatcgttactttttcaaagtgaaaaatattgttgtattgcaggatgcgccttctaatacttcagttcaatctatttccgcgatcataccctcattgttagcgtctgtccccgggacatggcatatatacaacgcaacatcatttcataggaaatttggtacgacgaactccaccgaaattgacagaaagatagtcgatttaatttacgatgagagatactggctggcgttaaacgttaaacctaatgctacagacactttgtataattctttgattagccaagacgcaaactcggagttcaattcatcaattttttttgaatccgtgtttgaaagtggtcgtgacccatcgagtgttaaatcgaccattctaccactcatgcaacaattggaggtccgccttcagaaatattacgtcaaggaatatcttccctcattgatgagcaacatcacttctaatgacagagatcttaatataaacatggagaactgggcgattgcaggacagttgttgttcacctacaacgattatcgtccctttgctgatcgtattctcatggcccctctgcaggtcggtctgatttattgtattttgttaaccgttttacaactgtcattatatggtaagttgcacggagaaatggccagagttctgaagccaaagcatattttaatctacaggcttctaatttcctgggcaacttattttcttctttccattggattctgtaccgtatctgcaatttttaggatcgatttcacccccgcctttggcagaggaggattcgtagtatattggatgtctacgtggttggtaatgatggctgttggtggtgccaatgaaaacgttctcagcttagttatagcttactgccctccatacctgagtatttggttgatgacgtggatcatattaaatatttctgcttcattctacccaatggttttgaacaacgaattttacaggtacggctacataatgccaatccataatgccgtggatatctataaagtgatttttttgaatttaaccaaaagaaaaatgggaagaaattacggtattctcgtggcatgggttgccctcaatacatccttgatgccattttgtatgaagtttgcaggtaaaaaaatgcaaaaaaatgctatgcaagcagcagaagccgctgtcgcagcagctacccagcgtgctagccgcccggcagaggccaatactgataaaaataacaacccgcccggaaattaa

SEQ ID NO: 76819 - DNA, 1275 bp, Saccharomyces pastorianus
atggcaaacccaacaacaaggaagtcctcgattagggctaagctttctaactcatcgctatcaaacctatttaaaaaaaataaaaataaaagacagcgtgaggaaacggaagagcaagacaatgagggtaaggatgagagtaagaaccaggatgaaaataaggacacacagctcactccccgcaagcgtcgccggttgacgaaggagtttgaagagaaggaggctcgttacaccaacgagttgcccaaggaactgcgcaagtatcgtcctaaaggtttcagattcaatttgcctccaacggatagacccatcaggatatatgcagatggtgtttttgatcttttccatcttggccacatgaagcaactggaacagtgtaagaaggctttccccaatgtaacactgatagttggtgtgcctagcgacaaaatcactcacaaactaaaaggtttgactgtgctgaccgataagcagcgttgtgaaactttaacgcactgcaaatgggttgacgaagtcgtgcccaacgctccctggtgtgtcaccccagaatttctactagaacacaagattgactacgtggcacatgacgatattccttacgttagcgccgacagcgacgatatctacaagccaataaaggagatgggaaaattcttgactacccaaagaaccgatggtgtctctacaagtgatattatcacaaagatcatcagagattatgacaaatatttgatgagaaactttgcaaggggtgctaccagacaggagctgaacgtttcttggttgaagaaaaacgaactggagttcaaaaaacacatcaatgaattcaggtcatatttcaagaaaaaccagacaaatttgaataacgcctccagagacttgtacttcgaagtccgtgaaatcttgctaaagaaaacgttgggcaaaaaactctactccaagttaataggcaatgaattaaagaaacaaaatcaacgacaaagaaaacagaattttttggatgatccgtttactaggaagctaatcagggaggcctctccggctacagagtttgccaacgaatttacgggcgaaaactctaccgctaagtcaccggatgacaatggaaatcttttcagtcaggaagacgatgaagacacaaattctaacaacacgaatacaagttccgattcagattcaaacactaactcaacgcctcccagtgaagatgacgacgacaacgacaggttaactttggaaaacctaacacagaagaagaaacaatcagcgaactga

SEQ ID NO: 76820 - DNA, 447 bp, Saccharomyces pastorianus
atggactcgtactcaataacaaacgtaaagtacctggacccgactgaattgcatcgttggatgcaagaaggacacactactacgctgagggagcctttccaggtagtggatgtgcgaggctcagattatatggggggccatatcaaggacggatggcactacgcctattcgcgccttaagcaggatccggagtacttacgtgagctaaagcacagattgttggaaaagcaagcggacggccgcggagcgctgaacgtgattttccattgtatgttatcgcagcagcgcggaccgtctgcagcgatgctgctgcttcggtcgcttgacacggcggaactttctcgctgtcgtctatgggtgttgcgtggggggttctcgcgctggcaatccgtatacggtgacgacgagagcgttacggcgggttacctacccgatctgtggcgttga

SEQ ID NO: 76821 - DNA, 2841 bp, Saccharomyces pastorianus
atggctggtcaagtgttggacggcaaagcatgcgctcagcagtttagaagcaatattgctaatgaaatcaaaagcattcaaggtcacgtgcctgggtttgcacctaaccttgccatcattcaagtaggcaacagaccagactcagccacatatgtacgcatgaagcgtaaggcagctgaagaggccggcattgttgctaatttcattcatttagatgaatccgctactgaatttgaagttctgcgttacgtggaccagctgaatgaggacccacatacacacggtattatcgtgcaactaccattacccgctcatttggacgaggatagaatcacctcgagagtgttggcagaaaaggacgtggacgggtttgggcccaccaacattggcgaattgaataagaagaacggacacccattctttttgccctgcacgcccaaggggatcattgagctgcttcacaaggccaacgtcacgattgaaggttcccggtccgttgtgatcggaagatctgacattgttggctctcctgttgcagaattgttaaaatctctaaactccaccgtcaccatcacgcattctaaaacccgcgatatcgcatcatacttacacgacgcggacatcgtagtcgttgccatcggccaaccagaatttgtgaagggtgaatggttcaaaccaagagacggcacttccagtgataagaaaaccgtggtaattgatgttggcaccaactacgttgctgatccttccaaaaagtccggtttcaaatgtgttggtgacgttgagttcaatgaagcaatcaaatacgtccatctaatcactccagtgcccggtggtgtgggccccatgacggtggctatgttaatgcaaaataccttgattgctgccaaacgccaaatggaagaatcctcgaagcctttgcagattcctcccttgccattgaagttgctaacacctgttccttccgatatagacatctccagagcacaacagccaaagcttatcaaccagcttgctcaagaattgggtatttactctcatgagttggagttgtacggacattacaaggccaaaatttctcctaaagtcatcgaaaggctgcagacgcgccaaaatggtaagtacatcttggtgtctggtatcacaccaacaccactgggagagggtaaatccactacaacaatgggtcttgtccaggcactaacggctcacttgggcaagccagccattgcgaacgtcagacaaccctccctaggacccactttaggtgtcaaaggtggtgctgcgggtggtggttattcccaagtcatcccaatggacgaattcaacttacatttgactggtgacattcacgccattggtgcggctaacaacctacttgctgccgctattgacactagaatgttccatgagaccactcaaaagaacgacgctaccttctacaacagactagtgcctagaaagaacggaaagagaaagtttactccctccatgcaaagaagattgaatagactgggtattcaaaagaccaaccccgatgatctaacacccgaagagatcaacaaattcgccagattgaacattgacccggacactattactatcaagagggtggtcgatatcaacgacagaatgctaagacaaatcaccattggtcaagcccccaccgagaagaaccacacaagagttactggattcgatatcaccgttgcttctgaattgatggctattcttgctctttcaaaggacttgagggacatgaaggaacgtattggaagagtcgttgttgctgctgacgtaaacaggtctccagtcactgttgaagatgtgggttgtaccggtgccttaaccgctttattaagagacgctatcaagcccaacttgatgcaaactttagaaggtactcctgtcttggtccatgccggcccatttgccaacatctctatcggtgcctcttctgttattgctgatcgtgtggctttgaaattggttggtaccgagccagagggaaaaacagaagctggttatgtggttactgaagcagggttcgatttcactatgggtggtgaaagattcttcaacatcaagtgccgttcctctggattgacacctaatgctgtggtcttggttgctactgttagggcattgaagtcacacggtggtgctccagatgtcaaacctggccaacctttaccttccgcatacactgaagagaatatcgagtttgtcgaaaaaggtgccgcaaacatgtgtaaacaaattgccaacattaaacaatttggcgtccccgtcgttgtcgcaattaacaagtttgaaactgacactgaaggtgaaatagccgccattagaaaagccgctttggaagctggtgcatttgaagccgtaacctctaaccattgggccgaaggtggtaaaggtgctatcgacttggccaaggccgtcatcgaagcttccaaccaaccagtggacttccatttcctatatgacgttaactcctccgttgaagacaaattaactactatcgttcaaaagatgtacggtggtgccgcaatcgatatattgcctgaagcacaacgcaagattgacatgtacaaggaacaaggtttcggtaacttgccaatttgtatcgccaagacacaatactctttatcccacgatgcaactttgaaaggtgttccaaccgggttcactttccccatcagagacgtcagattgtctaatggtgctggatacttatacgctcttgccgccgaaatacaaaccattcctggtttggctacctatgctggttacatggccgtggaagtcgatgatgacggtgagatcgatggcctgttctaa

SEQ ID NO: 76822 - DNA, 114 bp, Saccharomyces pastorianus
atgcgatggaacgctttttcctttgtgtcttatgtatatcttcgttattttatttcgttccgcccaaatattgtgctagccagtgttcgcttgtcttggtatagtatcatttag

SEQ ID NO: 76823 - DNA, 306 bp, Saccharomyces pastorianus
atgaacaataatgttgaagaactcctacggcgtattcccctctacaacaaatatggtaaggattttccacaagaaacagtgactaggtttcagatgcctgaatttaagttaccagcgctacaaccaacaagggacttattatgcccttggtacgaagaatgtgacaatatcaccaaagtctgtcagttacatgattcttctaataagaaattcgaccagtggtacaaggagcaatatctgagtaaaaaaccaccgggaattgttggaaacacactattatctccatcaagaaaggataattcctag

SEQ ID NO: 76824 - DNA, 930 bp, Saccharomyces pastorianus
atgtcaaagtttgttatcacctgcatagctcatggagaaaatctcccaaaagaaaccatcgaccagattgcgaaagaaattactgaaagctcggcaaaagatgtatcaatcaatggtaccaagaaactatcggccagagctaccgatatattcattgaagtcgcaggatcgattgttcaaaaagacctcaagaataagctgacgaacgtcattgacagtcataatgatattgatgttattgtttctgtcgacaatgaatatcgtcaagccaaaaagctctttgtctttgacatggattcaacattaatctaccaagaggtcatcgaattgattgccgcttatgctggtgttgaagaacaagtgcacgagatcacagaaagagccatgaacaatgaacttgatttcaaagagtctttaagagaacgcgttaaattattgcaaggcctccaagtcgatacactatatgatgaaataaaacaaaagctagaggtcaccaagggtgtgccagaattatgcaagttccttcacaaaaaaaattgcaagctcgctgttttaagcggtggttttattcagtttgccggttttatcaaggatcagttaggtttagatttttgtaaggcaaacttgttggaagttgacactgatggaaaattaaccggtaaaacactgggtcctattgtagacggacagtgcaagagtgaaacccttctgcaactatgtaatgactacaatgttccagttgaagcaagttgtatggtgggtgacggtggtaacgacctgccagccatggctaccgccgggtttgggatcgcatggaacgccaagccaaaggtgcagaaagctgcaccttgtaagttgaataccaagagcatgactgacattttatacattcttggctacaccgatgatgaaatatacaatagacaatga

SEQ ID NO: 76825 - DNA, 315 bp, Saccharomyces pastorianus
atggtcactcaattaaaatccgcttctgaatacgacagtgctttagcatctggcgacaagttagtcgttgttgacttttttgccacatggtgtgggccatgtaaaatgattgcaccaatgattgaaaagtttgcagaacaatattctgatgctgctttttacaagttggatgttgatgaagtctcagatgttgctcaaaaagctgaagtttcttccatgcctaccctgatcttctacaagggcggtaaggaggttaccagagtcgtcggtgccaacccagctgctatcaagcaagctattgcttccaacgtatag

SEQ ID NO: 76826 - DNA, 1236 bp, Saccharomyces pastorianus
atgcccagggatccattgattggtattgtgggtaagccatcttcagggaaatccaccacattaaattctttgacggacgcaggtgcggcggtaggagcatttccctttaccacgatcgagccaaatcaggcaaccggctacttgcaagttgagtgtgcttgctccagatttggcaaggaagatctttgtaaacctaactatgggtggtgtagcaagggtaaaaggcatatccccatcaaactgttggatgtggcagggcttgtgcctggagcgcattccggcagagggcttggaaataaattcttggatgatttaagacacgcagatgctcttattcatgtggtggacgttagtggaaccacagatgcagaggggaagaacacaagaggatatgatccattgaacgatatagaatggctgcaagacgaaatcaggctttgggttgaggggaacctgaagaaaagatgggggtctattgtgcgtaaacatacagcaacgaaatctagcatagtggacacacttcaagcgcaattcggtgggtacggttcacatgcgcccatgatccaaaaagccctggacaggttgaagggactaccacctttggaaaaatgggatgacgaatggatcactcgagtggtcaagtcctttatgatggagaaatttccaactgtgttggcactcaacaagattgaccaccctgacgccgataaaaatgtttctaaaatcatgctaaagtatcctgacaccaaagctgtactgaccagtgcagtgacggaagtttttttgaggaaattgaaaaagcaaggttttatattatacgaggagggcacggaatttgttgacacatttgaggacgagccagacaaactaaagccactggacgacaagatccttaacagaattgaaaatatcagagatttggtcctgtatagattcggatctacgggtgttgttcaggttctgcaagcagcaacggacattcttggtctaataccggtgtacactgtgaagaacatccagacttttacgggtggcaacggaaccaacgtatttagagattgttttttggtcaagcgaggaacccctgttggcaaagttgccaggtatatcatgggtggcgaggtcaccattgcaagcattgaaaccgttggcggcgtgagagtcagtgaagaaagtcttgttgagcccggtaagaatgacatactcggcttcaagatcgctccaagatcagcataa

SEQ ID NO: 76827 - DNA, 1461 bp, Saccharomyces pastorianus
atgagcgaacaaaaggaagatttgtttaaaccagtaggagaagctgctgcagaggtcgaagatgaaagcatagccgaacagaacaaagctaatgacggcgtcaagttaaccggcgcacaggacgccatgggccatccagtgcaagagatagagtctctttgtatgaattgtggaaagaacggtacaaccagacttcttctgacttccatcccttatttcagagaaataattattatgtcattcgactgtcctcactgtgggtttaagaactgtgagatccaacccgcttctcaaattcaagagaagggctctcgttacgttttgaaagtggagtgccgtgaagattttaacaggcaagttattaagtcagaaactgccacttgtaagtttgtcgagctagacattgagattcctgctaagagaggtcaattgacgacagttgaaggtttgttatccgagatgatcgacgatctgtcgcaagaccaggaaatgagaaaatctatagacgaagctctttacaagaagatcgatgacttcatacagaaagttaaatcctacatcaattgtgaacccaacactattccgattacatttattttggatgatcctgcgggaaattcctggatcgaatacaaacccggtgaacctcaacacaaatggtctcatacccagtacgtgagaaccgacgaacaaaacgttcaagttggcattattactagagaccagttggagcaacgtcgccaagaacaattaaaacaattggccaaccgtgaaagaaatccttctgaatctgtcaaagttggctcagcaaacccacagtttttgtcagacgccaccgacatcgaaaactttaacaacgaggtgcaaacattcagagcttcttgtccatcgtgtacccaagagtgtgaaactcatatgaagccagtaaatatcccacactttaaagaagtcattatcatgtcgacggtctgcgatcattgtggttataagtctaatgaggtgaagaccggtggtgccatccctgacaaaggaagaaggattactttatactgtgacgatgcagctgacttgtcccgtgatattttgaaatctgagacctgtagtatggtaattcctgaattacatcttgatattcaagaaggtacattgggtggtagattcaccactttggaaggtttactaagacaagtctacgaagaactagaatcccgtattttcactcaaacttcggattccatggacgaagcaacgaaagcccgctgggtagaattttttgccaagctaaaggaggccatcgctgggaaagtcaagttcacagtcattatggaagatccgttggccgggtcgtacatacaaaatgtctacgccccagatccggatccaaacatgactatcgaagattatgaaagaactaaagagcaaaatgaagacttgggattgtccgatatcaaggttgagtaa

SEQ ID NO: 76828 - DNA, 1407 bp, Saccharomyces pastorianus
atgaatcttaaactttctgctattgaaagttactttttccatagaagcagactaaatttgcattcatgtttttatgtcggaatcaaactcaacgaattgcccaaaaaaagtcaactgatagcggctcttaagtatactgtaatccaacatgaacgtttgacttgtaatgtattctatgatgaattgaaaaaggaaaacttcttacaaaacattcttgagccactgaaattttgcgatctaatagaataccaccacgattgggaccagttaggggaaaccgaaattaaccacatctttcaaaggtataacttttcatacaacgagaataaatctttatggaagattctgatcctccctaatcaaaatcaaatgctattgctgacagatcatgttctcatggatgggatgtccgctgttcatgtgtgggaaacgtttatggaaggtctacagatgcaacagccggttgaaattgatgaaacaatatattcaccatcattaaattcatcaattgaaaaaataatgtcagccccactatacggagattggcccataccttggaattggcatatagtgcgacaattggtcagtagactacattattggtttccacaaacagtcgtaaaaaacaatagaaatttaatccaatttgccaactactcatttccaaaagacctgctggatgataaaccgagcgatggaactcaaaaatacaaagttaaaaacacgaaccatcaatgggagtttcaattatcgccgactcatctcaacgacattttacaagaatgcaaggccaataatacttcgttgacttcccttttaggtgccctggtctgcaccagtttcgaaaaaatagctgcacatgagtataccggatcatttttgaaaattgaattaccaatgaatattagaaagccttttgaacgagtcttgaaattaccttcagatgataagctcgccgtgggaaattttattgcggtcatagaatttaaccataaactacatcaaaaccgtggaatatgggatatcgcttctcaaattcaaagggccataagaagcagttccgaggataaaataatagataaagtaaacgaagtaaagttattggaggttatttcttctcaacaatacatagaagataaaattagcttgaataacggaccttcttccacatttgaagtaacaaacttaggatttcaaacatttaaagatgcatgcaacaccagtttaccgttttatatagtggatgctacattcaacgagccgcaaggaatatcttcaattttctcactaagcgtaatctctactcctggtaacggactacattgttgtatcagttatccaaatactctcactaaagtgctagaaccccactggcaatatatgaaagattacttaaatttatactag

SEQ ID NO: 76829 - DNA, 954 bp, Saccharomyces pastorianus
atggcaaaagacggcttcgagttatatagatacactccggaattaggtgcgagtatactttttacggtactttttgcactatcgggggtagcatttgtaattttactattccattattctgtgaaaagtaaaaggagagttggctctcttatgaagtcccaacccgtattgcggtattacggtacggtaaacttagcaggagcgtacgttccctttatatttgggtgttttgttgagtgtgtgggctttgcgtttagatgtaaatcaagcaaagacaccacactactaaacccctatattattcaaacggttttcttgctggtgtctccaacattatatgctgccagtatttacatgatttttggtagaatggctactctgctgttcgcagaaaacttaatgatcatgcccgctagattcaatactacaatatttgtgattggcgatgtaggcagtcttctattacaagcaattggtggtgctatgatgtctaaggtgacaagtgcatcttctggttctcatctcgttacagctggtttgttcattcaaattgctttttttggcctcttcattataaatgaggttttgttcattttcaagatgagcaaaaaaccaaccagtgtatcggtaaggtatggtagttggaaatacctaaacgttgctttattggtgaacagtttcctggttttaattaggtcgatcgtcagagctgttgaatttattcagggttatgatggagaaattgcctcgcacgagtggtatctttatatttttgatggtttaccaatgtttttactcgtattaatttttattgtggcgttcccactaattaacatttttagaatacatgaagagtctattcaagcgcaacaatcagcaagatttgacggcaccgactatcctgacgttgaggtgacgtctatcgaagaagatctcgcttcaaagagtgaataa

SEQ ID NO: 76830 - DNA, 333 bp, Saccharomyces pastorianus
atgaacgtaccaaaggcgagactcctaaaagtagcagagttatctgcgaagatatttgatcaaaatttcaacccatcaggtataagaaccggttctaagattctaaatgagcgattaaagggcccttctgtggcaagctactacggcaatccggatatcctgaagttcagacatttgaaaacattatatcctgatattgaatttgtagaccttgaggagcaatatcgattatctatggtagaagcaaagaaacgtcgtggtaaaggtgctcctaagaagatgaagaaggatgcagctgcaactgcaaaggggaaggggaagaaaaaaaaatga

SEQ ID NO: 76831 - DNA, 1830 bp, Saccharomyces pastorianus
atgccaaattacattttctggccatacgaatccttgttcgagaattccgcagctcaaggacctcaggtagctttggcaatttcatttgagaagacgcattttgttgtcttaggtgtttgcgaacctcagtatttagaagaagtaagcatacggcccccttattcagtggtagctactaagaacaatggagcggagggttggaactacaaagttgctgatccctgtaatgtccattttagaatacccaagctgaaatttatgcaattctattcttctgatcccatctcgctcatcataccagaaaaagaagttggtcttcatagtagtgtgggtgaaactctgaactattctaaattagagcaacatccaagatacaagagagataataagaaattgagtgaaactttgaacatcattaatctattccccgcatattgtaaagcattaaatgagctttacccgtttattcaaacatcacaggaaaatttgaggggtactatgcttaatagtgtcgcagcttggtgttcatctacttgtatttataaaatggtcgcaaaaattggtttttatttgacttttgtgatctgctctattgctagtctcgtatcctcgttattaaattattcgcactttcagttggtaaattactcggcatttgtccagcaaatcgatcttcgttgtcaacaaatttgctatttcccagtacagtatgagcgtattaataaaaaggataacatacagaatgttggctctatggtggaaaaagataattctaatagtcaattctcacattcatatatgccttctaaattctatcccgattatattttattgtataatacaatttggcttattattaatgacatttcatttggtttaatattgggggccatacttattgagaatcgagatttcttggtgtcggcatcccatagagtattgaagttttttttatatgattcattaaaaacaataactgaaacgttggcaaataacccccttggcatcaaattaaatgcagaacttgcgaactttttgagcgaattatttctttgggtgatagaattttcttataccacattcataaaaagactcattgatccgaaaaccctatcatctttgctcacgttaacgatatatatgatgtttctcgttggcttttcttttgctgtttccctagcgattgatttttttgcaattttaagttttccaatatatgttttttatcgtatcagcagtaaactgtaccattgtcagttgaatattatggctagtctttttaacctgttctgcggtaaaaagaggaacgttttacgaaataggattgaccataactattttcaactagatcaattgctattgggaacattattatttattattctagtgttcttgactcccacagtgatggcattctatatgtcatacacagttttgagaatgctaacaataactatcgaaatattctcggaggctgtgattgcactcattaaccattttccattgttcgcattattacttaggttaaaagatcctaaacgtctacccggtggcatttcaattgagctcaaaaccacggtttctaacaagcatacaaccttagaacttcaaaacaatcctattaaattcaagagtatgttcagaccatacaatctattgttgtcgcaaatgaggacaaattatttctcgtttgctactgtacgaaagattgtccgaggggagtctataatggtcaatagaaataagctgtactatgttctttattcttcactgcctagtaagccattgagtgtaaaggatttatacaaaaggctgactattcaggcataa

SEQ ID NO: 76832 - DNA, 342 bp, Saccharomyces pastorianus
atgtacatgattgtagtaaaatacttatacgttttatgctcaagtttttttgattgcatcttgaattttaacgaaactgtttttgggcccagccacagagcctttaacccaaataacattattttcatcgtcgactttcaaaactttaacattttggatagtaacatgctcgtttcccatatgaccaggcatctttcttcctggcagtaccctacctgggtcttggttttgaccataagaaccaccgtgtctatgcataatagatgtaccatgagatgctctcaaacccttgaatccataccttttcatcacaccggtaaaacctttgcctttactgactga

SEQ ID NO: 76833 - DNA, 1869 bp, Saccharomyces pastorianus
atgtttagtcactaccgctataaagaaaattcttgccaaaaaagagaggctataccagacaaatctcgcgtatcactgacatttcttcagaaaagaaccgattcatctaacgtcactgttgcagtggccgttgctgttcccattggtgctattattatagtactatccgtcgttttaatagtagtatataggagatgcaaaaaggaaccttctatgcaggatttggacccaaattttgagggcgatttatactatttaccgaagatggattcttctatgaattctgcaaactcagacagcaatgccacagaaaagaggtttatttatggtggttatgacgattttttgcaaccgtcaatcgaaaactcacaatctttcaaagattatgtgaggcgtatcaatgagcatgcaccctccgcttataatattgcttcactggcttcgcagaataacagcaagttatctgtcccctccaagcacattgacctttcgaataagatttctttcgaatcgttagagaattctgagctgattgtttcaccacagcactcaaatactgggcaagactgtgatcaaagatgtggtagtacgtcaaatcctgatgtaaatgaaaagtccagccataacagcgataatcgacttaaatcgaattatacgagtcgtagcgggctcgagcctcagtgttcaagagaggaggaagaaaatattgacagaataagaagcatttataacatttattttgagaaaagtaatagcacgatacgatcctctgtaacttcttcgatacggcgtgactctaaattaaacatcgctacaagaaaaagtgtaaatatgagctctcaagacaatccaaatgatactacattaattgaacagagtcacttcggaagtacaactgtccaagaaattgattccagttccagcgccaatgaggaatatgaagatgcaactgattatctgcaagtgccggcaccacaagagaataaaaacattgcatcgtcagtatattcagaagtagcaaccagagaaaaagtgattcccgaatcgtctctatctcttacattcccaccaccgaatggtctttcaacgagaattacctcatcaatatattctgacacggtcgctaagggccatattcactctgcaaaggctcccgtacgggccctttcggagggttcgggtcagtcaaatcttacttctgctcagcaatatcctacatattttatagatcactgcaaccagagcaatgatgacaattactactataattatcccctcccgttagaacatcctcaaaattatgagaacatcggagatttgcctacgcctacccaattcatttattccacctcttcgcattccttgacgtcattcaaaggaaggcctaaacctccaaaaacactaaaacatgtacctacagctaggcttaatgggacagcgttgaatccaatggatcatcctgaaatgttttacagttcgcctacgaaaataccgtcaacatctttgacaaagcaattttgtacgccccttccatatcagcttagacaaagtgttgttatgaccaacccatcagaactttctatgaaacctcgctataagcctgcaggatctttaagcaatttaataaaggcccaatatctccctggtaactcatccactacaacatcatcttctttatcacaaccgccgtcaacgttatcaaatgcaataaatttccgtgttagtgggttattggatgacactgacatcttgcagcctcctagtgtggggggaatcttaccttttaaagcttctacggaagacttaaggaagcaactgggcacatcccataattacgaaataacaccgtacgagaatgtacatgtataa

SEQ ID NO: 76834 - DNA, 882 bp, Saccharomyces pastorianus
atgaaggcttctagtaaagctattaaattagtactggaccatctgaagtccacgggaagagttcttggctccgtagagtcaggaaattcagcaacaataagtgagaaaacggcatctgttaataaccagcagcagttgcaggaaaagaaaccttctgtcttacagtatagaagctacaatccatatttagttaaggaggatttcctgtcaattctgccagaaaatttgtataaaaagaggggacaatttacaaatgagcttgactttcagttgatgaaagtcagggaccctaaatacttccagttcagggatcagtattacgtgttttgtaatgattataactcgcttactgagtatatcaaattaacaaaacactcgcgaataaacaagatcagggtgaaaatgacgccattggcgcaacccttgccaaccctgttaacaaaattacaaagatattcaaaaaatctatataacgcattccgatcatctgagcaatattttgagggactaaacgaaaaagtcgatgttagtggagaattcactaccaatcagttacggagtatccttgattcggtggaggaaatagaaaataagtccgtattagtctggaatatacccactaaattacggtcgcacgatatattgaattatttttggttttacaacataaggtctagcttcaagatatactgggatgatgaaatgaaaagaaatctacgatttatatctttcgaaaactcgcatgacgcctaccgctttaaaagaaactatcatggattattggctaaagagctattgaccctgtcagaaaagggagatgcagctgactattcgctcgaaatggacgattccaaaatattaattgaacatcttagtgaatga

SEQ ID NO: 76835 - DNA, 1347 bp, Saccharomyces pastorianus
atggatgttcgtcgacctataagggaggcagtcaacaacaggaggaaaccaaaatttttgagcgtttcgtttaaccaagatgattcgtgtttcagcgtggcgttagagaatggatttcgtattttcaatacagatccattgactagtaagctatcgaaaacatttaaagagtctgcgaccaaccaatccaggggcactgggattggctataccaggatgctttatcgtacgaattacatcgcactagtcggaggtggtaaacgaccaaggcatgctctaaataaactgatcatctgggatgatcttttgcaaaaggaaacgattactttgaagtttatgtcttccattaaagacgtgtttttatctaggattcatattgtggtagtcctggagaacacaatagagatcttccaatttcaaaccaatcctcaaagaatttgtcctattttggatatccctcccaatggatcagtggactatgtcgtttgtagcagcaaacatctccagtcgcaagcatcgcagtcacagtctaaaatcttagaaatcattgcattcccatcgaataaatgcgtaggccaaattcaagtagccgacctatcacaaataaaatataattcacaaaacccgaaggaatcagcgcttttgcccacttccatcattaaagcacataaaaatcccatcaaactggttagactgaaccgtcaaggcaccatggtagcaacatgttccgtccagggtacacttataagaatcttcagtacgcataacggtactttaatcaaagaatttagaagaggggtggacaaggcggatatttacgagatgagtttcagccccaatggtagtaagttggccgtattgtcaaataagcaaacattgcatattttccaaatttttgaaacaaccaatacagaaacgaatacgccagaccactctcgtgccaatggttcgagccatcccttgaaaaattatataccgaagggcctatggaggcccaagtatttggactctgtgtggtcgatatgcaatgctcacttaaagaacccaatctttgacgctcatagaaatgacaacagtggtgatgtaactcacgataacgagttctataaagacagatgtagaattggctggtgtcaagactctaataatagagaacaagacgattcgttggttctggtgtggcaaaactctgggatatgggagaaatttgttattttggagaaggaacaacaagattcatcgaaaacgcattattcattgaatgaaagcttgaggaacgaagatacgaaatcagcgggtgagcccaccagatgggagttggtgagagaatcatggagagagctttaa

SEQ ID NO: 76836 - DNA, 1842 bp, Saccharomyces pastorianus
atgaaaggcgaacctaagacttacagcatgagcgacctctcatactacggtgagaaagcacaacaacagaacgagaaacagcaaaaacaatatgttgtgagacgaaattctacgcagtcaacatcaaaacaaaacgtgagcgtggtgctcgaggacaacgccagcgaaagtaatgaactacctaaagggtttatcttgtacgcatctttgatagcattggctttgtcgctgtttctggcagccttggatatcatgatagtttctacaatcattgaagaagtagctaaacagtttggatcgtactctgagatcgggtggttatttaccgggtatagcttaccaaacgctctgttggcgttgatatggggaagaattgccacacctatcggattcaaggagaccatgctatttgctattgtcatttttgaaatcgggtcgctgatctctgctttagcaaattcaatgagtatgctcattggtggcagagttattgctggagtcggcggttgtggtattcaaagtttatcgttcgtcattggttcaaccctggtagaggagtcgcagagaggcatactaattgctgttttgagttgttcgtttgctattgcatctgttgttgggcctttccttggaggagttttcacctccagcgtcacatggagatggtgcttctatgttaatttaccgatcggtggcctagcatttttcttattcctgttcttttataacccaggtttaagtacatttcaagagacaatggataacatccgcaaagttccatcacagtttatcgaaattgttcggaatgtagcatatcatttattgaaaatcaaagggtttagcaaacttaatgggtggagaaagctgttcatggaattgattttcatgtatgatattatcgagtttgtgttttgttcagctggattcacatgtattctattggctttcacatttggcggtaaccggtatgcttggaactccgcatccatcattattcttttcatcatcggtatagtcctggtagtgttagcaggtatctatgatttccttgtcttccccaaatttaacatagtgaaagcaacaccacattaccaaccattaatgtcatggacaaatatcaagaaaccaggtattttcacggttaatatagccttgtttctcacttgtgcaggatatatcagtcagtttacgtatattgtgcaatacttccaattaatttacaatgattccgcctggagagccgctgtacacctggttgcttgcattatttctacagtcgttacagcaatactttgcggtgttatcaccgacaaaacccgccaaatcaaaccgattattgttatttcaagcatttttggtgttgttggtgcgggtatattaaccctattgaacaataatgccaataactctgctcacatcggccttttgatattacctggcgttgctttcggtggtttggcacaaagttccatgctcgcttctcaaattcagttagacaagaagagcccaacttttcgatcagattttgtctctattaccacttttaacacattttgcaaaaatctaggtcaagcactgggaggtgtcatctctaacactgttttcagtgctgctgctatcaagaaattaaccaaggctaatattcagctcccagatggtaccacggtagacaatctggtaatctataggcagaccaatttcgatggctctcattccaaattgggcaatataatttctgaatctctcactgacgtcttttatatggcattaggattttatgcattatctctcatttttgctgtttctgcttcaaataagaaagtcacagcaagcctgagataa

SEQ ID NO: 76837 - DNA, 1578 bp, Saccharomyces pastorianus
atggatgcaaagaaaaatactggtgaagccaataatgatgtattggaagaggaagcagcgattcagttgattgcaccaggtatagcgagaaacttaacacaagaagtcattaccggtatcttctgtaatgtagtaatatatcctcttcttctaatatattttgtcttaactttccgttacgtgactacaaatattgtaccttatgaatttatagatgaaaagtttcacgttggccaaactttgacctatttaaaaggtaaatggactcaatgggaccctaaaataacaaccccccctggaatctatattttgggtttaattaactattattgtataaagcccatattcaagtcgtggagcacactaaccatattaagattagttaatttacttggagggattatcgttttccccattttagtactcaggccaatattcctttttaatgccttaggtttttggcctgtttcattaatgagcttcccattgatgacaacttattattacttattttacaccgatgtgtggtctacaattctgatattgcaatcactcagctgcgtgttaacattaccgtttggccccgtgaagagtatatggttgagtgctttttttgctggtgtaagctgtctcttcagacaaacgaatatcatttggacgggatttataatgattcttgctgttgaacgcccagccattttacaaaaacagttcaacacgcatacattcaataactatttgaaattattcattcatgctattgacgatttctccaaccttgtgctgccctatatgataaattttgttttgttcttcatttatctgatttggaacagatccataacactaggtgataagtccagccactcagcaggcctgcatatagtacaaatattctattgtttcacattcatcaccgttttcagtttacctatatggatatctcgtaattttatgaagttgtacaaattaagaataaaacggaagccagtacaaactttttttgaatttattggtattatgctaatcataagatactttacaaaagttcacccatttttgttagcagataatagacactacacgttctacctcttcagaagattgataggcaacaaaagtagactaatcaagtacttttttatgacaccaatctatcatttctccactttcgcataccttgaagtgatgagacccaaccagctcacttttcatcccatcactccactccccatcaaagaacctgtacatttacccatacaactgacacatgtatcgtggacggccttaataacgtgcaccatggtaactatcgttccatcacccttattcgaacctcgttactatatattgccctatttcttttggagaatatttattacctgcagctgcgaacctttgataaaggatttaaaacctgctaaagaaggcgaaaacccaattaccataagcagtacgaaaagactgttcatggaatttttatggttcatgctcttcaatgtcgttactttagttatcttttccaaggtctcatttccttggaccactgagccctatttgcaaagaataatatggtga

SEQ ID NO: 76838 - DNA, 414 bp, Saccharomyces pastorianus
atgtcatacggcggattggcatcccaagatatagtgacaaaattgattagaaaaatccaaaatacgtctgtgtcttgcaccaagagggatgaaaatctagattcttttaatcaacacttgaaaatgagtcttaaagttgcgcataacacgaagacatgtgcaaagcattgccttcatcgacaggtattcaagaatacgtatcggaaaagaaaagcagtggaagatcaaaggaaaaacttgaacacgcaacttaggcaaaaatttgcgtcgccgtcagacaatttgctttcaccatgctctagaaaactgaatgatcacaagtcaaaacttttctcagccaaatcgcaacccaaaacactggagtttgtgcggggcaaacagaatataccacgcaagccgaatgtagacatttaa

SEQ ID NO: 76839 - DNA, 1200 bp, Saccharomyces pastorianus
atgctagccgaaaaaacccgttccataatcaaagcaaccgttcctgttttggaacagcagggcactgtcatcacgcgtacattctacaaaaatatgcttactgaacacaccgaattacttaatatttttaacagaactaatcaaaaggttggcgcacaaccaaatgccttggccaccactgttttggcagcggctaagaacattgacgatttgtctgtgcttatggaccatgtcaagcaaattggccacaagcatcgtgccttgcaaattaaacctgagcattatccaatcgttggtgagtacttgttaaaagcaatcaaggaagttttaggcgatgctgcgactccagagataattaatgcatggggcgaggcttaccaagcaattgctgacatcttcatcactgttgaaaaaaaaatgtacgaagaagctttatggccaggttggaaaccatttgaaattactgccaaagagtacgttgcttcagatattgttgaatttactgttaagccaaagttcggttctggtattgaattggaaagcttgccaatcactccaggtcagtatattacggtaaacactcacccaattagacaggaaaaccaatacgacgctttaagacactactctctttgttctgcttcaactaaaaatggtttacgatttgcagtaaagatggaagctgccagagaaaattttcctgcaggattagtctctgaatatttacacaaggacgctaaagttggtgatgaaattaagcttagtgctccggctggtgatttcgcaataaataaagagttgatacaccaaaacgaagttccattggtgttactatcgtctggtgttggtgttacaccacttttagctatgttagaagaacaagtcaaatgcaacccaaataggccaatttactggattcaatcttcctatgatgaaaagactcaagcattcaaaaaacatgtagatgaactattagctgaatgtgcgaatgtcgacaaaataattgttcatactgatactgaaccactgattgatgctgcattcttgaaggaaaagtcacctgcgcatgccgatgtctacacttgcggctctgtagcttttatgcaagctatgattggtcatctaaaagaactagagcatcgtgatgatatgattcactatgaaccatttggtccaaagatgtcaaccgtgcaagtttag

SEQ ID NO: 76840 - DNA, 867 bp, Saccharomyces pastorianus
atgcccagtgtctgccatacaagcccgatagaaaagattatccaacaagggcatcgcatacagaatgattccttaataccgtcaaaacgcaccaagctggcccatacggaattaacagcacactatgccactgaagactcgcatgtggaaaaacactttttgcataatggtagtaattttgacggcattgacaatgtaaggtatcaaaatcaaccctctccattaaccttcattactccaaacaacactgtagattccagtgattgggttccgcagttctcgtctatgaagattgacgatccactagaatttagctcagaatataaaaggttgtattccaattacgagtcacagcagcgcctgaattcaagcagacaacacttaccttttaagaattgtatgataagaaagacaagttgcacttacccacctcaaaagacgcttcgacagcaacgccaaggaaaccgggacaacccaacggatgcgtttcaattcgacgcggagttccaagttttggagagagaaattcaaaaagagcggtacgagcccataacacgtcgggacgagaaatggttcgaccaagatcagtcggaactgcaaaggattgccacagatatagtaaaatgctgtactccaccgccttcgtctgcatcctcctcttctactctttcctcctctgtcgaatcaaaactatctgagtcgaagtttattcagttaatgagaaacattagtagcggtgacgtgactttgaagaaaaatgcagatggaaattccgcaagcgagttattctcgtccaacaacggggaactggtcggaaacaggcacattttcgtcaaggacgaaattcacaaagacatacttgattga

SEQ ID NO: 76841 - DNA, 2964 bp, Saccharomyces pastorianus
atgcaatctcaagattcatgctacggtgttgcattcagatctatcatcacaaatgatgaagctttattcaagaagaccattcacttttatcacactctaggatttgcaactgtgaaagatttcaacaaattcaaacatggtgaaaatagcttactatcttcagggacttcccaagattccttgagagaagtttggttagaatctttcaagttgagtgaggttgatgcttctgggttccgtataccacaacaagaagctactaacaaggctcaaagtcaaggtgctctattaaagattcgtttagtgatgtctgctccaatcgatgaaactttcgacaccaacgaaaccgccacaatcacttatttctctactgatttgaacaagattgtcgagaaattcccaaaacaagccgaaaaattgtccgataccttagtgtttttgaaagatccaatgggcaacaacatcaccttctcaggcttagctaatgcaaccgattccgctccaacttccaaagatgctttcttagaagctacctccgaagacgaaatcatctctagagcttcttccgatgcttctgacttactaagacaaacattgggctcttctcaaaagaagaagaagatcgctgtcatgacttctggtggtgattctccaggtatgaatgccgctgttcgtgctgttgttcgtacaggtatacatttcggctgtgatgtttttgctgtttacgaaggttacgaaggtttactaagaggtggtaaatatttaaagaaaatggcttgggaagatgtcagaggttggttaagtgaaggtggtactttgattggtactgctcgttctatggaattcagaaagcgtgagggtcgtagacaagctgcaggcaatttaatttcgcaaggtattgacgctttggttgtttgtggtggtgatggttctttaaccggtgctgatcttttcagacacgaatggccatctttggttgatgaattggttgcagaaggtagattcactaaagaagaagtcgccccatacaagaatttgtccattgttggtcttgtcggttccatcgataatgatatgtctggtactgactctaccattggtgcttattctgctttggaaagaatctgtgaaatggttgactacattgatgccaccgctaaatcccactcccgtgcctttgttgttgaagttatgggtagacattgtggttggttggccttgatggctggtattgctaccggtgccgattacatttttattccagaaagagctgttcctcacggaaaatggcaggatgaattgaaggaagtctgccaaagacacagaagtaagggcagaagaaataacacaattattgtcgctgaaggtgctttagatgatcaattaaaccctgttactgccaatgacgtcaaggatgttttgattgaattgggtctagacaccaaggtaaccattctaggtcacgttcaaagaggtggtacagctgttgctcatgacagatggttagctactctacaaggtgtcgatgctgttaaggctgttctggaattcactcctgaaactccttctccattgattggtattctagaaaacaagataattagaatgccattggttgaatctgtgaagttgactaaatctgttgccactgccattgaaaacaaagatttcgataaggcaatttctttaagagacacagaatttattgaactttacgaaaacttcttatctactaccgttaaagatgatggttccgaattattgccagtatctgacagattaaacattggtattgtccatgttggtgccccatctgctgccttgaacgctgccacccgtgccgcaactctatactgtttgtctcacggccataaaccatacgctatcatgaatggtttcagtggattgattcaaaccggtgaagtgaaggaactatcatggattgatgtcgaaaactggcataacttgggtggttccgaaatcggtacaaacagatctgttgcttcagaagatttaggtaccattgcttactacttccaaaagaacaaactagacggtttgatcattcttggtggttttgaaggtttcaggtccttgaagcaattgcgtgacggtagaacccaacacccaatctttaacattccaatgtgtttgattccagccactgtttctaacaacgttccaggtactgaatactcacttggtgttgatacctgtttgaacgcattagtcaattacactgatgacatcaaacaaagtgcttctgccacaagaagaagagtcttcgtctgtgaagtccaaggtggtcactctggttacatcgcttctttcaccggtttaatcactggtgctgtttccgtgtacactccagaaaagaagatcgacttagcttctatcagagaagatataactctattaaaagagaacttccgtcacgataaaggtgaaaacagaaacggtaagctattggttagaaacgaacaagcttctagcgtatatagcactcaattgttggctgacatcatctctgaagcaagcaagggtaagtttggtgttagaactgctatcccaggccatgttcaacaaggtggtgttccatcttctaaagaccgtgtcaccgcttccagatttgctgtcaaatgtatcaagtttatcgaacaatggaacaagaaaaatgaagcttctccaaacactgacgctaaggttttgagattcaagttcgatactcacggtgaaaaggtaccaactgttgagcacgaagatgactctgctgctgttatctgtgttaatggttctcacgtttccttcaagccaattgctaacctttgggaaaacgaaaccaacgttgaattaagaaagggttttgaagttcactgggctgaatacaacaagattggtgacatcctgtccggtagattaaagttgagagctgaggtagccgctttagccgctgaaaacaaatga

SEQ ID NO: 76842 - DNA, 201 bp, Saccharomyces pastorianus
atgatactatccaaacatgtaaattttacgtaccatacatataacctcatctataatttttaccctgatctaactaactttggcatgcctggtacaatctacgggttacagccatcgttgaaaacgatggaaaaacatatcgagattcctcaatccatacaccattatagtccgttttatcagcttccactaattttttaa

SEQ ID NO: 76843 - DNA, 1707 bp, Saccharomyces pastorianus
atgtcttcattatatactaagttggttaaaggggcgaccaaaataaagatggcccctccaaagcaaaaatatgtggaccctattctctcgggcacttcgagcgcaagaggattgcaagagattacccacgcattggatataaggttgtctgatacagcctggaccattgtttataaggcattgattgtgttgcatctgatgatacaacaaggcgaaaaagatgtcacgctaaggcactattcccataatttggatgttttccaattgagaaagatttcgcatactactaagtggtcttccaatgatatgagggctttgcagagatacgacgaatacctaaaaacacgttgtgaagagtatggcaggctaggtatggatcacctacgagacaattactcctcgctaaagctgggcagtaagaaccagctttcaatggatgaagagctagatcatgttgaatcattggaaattcaaattaatgccttgataaggaataaatactctgtttcagatttagaaaaccatttgttattgtatgcattccaattgttagtacaagatttactaggtctgtacaatgctcttaatgaaggtgtcattacacttttagaatcattcttcgaattgtccattgagcacgcaaaaagaacactggatctctataaggatttcgtggatatgacagaatatgttgttagatacctaaaaataggaaaagctgtcggtttgaaaatccccgttatcaaacatattactacaaagttaattaactcccttgaggagcatttgagagaggaaacaaaaagacaaagaggtgaaccttctgaaccgcagcaagatagaaaaccatctacggccattagctctaccagtagtcacaataacaacagcaatgacaagaataagtctatagcgcagaagaaactggaacagataagggaacaaaaaagactgctggagcaacaattacaaaaccaacagttgctcatttcccccacggtcccacaagatgcttacaacccatttggatcacaacagcaagatttaaataatgacaccttttcattcgaaccaacccagtcacaaatgaccgctcaagtccctcaaccaactgctaatcccttcttgataccgcaacaacagcaacaggctttacagttgacatctgcgtctacaatgccacaaccaagtgagatacagattactccaaatttgaataatcaacaaactgggatgtatgcttctaaccttcaatacaccccaaatttcaccggctcagggttcggcggatacacgaccaccgagaacaatgcaatgatgaccggcactttagatccaacaaaaacggggtctaacaacccattttcgctagaaaatattgccagagaacagcaacaacaaaatttccaaaactccccaaatccttttaccctccaacaagcacaaaccaccccgattcttgctcatagtcaaacaggtaatccatttcaggctcaaaacgtggtgacatcaccaatgggcacatacatgacgagtcccgtggccggtcaacttcagtatgcctctactggtgcgcagcagcaaccacaaatgatgcagggtcagcaaacagggtatgttatggttcccactgcgtttgtccccatcaatcaacaacagcaacaacagcagcatcagcaagaaaatcctaacttaatagatatatag

SEQ ID NO: 76844 - DNA, 309 bp, Saccharomyces pastorianus
atggtccaggctgtatcagacaaccttatatccaatgcgtgggtaatctcttgcaatcctcttgcgctcgaagtgcccgagagaatagggtccacatatttttgctttggaggggccatctttattttggtcgcccctttaaccaacttagtatataatgaagacattgtttcacaaacacgcctctatatctattataggggtagccgagacagtcgcgcttgtatgcttgatattgttactctcgtagatgttagcaagcgtagcaaattggtactcctgctacagatttattttttctccttctaa

SEQ ID NO: 76845 - DNA, 441 bp, Saccharomyces pastorianus
atgtcagcatcagcttttaattttgcctttagaagattttggaatagtgaaacaggccctaaaacagtacacttctgggccccaactttgaagtgggggctggtcttcgcagggctaaatgatattaagaggcctgttgagaaggtatcaggagcacaaaatttatctttattagcgacggcactgatttggacgcgttggtcgtttgtcatcaagcccaagaactatctgttagcttccgtcaattttttcctgggttgcactgcaggctatcatctaacaagaattgctaactttaggatacggaacggtgattcttttaaacaggttattcactacataataaaaggggagactcctgcagccgtcgcagcaaagcaaactgcatccacatcgatgaacaaaggtgtgatcggtactaatccgccaataacgcactga

SEQ ID NO: 76846 - DNA, 1284 bp, Saccharomyces pastorianus
atgtactcaagaaaatccttatccctaatttcaaagtgtgggcaattaagcaggctaaacgcgcaagctgctttacaagcaaggagacacttgtcaattcatgaatacaggtcagctcagttattgagggaatacggtattggtactccagaaggatttccagcgttcactcccgaagaggctttcgaagcagccaagaaattaaacactaacaaactggtcatcaaggcgcaggcattgaccggaggtagaggtaaaggtcacttcgacaccggttacaaaagcggtgttcacatgatcgaaagtcctcagcaggcagaggatgttgcaaaagaaatgctcaatcataacctgattactaaacagacgggaatagcggggaagccagtatctgctgtatatataatgaaaagagtagatacaaagcatgaagcttatttatctattctaatggacagacaaaccaagaaaccgatgatcattgcgtccagtcaaggtggtatgaatattgaagaggtggctgagagaaccccagatgctataaagaaattttcaattgaaacttcaaagggattgagcccacaaatggccaaggatgttgccaagagtctcggtttcagtcccgatgcacaagacgaggcagcaaaagctgtttccaatttgtataaaatattcatggaaagggatgctacacaagtggagattaaccctttgagtgaaattgaacatgatccaacccacaaaatcatgtgtacagacgccaaatttgggtttgatgataacgcatcattcagacaggaaaagatatattcctggagggacttatcacaagaagatcctgatgaagttaaggcaaagaagtatgatttgaattttgttaagttgaagggtaacattggatgtttagtcaatggtgctggtttggctatggctactatggatgtcatcaaattaaatggaggcgatcctgcgaactttttggattgtggtggtggtgccacccctgagaccatcaaacaaggtttcgaattgatcttatccaataagaacgtagatgcaattttcgtcaatattttcggcggtatcgtaagatgtgactatgttgccctggggctggtagaagccgccagagaactagaagttagggtccccattgtggcacgtttgcaaggtaccaaagtagaagaaggccgcgacattatcaataagtcaggcgtgaagatttatttgtttgatgaattagatcctgctgctaaaaaggtcgttgaattgacccaaaattaa

SEQ ID NO: 76847 - DNA, 1791 bp, Saccharomyces pastorianus
atgccagtgtgtaagaactgtcacggaaccgaatttgagagagatctttccaatgctaacaacgatttggtttgtaaagcttgtggtgttgtctcagaagataatcccatcgtctctgaagttacattcggtgaaacaagtgcaggtgctgctgtagtacaaggttcttttatcggtgcaggacaaagccatgctgcatttggtggttctagtgctctagaatctagagaagccacattgaacaatgcaagaaggaaattacgcgccgtttcttacgcattacatatcccggaatatatcacagatgctgctttccaatggtataagcttgcattggctaataactttgtacaaggtcgtaggtcccaaaatgttatcgcttcatgtctttacgttgcatgtagaaaggaaaagacgcatcatatgctgatcgacttctcttcaaggttacaggtgagtgtgtattccataggagccacatttttgaaaatggtgaagaaattacatatcacagaattgccgttagcggatccttccttattcattcaacattttgccgaaaaattggatcttgctgacaagaagatcaaagtggtaaaagatgccgtaaaattggctcaaagaatgtcaaaggactggatgtttgaaggacgtagacctgcaggtattgccggcgcatgtattttactagcttgcaggatgaataatttgagaagaactcatacagagatcgtcgcagtttcacatgtcgccgaggaaactttacagcaacggttgaacgaattcaaaaatacaaaggctgctaaactttcagttcaaaaatttagagaaaatgatgtggaagacggtgaggctaggcctccctcctttgtgaagaacagaaagaaagaaagaaaaataaaggactctttagacaaagaagagatgtttcaaacaagtgaagaagcattgaataaaaatccaattttgacgcaagtattaggagaacaagaactgtcttccaaggaagtcctgttttacttaaaacaattttcagaaagaagggcccgtgttgtggagaggattaaggctactaatggtatagatggtgaaaatatataccatgaagattccgaaaacgaaacaaggaaacgcaaactttctgaaacatgtatccaggatgagcatgttgaaggggaagagagagagacggaagggactgaggaaaaaatgaagaaggtaaagacaaaaacatcagaagaaaagaaagagaacgaatctgggcattttcaagatgccattgatggttactctctagaaacagacccatattgtcctcgcaatttacacttgttacccacaacggacacatacctttcgaaagttagtgacgacccagataatttagaagatgttgatgatgaggagttaaacgcgcacctattaaacgaggaagcttctaaattgaaggaaagaatttggattggtctgaacgcagatttcttacttgaacaagagagtaaacgtttgaaacaggaggcagatattgccacaggtaacacatcagtgaaaaaaaaacgtacgagacgtaggaataatactagaagtgacgaacctacaaaaactgtggatgcagcagcagctatcggattgatgtcagacttacaagataagtctggtttacacgctgcattgaaggcagctgaggaaagtggtgatttcacaactgctgatagtgtcaagaacatgttgcagaaggcaagtttctccaagaagattaattacgacgccattgacggtttgtttaggtaa

SEQ ID NO: 76848 - DNA, 720 bp, Saccharomyces pastorianus
atggcaatagcattatggtattgtccaccacaaggatcagttgcttacgagacattacagatgcttatattttcgtttcaaacgttgttcccagattcaccagtttttgaacctcatgtgacggtaacgtcccatttggtgtgcaatagtaaagatgatgtcaacaaaattttgacctcctgtgttgctgccatccaatcgataaggtcacaccaaacagcaaagaaaggacgtaagggacaggcatcccatactgttgcagctcccttggtatctttcaatggatgcagtgtaggtaaacaatatttcaagaaaattgtgctcgagtgtaacaagaacaaaatactttatggggtcgcacaagtcatgagagagatgtacgtagagatcgatcctgagacgcgaagtagccgtgccgccacttgggtgcacgaggaattccatccgcacgtctcattgctttattcggatattcatccggtaagtcaggcgtcattgcgagtagttcaacaaagaattgaagatgctctagacgtgcaactagttccaagagagaaacgtaagggttccggaaacgctgatgggtccaatgaagtgcaaatgagatgggattttgacgtatcttcatcgctatcttggaatatcccaggaacgtttaaagtggtcaactgtgtggggcccgttcaagaatgggaggtattgggacgggtggacgtttaa

SEQ ID NO: 76849 - DNA, 768 bp, Saccharomyces pastorianus
atggtgaaattacaaaggtttagcgaaaagaaaagcctcatacacgaattcggcaagtttatccttgaaaagcaagactcggcgttaacgggcgacgctgatgcagtgttcaatatcgccatcagtggaggatcgatgaaccaagcgctgtacgaaagtttggtaaatgacaaaaacatttttccacatattaagtggccacaatggagaatcttcttctgtgacgaaagattggttccatttgaggatccgcaaagtaactatggtcagttcaaaaaaacagttttggacccgctagtgcatcaaggcaaccaattgaacttaggccccactgtatacactatcaacgaatcattaatcggtggcggtgaaacggccaatagaaagattgccgaagaatacgcttccttgctgcctgcatcattcgacctaatcttactcggatgtggagaagatggacatacatgctcgttgtttcccggggttgaatttaactaccttgtagaagagatggaccgcaagattttatggtgtaataattcgcccaaggcacccaaggacaggatcacctttacattagcagtagtaaccgaggctaaaagtgtgtgctttctcgttaggggagctgccaaaaaggctatcatgcatgacgtgttaatcgtaaaaaatagcgaactacctagtgtgctggttaatgaaatggtcggaaccaaagtaacatggtttctcgacgacgaagctggcgccttgattcctgaaaactgctaa

SEQ ID NO: 76850 - DNA, 1371 bp, Saccharomyces pastorianus
atgcaacctaaaactttcgtccaccaacttcatgcaattcttctggaaccggaagtaaacaaatggatatactggtctccgactgataacacgatattttttttgaagccatacgaccctaattttagtacacatgttctgaagcgctatttcaaacatggaaatgccaatagttttgttcgtcaactacacatgtacgggtttcataaactatctcatccttccccagaccaatcttctgccaacaatggtaacgttaaagaacttgttgaatggaaatttactcacccatctggattcttcttcaaagaggccaacgccggtatcttgaataaaattcaaagaaagagcactggtgtgggaaaagatggtaaaagaaagaatatactgtcaccaatatctgtcagttacgttgatgcttcgaggttaaatgttctctctcagcaatccggaccagtttctgcaagagaaccatcaaatatgtttatgggcagtcccgtccattactcaacatcccaaagtcctccacatatcagtataccgcaacagcaacaaagtagtggaccttacctaatatcttcactgccccctcaacaacccacggtgaacatgatgcgaaggcaaagcatctcggcgaggatgatgaattcttatgactatcccaatcaattttccacccaagatagcatagtccagcctcagcagccgcaacaagtactttctccacaagcattatctggacctccgatgaagaaatcaggaacactatcttcgacagatgatctgaaaacaacttccttgccaattgttaattacccaatgccgtatcatcctggagcttttgcccagcagcagcagcagcagcagcaaccgctccctacggtcccgccatatagcagttactccactccatttccctcaatgatgaactctctttcgaactctgcttctaactcacctgctttaggagtttgtaataataatgtaacactacccaaaaaaagcaatataagtgaaaggcaagctttggataaccatatacaaactttaaagaactctctatcaacaatcactgatttgatagaaaaacatattaacagcgcatcgcaagatgaaaataaaactctaactaatgatgccatgaacaaagaccttcgaacaagcttatccctattacagaattccaaggaggaaatcattcaacttgaaagtaaatggatgtctatgcaatctgttaaaacaactgccctaccccttcaagagactacgaatacatcatcgaccttaacttctctgacgtccagcataattcccaagagtatacctataatcacgaaaggtgaagttgccactaaaccagcatcttactga

SEQ ID NO: 76851 - DNA, 2346 bp, Saccharomyces pastorianus
atgaatattgcagaagaaccatcagatgaagtaatatctagtggccccgaggatacagatatctgcagccagcagacatcagcgagcgcagaagctggagaccaatcaataaaaattgaaaggaaaacttccactggtcttcaactggaacaattggccaacacaaatttattaaccataagaataaaatggcagttacaagaagaagaagatgatcactgcaactctagaataaccgatcaaataatggacacaatacagcactacaaaggtatctccgttaacaactctgatacagaaacatatgaatttcttccggatacaaggaggttacaggttctcgaacaaaataaagacatctatctttacgagcatggaagtcaagagtatgagaaatcttacaaagataacgaagaggaagatgattggagatacgataccgttttgcaagcacaattcaagtaccccaagtcattagaaaatgcatgtacagatatctcggaattactcaagagcgaacctattggtcagcatattgataaatggtctatcggtgtgaacaagcatgcactaacctatcctggaaatatttttgtcgggggaatagcaaagagcctttctattggtgaactgagtttcttattttcaaaatatggaccaattttatcaatgaaattgatatatgataaaacgaaaggcgaacctaacggatacggattcatttcctaccccttgggttctcaagcttcactttgcatcaaggaacttaatggaaggacggtaaatggctccacactatttatcaactatcacgttgagcgaaaggagagagaaagaatccattgggaccatgtcaaagaaaacaacaatgatgataatttcaggtgtctctttataggcaacttgccttatcacaatcctgaaaaagtagagactttgattacacctaaagaagtcatagaagtaatcaagaaggagttatcaaaaaagtttccggactttgatatcatttcatattactttccgaagagaagtaatacaagaagcagtagttcagtaagtttcaatgaggaagggtcagtagaatcaaacaaatcttccaataatactaatggaaatgcccaagatgaagatatattgaagggttatggtttcatcaagcttatcaaccatgaacaagcactagcagccatcgagaccttcaatggattcatgtggcatggaaacaggctcgttgttaataaggcggttcaacataaagtttacaacaaccacaatagccatgacaggcacccttccatcagtaaccacaatgacatggaggttttggaatttgcaaataacccaatgtatgattacaataattatacatatgatagatattacttcaacaataataaaaacgggaacagcaacgatacctccaatgtacggtattttgattctgtaagatcaacccctgtggcagagaaaatggatctgttctatcctcaaagggaatctttcagtgaaggtcgcggtcagcgtgtgcctagattcatgggcaacaagtttgacatgtaccagtacccatcaacttcttatagcttacctataccaatgagtaatcagcaagaatcaaacctatatgtcaagcacatccctctttcttggacagatgaagatttatatgatttctacaaatctttcggtgaaataatcagcgttaaggtcattactgttgggggtagtaagaacaagtatcgtcaacaatcgaatgatagctcatcagataatgatctcccagtgggatcatcaagaggttatggttttgtttcttctgaaagtccattggatgctgctaaggcaattttgaatacagacgggtatcaagtgagcaaagatcaagtgttatctgtttcttttgctcagaaacgtggtaatttatcttcaagtgatgatgatgatcaatcccaaactgataactcatcaaagttccaaaattttcagccacataatgattatcataaggcttatccaacaaagtataataagaaatttatcaatgccttgatgactcagaaccaatcgcaacagcaagtctcgagggaaaattatttcataccactgcagtaccctaataccaacacaaagcccgtgaacagttacaacttaataagtgcaaaccaaaataacgctaactggatgatgccaatgttcccatcatttgggtttattccacaggtgccgccagtgccctatataatacctccgcagaatcctgcagcaaatcatattcctataatggcaaacggtagtaatgaagaggaagaattttctagtggtgattattctatggactactag

SEQ ID NO: 76852 - DNA, 591 bp, Saccharomyces pastorianus
atgagtagggccaaagaattacaagagaagctcaacttacaagcgaaactccagtctactttcagtaacaatactgctgccgttttggactggctgaaagaatcagatgaaaccggcattagcaatgatacagagcgtaacaaacagttaaaagatcacaaggagttggaggatggtaagaaggcatttttcaagcttcccgttttgcagattggatcgggcctacacttccgcacacaagatgacgcttccgccaaagaagatatacatacgattggtgagtttattgagggtgataaaaaggtaagttcgttggcaaagaaaaagaaaagaagtgacccagggttgcaacgaaataatatgtacaggatcactaaagatgatacgaaagccatgattgcgcttaaaagaaaaatgaggaaaggtgagaaggaaggactaaggaagaaacaagagcatagcaaaagcagcgtttcgaactcatatagtgccagtgatgaagaggatgaagatgtagggacaatgccgcaaaagtccacaaaaaaaaaatttggtttactttttgataaaaaaaagaaggcacgtaaataa

SEQ ID NO: 76853 - DNA, 1314 bp, Saccharomyces pastorianus
atggctgtctctaaagtttacgctagatccgtctacgactcccgtggtaacccaaccgtcgaagtcgaattaaccaccgaaaagggtgttttcagatccattgtcccatctggtgcttctaccggtgtccacgaagctttggaaatgagagatggtgacaaatccaagtggatgggtaagggtgttttgcacgctgttaagaacgtcaacgatgtcattgccccagctttcgttaaggctaacattgatgttaaggaccaaaaggccgtcgatgacttcttgatttctttggacggtactgccaacaaatccaagttgggtgctaacgctatcttgggtgtttctttggctgcttccagagctgccgctgctgaaaagaatgtcccattatacaagcacttggctgacttgtctaagtccaagacctctccatacgttttgccagttccattcttgaacgttttgaacggtggttcccacgctggtggtgctttggctttgcaagaatttatgattgctccaactggtgctaagaccttcgctgaagctttgagaattggttccgaagtttaccacaacttgaagtctttgaccaagaagagatacggtgcttctgccggtaacgtcggtgacgaaggtggtgttgctccaaacattcaaactgctgaagaagctttggacttgattgttgacgctatcaaggctgctggtcacgacggtaaggtcaagatcggtttggactgtgcttcctctgaattcttcaaggacggtaagtacgacttggacttcaagaacccagaatctgacaaatccaagtggttgactggtgtcgaattggctgacatgtaccactccttgatgaagagatacccaattgtctccatcgaagatccatttgctgaagatgactgggaagcttggtctcacttcttcaagaccgctggtatccaaattgttgctgatgacttgactgtcaccaacccagctagaattgctaccgctatcgaaaagaaggctgctgacgctttgttgttgaaggttaaccaaatcggtaccttgtctgaatccatcaaggctgctcaagactctttcgctgccggttggggtgttatggtttcccacagatctggtgaaactgaagacactttcattgctgacttggtcgtcggtttgagaactggtcaaatcaagactggtgctccagctagatccgaaagattggctaaattgaaccaattgttgagaatcgaagaagaattaggtgacaacgctgttttcgctggtgaaaacttccaccacggtgacaaattataa

SEQ ID NO: 76854 - DNA, 1440 bp, Saccharomyces pastorianus
atgttcttttcaaaagttatgcttactcggcgtattttggtgaggggtttggcaacagccaaatcttcagctccaaagttaacagatgtattaatcgtaggtgggggtcctgcaggtttgactttagctgcatcgattaagaattctccgcaattaaaagatctaaagacaactttagtcgatatggtggacttaaaagataaattatcggacttttataattcacccccagattattttacgaacaggattgtcagtgttacgcctagatctattcattttcttgaaaataacgctggggcaactttgatgcatgacaggattcaaagttatgacggactctatgtcacggacggttgttctaaggctactttggatctggcaagggactccatgctttgtatgattgaaattataaatatacaggcttccttatacaacagaatttctcagtacgattcaaagaaggactccattgatattattgataatacaaaagttgtcaatattaaacacagtgaccctaatgatccattgtcctggcctttagtcactctttccaatggtgaagtatacaagacgagattgctagtgggtgcagacgggttcaattctcctaccagaagattttcccagatcccatctaggggctggatgtataatgcctatggtgttgtggccagcatgaagttagagtatcctccctttaaactaaggggctggcagaggttcttacccactggtccaattgcacacttacccatgcctgaaaataatgccactttagtctggagttcatctgaacgtttatcgaggcttttgttgtcattacctccagaatcattcactgcacttatcaatgctgcttttgtcttggaagacgcagacatgaactactattaccgtacattggaagatggctctatggacaccgataaattgatagaagatattaaattcagaactgaggaaatatacgccacgttgaaggacgagtcggatattgatgaaatttacccaccaagagtcgttagtataatagataagacaagagcacgttttcccttaaaattaacacatgcagatcgttattgcactgatagagttgcccttgttggggacgcagcacatacgacacatcctctcgctggacaggggttaaacatggggcaaacagacgttcatggtttagtatacgctttagaaaaggcaatggaaagaggtttagacattggctcttcattgagcttagaacccttttgggcagaaagatatccgtcgaacaacgttctattaggaatggcggataaattatttaaattatatcacactaattttcctcctgtggtagccctaagaacttttggtttgaatctgacgaataagatcggtccagttaagaatatgatcattgacacattaggaggaaatgagaaatga

SEQ ID NO: 76855 - DNA, 1479 bp, Saccharomyces pastorianus
atgtcaaaggcagtaggtgatttaggcttagttggtttagccgtgatgggtcaaaatttgatcttaaacgcagcggatcacggatttaccgtagttgcttataataggacgcaatcaaaggtagataggtttctagctaatgaggcaaaaggaaaatcaataattggtgcaacttcaattgaggacttggttgcgaaactaaagaaacctagaaagattatgcttttaatcaaagccggtgctccggtcgacactttaataaaggaacttgtaccacatcttgataaaggcgacattattatcgacggtggtaactcacatttcccggacactaacagacgctacgaagagctaacaaagcaaggaattctttttgtgggctctggtgtctcagacggtgaagatggtgcacgttttggtccatctttaatgcctggtgggtcagcagaagcatggccgcacatcaagaacatcttccaatctattgccgccaaatcaaacggtgagccatgctgcgaatgggtggggcctgccggttctggtcactatgtgaagatggtacacaacggtatcgagtacggtgatatgcagttgatttgcgaggcttacgatatcatgaaacgaattggccggtttacggataaagagatcagtgaagtatttgacaagtggaacactggtgttttggattctttcttgattgaaatcacgagggacattttaaaattcgatgacgtcgacggtaagccattggtggaaaaaattatggatactgccggtcaaaagggcactggtaaatggactgcaatcaacgccttggatttaggaatgccagtcactttaattggggaggctgttttcgctcgttgtttgtcagccataaaggacgaacgtaaaagagcttcgaaacttctggcagcaccaacagtaccaaaggatgcaatacatgatagagaacaatttgtgtatgatttggaacaagcattatacgcttcaaagattatttcatatgctcaaggtttcatgctgatccgcgaagctgccagatcatacggctggaaattaaacaacccagctattgctctaatgtggagaggtggctgtataatcagatctgtgttcttagctgagattacgaaggcttatagggacgatccagatttggaaaatttattattcaacgagttcttcgcttctgcagttaccaaggcccaatccggttggagaagaactattgcccttgctgctacttacggtattccaactccagctttctctactgcgttagcgttttacgacggctatagatctgagaggctaccagcaaacttgttacaagcgcaacgtgattattttggcgctcatacatttagaattttacctgaatgtgcttctgcccatttgccagtagacaaggatattcatatcaattggactgggcacggaggtaatatatcttcctcaacctaccaagcttaa

SEQ ID NO: 76856 - DNA, 1101 bp, Saccharomyces pastorianus
atgagtgatcgcaatacaagtaacagcctgaccctaaaagaacgaatgttaagtgccggtgctggatcagtactcacttctttgattttgacaccgatggatgtagtgagaatacggctgcaacagcagcagatgattcctgactgttcatgtgatggggctgccgaagtgcccaacgccgttagctcaggttccaaaatgaagacattcaccaacgtcggaggacagaacttgaacaacgcaaaaatattttgggagagtgcttgttttcaagaactgcactgtaaaaattcatcgttgaagttcaacggtactttagaagcattcacgaaaattgccagcgtcgaaggtattacaagtttgtggaggggtatttctttgaccctattaatggctattcctgccaacatggtttattttagtggttatgaatatataagagacgtttctcctatagcctcgacgtacccaacattaaaccccctcttttgtggtgcaattgcgagggtatttgcagcaacaagtattgcacctttagaattggttaaaactaaactgcaaagtataccgagatcatcaaagtccacaaaaacatggatgatggttaaagatttattaaacgaaacgaggcaggaaatgaaaatggtgggtccttctcgggccctcttcaaaggtttggagatcactctgtggagagacgttccgtttagtgcaatatattggagttcctatgaactttgcaaggaaagactatggctagattctactcgatttgcatctaaggacgcaaactgggtccattttataaacagttttgccagtggttgcataagtgggatgatagctgctatatgcacacacccttttgatgtcggtaagacgagatggcaaatatccatgatgaacaatagcgatccgaaaggcggcaataggtctagaaacatgttcaagttcctagagactatatggcgtacagaaggtcttgcggccctctacacgggcctggcagccagagtaattaagatagcgccaagttgcgccatcatgatatctagttatgagatctccaaaaaagtatttggaaacaaattgcatcaatga

SEQ ID NO: 76857 - DNA, 3096 bp, Saccharomyces pastorianus
atgggtgtgcattcattttgggatattgcaggtcctacggcaagaccggtcaggctggaatccttggaagataagagaatggcagtagatgcctccatttggatatatcagtttttgaaagctgtccgtgatcaggaggggaatgcagtgaagaattctcatattactgggttctttaaaagaatttgtaagctattatactttggcattaggccggtattcgtctttgatggtggtgtgcccgtattgaaaagggaaacaatacggcagaggaaagaaagaagacagggaaaacgagagagtgcgaaatccaccgctaggaagctgctggctttacaattgcaaaacggctcaaacgataacgtaaaaaactctacaccgagtagtggcagtagtgtgcagatcttcaaacctcaggacgagtgggacttgcccgatataccgggattcaaatacgataaggaagatgcaagagttaactctaataaaacttttgaaaaactgatgaattcgataaacggtgatggactggaagacattgatttagacactataaatccagcatcggccgaatttgaagagctgccaaaggccacacagtatttgatattatcgtcgttgaggttgaaatcaagactgaggatgggatactcgaaagaacaattggagaccatcttcccaaatagtatggatttctcaagatttcaaatagacatggtgaaaaggaggaatttttttactcaaaagttaatcaacactactgggtttcaggatggtggagcgtctaagctgaacgaggaggtgatcaataggatatccggccaaaagagtaaagagtacaagttgactaagactaataacgggtggattcttggactaggggcaaacgatggctctgatgcgcaaaaagcaatcgtaatagacgataaagatgcaggcgctttggtaaagcagttagatagtaatgctgaggacggggacgtgctccgatgggatgatttggaagataattccttaaaaatagtgcgacatgagtcttctaacgcgacgacagctccacagaaaaggagtaaccggtcagaagatgagggatgtgactctgatgaatgtgagtgggaagaagttgaactcaagcccaagaacgtcaagtttgtggaagatttttctttgaaagctgcaaggttgccttacatgggccaatccctaaacaacgctggcagtaaatcgtttttggacaaaagacatgatcaggcatcgcccaccaagactattccaacaatgagaattagcagaatcagcgtggaagacgacgatgaggattacctgaaacaaattgaggaaattgaaatgatggaggcagtgcaactttctaagatggaaaagaaacctgaagcggacgacaaatcaaaaatcgctaagccggtaacgtcaaaaggtacagaggctcgtccaccaatagtacagtatggattacttggcgcacaaccggacagtaagcaaccgcatcatgtcacaaatttgaatagcaaatcagagtcggtcatcaaaaggaccagcaagacagttctttctgagtttaggccaccgtctcagcaggaggataaaggggctattttaacagagggggagcaaaacctgaatttcatttctcacaagataccacagtttgattttaacaataaaaattccctgctttttcaaaagaataccgagagtaatgtgtctcaagaagccacgaaggaaaagtctccaattcctgaaatgccgagctggttttcttcaactgcttcccagcagttgtataatccctataacacaacaaatttcgtggaagataaaaacgtaagaaatgaacaagaaagtggagcagaaactaccaataaagggagtagctatgaactcttgaccggcctaaatgctacggaaatattagaaagagaaagcgagaaagagagctccaatgatgaaaacaaggacgacgacttggaagttttatcagaagaactatttgaggacgttcccactaaatctcagatttcaaaagaagcagaggatagcgatagtagaaaagtcgaatctataaataaggagcatagaaagcctcttatattcgactatgacttctccgaagatgaagaagataacatagtagaaaatatgataaaggaacaagaggagtttgatacatttaaaaacacgactttgtccacttctgctgaaagaaacgttgccgagaacgcttttgtggaggatgaattattcgaacaacagatgaaggataaaagggattcggatgaagtaactatggatatgatcaaagaagtgcaagaattactatcaaggtttggcatcccctatatcactgcgcccatggaagctgaagcacagtgtgcggaattgttacaactaaaccttgtcgatggtataattaccgatgacagtgatgttttcctatttggaggtacaaagatctacaaaaatatgttccacgaaaagaactatgttgagttttatgatgcggaatctattttaaaattattgggcttggatagaaagaatatgattgagttggcacagcttttagggagcgattacacgaatggattgaagggtatgggccccgtttcaagcattgaagtgattgcagaatttggaaacctaaaaaattttaaagactggtataataatgggcagtttgataagcgtaagcaagaaacggaaaataaatttgaaaaagacctgagaaaaaaactggtaaataacgaaattatcttagatgatgattttcctagcgtcatggtttatgatgcgtatatgagaccagaagtcgatcacgataccacgccgtttgtttggggggtaccagatctcgatatgcttcgttcattcatgaagactcaactaggttggccacacgaaaagtctgatgaaattctcattcccttaattagagatgttaataaacgcaaaaagaaggggaagcaaaaaaggattaatgaattttttccaagggagtacatatctggtgataagaagctcaatacaagtaagagaatttcaaccgcaacaggtaaactaaagaaaagaaagatgtaa

SEQ ID NO: 76858 - DNA, 441 bp, Saccharomyces pastorianus
atggggtcgaaaagaacatacgtcgcgaaaaaaactgtgacacatgtgttatattgcgttcctacaaggtggatatccttggatagacctgcaacttctgcgttaccaatattcgatttatccaggttagaaaggaaatatagcatccccataagaggaatcaagtatatatccattttgcgcaagacacgcttttccattggatgggaaggggaggggatgccgtcatcatccgtggtagtagccataatttcccgttcggtggcaagttccgacttcttgtcatggctgcgattatgcaagctagcgtcatggccttcatcttcctggaacgtgacttccgtaggcttttcttctgatccatcattggtgggtgatatgaaaagcacatcatccaccaaatgcttaggtgactccattgtaaatttgttgctcatctag

SEQ ID NO: 76859 - DNA, 1605 bp, Saccharomyces pastorianus
atgagcaacaaatttacaatggagtcacctaagcatttggtggatgatgtgcttttcatatcacccaccaatgatggatcagaagaaaagcctacggaagtcacgttccaggaagatgaaggccatgacgctagcttgcataatcgcagccatgacaagaagtcggaacttgccaccgaacgggaaattatggctactaccacggatgatgacggcatcccctccccttcccatccaatggaaaagcgtgtcttgcgcaaaatggatatatacttgattcctcttatggggatgctatatttcctttctaacctggataaatcgaatattggtaacgcagaagttgcaggtctatccaaggatatccaccttgtaggaacgcaatataacacatgtgtcacagtttttttcgcgacgtatgttcttttcgaccccataggtactaaccttctgaaaattatgggtccgccattaatgatgagtatctgtttgacctgtttcggtgctatttcgctgggaactgcttgggttaagaattatgctcaattgatcgttgtcagactactactgggtgcctttgaaggtatgatttatcccgctattaacatgtacctttcagtctgctatagaagagaacaatatgctctgaggttcgcttttgtcttcagtgcagcctgtttgtcttcatcttttggtgggctgattgcttatggttgttccaaaatcagcggttctctaaaggactggcaatacatttacattgtcgaaggttgtatctctttggggttcgtaccattctatgccttcgggttgagcaaaaatttggaggattcgtggtttttcaataaggaggaaaaagagtacatttccgaaagatacaagactatgaacacttttgacccggacgaaaaatttgaatggttccaagtgtggcaagcagttaaggatgtcaagacttgggctagtgctgtggcattattcggtatcgatttgactacttttggtctaacagtcttcttgccgatcatcattaccagtatggggttcactaatgtcagagctcaattaatgaccgtgcccatctatttccttacagcaattgtgttcttcatttgtgccgtttggtctgatcgtataaagttgagatctccattcatcctgggtgcttgtctgacgacttcgataggcatagctatcgtccttggttctcaagttcatggtgtgagatattttggcgtttacattctttgtatgggtatttacgttaatgctgcctgtaactgtttatggttaagtggtaacactggtaattacttcaagagagccaccgctttaggaattaatctatttttcgggtctggttcagggttggtctctggtcaaatttttgttgccaaagacaagccaagatatatcaaagggctgtcgattagtctggcctttcaagtcttctccatatttatgacggttgtgcaaattttcctatacaagagggaaaacgataaaaagaaagcaataatagatcgctgtaatgaattgggagagcctattccatacgacgaaaggttaagcgacaaaaaccctgagtttaagtacatgtattag

SEQ ID NO: 76860 - DNA, 786 bp, Saccharomyces pastorianus
atgacgcaagaattcattgataaagtatcttcctacctgactcctgatgtggacattgcacctatttctcaaggtgcagaagccattgttttcacaacgactactcacccatatctcccaagagcaaaggattctcatcaaaagtatattatcaaatataggccaccaaagcgttatagacatccacaaatagaccaggcactaacaaaacatcgtacgttgaatgagtcgcgtttattggccaaattatacttgattccagggctatgtgtccctcaactgatagcgtgtgatccatacaatggattcatttggttagagttccttggagaagatcttcccggagggcacggttttagtaacctaaagaacttcctttggatgcatgaccaagatccatatagtgatcttgtagcaactacactacggaaagtggggcgccaaattgggttgttgcactggaatgactactgtcatggtgatttgacaagttctaacattgttctcgtgcgagatggtgcgagatggacgcctcatttgattgatttcggtctgggctcagtttcaaacctggtcgaagataaaggcgtcgatttatacgtcttagagagagctattttaagtacacattcgaagcatgcggaaaaatacaatgcttggatcatggaggggttcgaagaggtctatcgtgaacaaggtgcgaaaggtgccaagaaactgaaagaagttaccaaaagattcgaagaggtcaggttgcgtggtcgtaagagaagtatgctaggataa

SEQ ID NO: 76861 - DNA, 1275 bp, Saccharomyces pastorianus
atggcagccaactctggtctcgactcaaaagctgaatactatcggcttcaagagaatgaaattattagcgctgtatcaagtgaggatgcagatcaaaatgatgcgggctttcgattgagtaccatccatttgcatttgttccatggattgaaatttgccgctctattgttcacagtggtgcctgtatttataatcctcgacagtatgaagatcatttttcaacgcaaacgtaggttttgccttgaccatgtcaacagaagttttttaagacaaagttcttggatcctcgatgaacgcatctgtcaatacgtgctcaatcctttatttgtttgtttatatccttctacattttctagtccaacatatgtcaaatgcaacattcctatagaagatcagaaatctccagaaaacaatattttccaagaccatcaattaaacgcacccaaaatagttagcacaaagttttatcaatatgttatgccggaaggatttgaccccacgacagatccagttttagtattctatcatgggggtggttatgctcttaaattgacgcctacgtcgttttctttcttgaataatatgcgaaatgcctttcctaaaatggccattcttgtaccagattataccgttacagctaccgatgaccagtcgaaaaagtaccctctgcaaattttacaaaatgtggccatttttgattacgttgttaagactatggggtgcaaaaatgtagtgattatgggggattctgctggtggcaatgctgttttgaacattgttttatatttaagaaagtgtcacagggaaatatacccgaaaaaagtcatagccataagtccctgggccaatgccactttcttccacgagggagaaaaggaatatatgcaaggaacacaagaatgggatggtctatgtttgaagagtcattcgatgtttgggcgaatgtttgtaggaaacaacccaaacgtcgattttaccagcgacccttttgttaatattgaaaagaatttcgaaactaaaatgtggcaagatattctgaaaaagtgctctgtgatgattacttacggtagtgatgagttgttgagctttcaaaacaagatcttggcaaagaaaatgagtgacgctagcgagggatgtaaccactttaccgccaaaaatgtgctggtcgaacaccaaggttatcatacgggcccaatattaaactactctcgtaatatggatcgctggaccaacataccatctatcgctcgcattcttgagtttatgcaatcctga

SEQ ID NO: 76862 - DNA, 2256 bp, Saccharomyces pastorianus
atgtctttcctcatttcctttgataaatcgaagaaacatcctgcccatttgcagttagcgaacaatttgaagattgccctagcacttgaatatgcaagcaaaaatttaaagcctgaagttgacaatgataatgctgccatggaattgcgcaatacaaaggaacctttccttttgtttgatgctaacgctattctaagatatgtcatggatgattttgaaggtcaaacttccgacaagtatcaatttgcattggcatctttacaaaacctgttatatcataaagaattacctcaacaacatgtcgaggttttgacaaataaggccattgaaaattacttggtcgaattaaaagaaccattgactactacagatttgatcctgtttgctaacgtttatgctctaaattcttctttaattcattctaaattcccagaattgccatccaaagtgcataacgctgtagcattggctaaaaagcatgttccacgtgattcttcttctttcaaaaacatcggcgcagtgaaaatccaagctgacttaacagttaagccaaaggattcagaaattttgcctaagccaaacgaaagaaacatcttgatcacttcggcattaccttatgtcaacaacgttccacacttgggtaatatcatcggtagtgttctttcagcagacatttttgctcgttactgtaagggacgtaattataatgccttgtttatttgtggtactgatgaatatggtactgccacggaaactaaagctttggaggaaggtgtgacaccaagacaattatgtgacaaatatcacaaaatccacagtgacgtttacaagtggttccaaattggatttgattatttcggtagaactacgacggacaagcaaacggagattgctcaacatatttttacaaagctaaattcgaatggttatctagaagaacaatctatgaagcaattgtactgtccagttcataattcttatctggctgatcgttacgtggaaggtgaatgtccaaaatgtcactacgatgatgctcgtggggatcaatgtgacaaatgtggtgccctgttagatccatttgaattgatcaatccacgttgtaaattagatgatgcttctccagaaccaaaatattctgatcatattttcctatcgctggataaattagaaagccaaatttctgaatgggttgaaaaggcctctgaagaaggtaactggtcaaaaaattcaaaaacaattacgcaatcatggttgaaggatggtttgaagccacgttgtattacaagagatttagtttggggtacgccagtgcctttagaaaaatataaagacaaagtcttgtacgtttggtttgacgctacaatcggctacgtttccatcacttccaactacaccaaagaatggaaacaatggtggaataatccagagcatgtttcattgtatcaattcatgggtaaggacaatgttcctttccatacagttgttttccctggttctcaattgggtacggaagagaactggactatgttgcaccatttgaatactacagaatacttacaatatgagaacggtaaattttctaaaagtaggggtgttggtgtttttggtaataacgctcaagactctggaatttctccaagtgtttggagatactacctggcatctgttagaccagaatctagtgattctcatttctcatgggatgactttgttgctagaaacaacagtgaattgttggctaacttgggtaactttgttaacagattaattaagtttgttaatgccaaatataatggtgttgttccaaaattcgaccccaagaaggtttccaattatgatggtttagttaaagatatcaacgaaattttatcaaattacgtcaaggaaatggaacttggacatgaaagacgtggtctagaaattgccatgtcgttaagtgctcgtggtaaccagtttttgcaagaaaataagttggacaataccttgttttcacagtccccagaaaagtcagatgctgttgtcgcagttggtttgaatattatttacgctgttagctctattatcacaccatatatgccagaaataggtgagaaaataaacaagatgttaaatgcaccagctttaaaaattgatgatagattccatttggcaatcctagaaggacataatataaacaaggcagaatacttgttccaacgtattgatgaaaagaaaatcgatgaatggagagccaaatatggtggtcaacaagtgtaa

SEQ ID NO: 76863 - DNA, 411 bp, Saccharomyces pastorianus
atgacatatcttagaatagcgttagcatcaaacaaaaggaaaggttcctttgtattgcgcaattccatggcagcattatcattgtcaacttcaggctttaaatttttgcttgcatattcaagtgctagggcaatcttcaaattgttcgctaactgcaaatgggcaggatgtttcttcgatttatcaaaggaaatgaggaaagacatgcttgttgtaaatttccgcttttttttcaagttttattcctccacaaagatgcatatcaggaagcaaatcatcattaacattagacatcgaagaaaatttgtcatcgtctttttttttttttcgttttctctttcgataagttgcgtacagaaattttttctgcctccgaaatcattcgtgcctcgtgatattgagaagaagtga

SEQ ID NO: 76864 - DNA, 2106 bp, Saccharomyces pastorianus
atgcatgctacaaactggttcgacgattggaacccagaagctctttatagagacgatgtcactggctgcgatgactgttccgaaacttcgccaattccaaagtctggtattatatgtggaccgatattaagactcatcaacatggattttaaggaaaaaacctacgaggggtctattatggtggtagttagaggcgaggaaaactttccgaaaattacctatcagctaggaccctctttgccctctgaggatgaagacatcgaagttaacgaggcattcttcgaaggtaaactttttcataaggacattttaaaagatgataatatatggttttacaggtatgagattaagttgcccatgtccaactatgagcagatggtaaaatatgctgttgacggtactatggaaccacattataggttcttcgttccctctttcactcaaaattcgaacgttatctcctattcatgcaacggattttcactgagcgtagatacatcgaaattcaaaggttctctatggtatgatgtccttaaaaagcatcgatacgttcattatcatgccattctcggcggcggagatcaaatttactccgataatattaaactgcatgcgccaaatcttaaagcttggctggagacaaaggacccaattaagaagtataatactcagaccactgaagaaacaaaagagcagattaggcagttttatttagaacactatttaaactggtacggttacggtcactggtatggttctaccccaaaatccaagaccacccaaaaatgctttgtcaagtcactagcttgtattcctgccattaatgtctgggatgaccacgatattattgatggctatggatcgtacaacgattccttcatgaagactgaaaatttcctcacagtgggaagaatggcttaccgatactatatgcttttccagcagcatgtcagtgcttctaaacaagatggcgatgagtatgcttatctcaagagcaaacaatggattctaggtaatgaaaaagggagttcttatatcggtgaaaggtctcactcaatattctcttggttgggtccgaaaatggccatgttagggttggactgtagaactgagaggaaattacacgagattttctcagaaagaagttattccttaatttgggaacgtgtcgaaagggaaataaaaaatttaaaaggtggccacttattgctgatgctcggtatcccgattgcatatccaaggttagtatggttagaatggctttttacctcaaaactactggctccaattaaatatttatctaaaaaagggatatttgctagtggcttcgttaacgaatttaatggagatgtagaactgttggatgatttaaatgatcattggtgcgcgagacatcataaaaaagaaagaaactacttgataatgaaattgcaagacataggtgctaaatatggcgtcagaataaccatattatcaggcgatgtacatttggcatctgttgggagatttagggcaaaaattcatagacaccatctcatcatgtctgaggagaaggaaaaggaaaacaccagaattattgaagaaccaacgaaagacgtaaggctgatttttaatatcattgctagcgccatagtaaataccccaccgccagatgcaatggccacgctattgcaaaaaagatgtcgcttgcatcatttcgatttggaaacggatgaagatgccgtaccaatttttgccaaggaagtggatggagtacataaacgtaaagaatcatgtttcatgaacaagagaaactggtcagatattatacctatagaaaacctgttgaataatccccaattgagtaaagaattaggcgtaaaggttggtgatatagtcattcctggtatcatcacagaacagcaaaagctacagaaattggaaaacgatgaccaaattaactcttatccagtaacttctggtggcttgtttaccaccattcatgttgaaagagatgcaaatcaaacaaactcacaaactgtgagctactgtttacccattccagagttaacagttacctgcgaacggttgtctcacaagggtatcaaacatctgaatatcacatag

SEQ ID NO: 76865 - DNA, 597 bp, Saccharomyces pastorianus
atgtctaaagacacgcatgatgatgaactgccgagctacgaggacgtaatcaaggaagaggagagattgcaatctcaaccgccacgaccaccaagaccagcagctaacttggcgcaagggcaccaatcaagaccccaccaaaggccctctacaataccagcaatgtcctcatcccaaacatatgctcactcacactcttatacgcctacaagttcccaaccacggcctccaccgaggccacaacagaatcctagcttgccctggacataccctcccaggttttactgttccaagtgtggaaatacgggttacaagttaaagaatggacgatcttgcaagtcgtgttggaggaggtttgcacctcaaaataacgttgtttctgcaccgacatattacacaaactatacaatgcccgtgtacaccaacgcatggcagggtaataggcccttgtacgttcaaccaggggatcctcgcctgggtggcgtgctatgtggtgaatgcagagggtccggacgcaccagattcctgttggacgaagatatatgtcctctttgtcatggtgtaggcagaattatcacccagcctcaacgctattag

SEQ ID NO: 76866 - DNA, 327 bp, Saccharomyces pastorianus
atgcgtgtctttagacataacagtatggtttatactcgttttatgggtattttttgggactgcttagttcttgacttgaagcctctttattcccttgatggaagtgtcactattaaagatggaggcggaggctataccgtagaaaatgatatgtttgtatgttctgctctcttccctctattaaaagggggaaagagaaaaataaatggaaaaaagcgattaagccatagggaaaacactcttgtggtggcaaagcatcagataggcaggcaggaggaaatggcagtgaagtgtcaaaccaagcatactttcactggattgatttga

SEQ ID NO: 76867 - DNA, 4140 bp, Saccharomyces pastorianus
atggcacgaaatttaaggaatagacgcggtagcgacgttgaagatgcaagcaacgcaaaggttgggtatgaaacacagattaaagacgaaaatggcataatccatacaacaactcgctctttgagaaaaataaactacgcagaaattgagaaagtgtttgattttttggaagatgaccaggtcatggacaaagatgagacgcccgttgaggttactagtgatgaacatcataacaacaaccagaaaggcgatgatgaagacgatgatgttgatcttgtatcaccgcacgaaaacgccagaacgaacgaagagcttactaatgaaaggaacttgagaaaaagaaaagcgcatgatccagaagaagatgacgaaagttttcatgaggaagatgtcgacgatgatgaagaggaggaagaagcagacgaatttgaagatgagtatttggatgaagactcgaaggataacaaccgtcggcgcagagcggacgataggaaatttgtagtaccagaccctgatgacgatgaagaatacgatgaggatgacgaagaaggagacagaataagccattcggcttcttctaaacgtttgaaaagggcaaattctcgaagaacaagatcgtcacgtcacccagaaactccaccaccggtaagaagagctttaagaagtaggacaagacattcgcgtacttcaaatgaagaaaatgacgatgagaatgataataacaggaatgaagcgttaactttagctgatgaaattagagagttacaggaagatagtcctatcagggaaaaaagatttcttcgcgaaagaactaagccggtaaattacaaattaccaccaccactaactgctagcaacgcagaagaatttatagataagaataacaatgcactttcttttcataacccatcacctgcacggcgtggtcgcggtggttggaatgctagtcaaaattctggtcccacaagaaggctttttcccactggtggaccttttggtggcaatgacgtaactacaatatttggtaagaatactaatttttacaaccaagtcccatctgcattcagtgataataacaacaataaattaatactggattcagactcttccgatgatgagatattacctcttggcgtgacaccgaaaacaaagaaagagaacacgcaaaaaaagaagaagaaaaaaccagaaattgcagacctcgatccattaggcgtagacatgaatgtaaattttgacgatataggtggtttagacaactacattgaccaattaaaggaaatggtggccttaccactattatacccagaattgtatcaaaattttaatatcacgcccccaaggggtgttcttttccatggtcctcctggtacgggtaaaacacttatggcaagagcgttagcagcaagttgttcttctgatgaaaggaagatcacattttttatgcgtaaaggtgcagatattttatccaagtgggttggtgaagctgaaagacaactccgtttgttattcgaagaagctaaaaaacatcaaccttccatcattttttttgatgaaatcgacggattagcgcctgtgagaagttccaaacaagaacagatccatgctagtattgtttccacattattagcgctgatggatggtatggacaatagaggccaagtcattgtcatcggagccacaaatcgacccgatgcagtggatcccgcattaagaaggccgggaagatttgatagagaattttattttccattacctgatgttaaagcacgttttaaaattttgcaaattcagaccaggaaatggagttcaccgttgtcaaccaacttcattgataaattggcttttttgaccaaaggatatggtggtgctgatctgaggtccctatgcactgaggctgcactaataagtatacaaagaagctttcctcaaatttataggtcaaatgataaactcttggtggacccttctaagattaaagtcaaagttagcgatttcatgttagctttgaaaaaaattgttccgtcatctgcgagatctactggtagttctcctcagccactacctgaattaatcaaaccattactggcagatcaacttaataatttaaagaacaagctggattatatgctgaacattaaagacacaacttttcagagaaacacatcattgctacaaaatttcatcgattatgaagaatacagtggagaggaagaagagcatgacaaatatggaggaaatgaagatacatccagttttagatcatatgagtttttcgaatcgatggcggaatcacaaatttgtaaacctcggttattaataaatgggcccaagggaaatggtcaacaatatgtcggagccgcaattttaaattatttagaagaattcaacgtccaaaacctggaccttgcctctttggtttcggaaagttctaggactattgaagctgctgtagtgcaaagttttatggaagcaaagaaaagacagccctcagttgtatttattcctaatttagacatttggatcaacactattccagaaaacgttattttagtcttatcaggtttgttcagatctttacaaagcaatgaaaaaattcttctattatgcttagctgaaaatcttaatatatctgaagttaaaaatggtattttatctgattttgcttttgataaaaatatctttcaactgcataaaccatccaaagagaatataacgaggtatttttctaatttaattgaactactgaaaacaaagccaagtgatattcccatgaaaaagagaagagtcaaaccgttacctgaattacaaaaagtaacttcaaacgcagctccaacaaattttgatgaaaatggtgagccactgtctgaaaaagtggtattaagaaggaagttgaaatcttttcaacaccaagatatgagattgaaaaatgtgttaaaaatcaaactctcaggcttgatggatctttttaaaaacagatataaaaggtttagaaaaccacctattgatgatgccttcttggttcatcttttcgaaccagagacaaacaatgatcccaattggcaacctgcatatataaaagatgagaacatgattctggaggtttcaacagggcgaaaattttttaacatggatttggatattgtcgaagagagactttggaatggctattactcagaaccaaaacagtttttaaaagacattgaactgatatacagggatgcaaataccattggggacagagaacgtgtcattaaggcctctgagatgtttgccaacgcgcaaatgggtatcgaagaaatttcaaccccggattttattcaagagtgtaaagctactcgccaaagggatttggaaaggcaggaacttttcttagaagatgaagagaaaagagctgcaatggaattagaagccaaagaacagaatcaagaaaatatactgcaagaacctgatttagaggataacaaggctaatgagtttggtgtagctgctggtaatcaattgcaagctcagctgcaaacaactatcaatacagcctctatcgttaataacagcgaggtccctcaaccaattgataccaacttgtataaaaaggagattcctgcggcaattccatctgcagtagataaagaaaaagcggtcatccctgaggatagcggtgcaaatgaagaatacacaacggaactgatacaggccacatggacgtcagagataaccaccgatgatgatgaaagggccagaaaagaaccaaaagagaatgaagactctttgcaaacgcaggttacggaagaaaacttcagcaaaatagacgctaatactaataatataaatcacgtaaaggaaactccatcggttaacaaaccaaattccctccacgaaacggtagaaaaaagggaacgaagtccgataccaaaagaggttgtggaaccggagcaagggaagaagagcgacaaggagcttattttgacgcccgaacaaataaaaaaagtatctgcatgcttaatcgaacactgtcagaattttacggtttctcaattagaagatgttcattcgtccgttgcaaaaataatatggaaaagtaaatcagcatgggataaaacaggaactgtcgatgaaataataaaacttttatctgaataa

SEQ ID NO: 76868 - DNA, 219 bp, Saccharomyces pastorianus
atgatgttcatcactagtaacctcaacgggcgtctcatctttgtccatgacctggtcatcttccaaaaaatcaaacactttctcaatttctgcgtagtttatttttctcaaagagcgagttgttgtatggattatgccattttcgtctttaatctgtgtttcatacccaacctttgcgttgcttgcatcttcaacgtcgctaccgcgtctattccttaa

SEQ ID NO: 76869 - DNA, 5904 bp, Saccharomyces pastorianus
atgtcaactgaatactctgctgattcatctaaatcatttatgattgcaatgcaatctatgattgatacttcacaaacctttaatctagatagatcgaaaatctgtttaccagattttgatgacgagctaaaaaaagtccaaaaggatgaacaaaatcaaagaactgaactaactgttctctcacaagatagaaatgattgggatgatatatttgaggagtttaaagacatttcatttgctcaactgcaatctataattgattcatacaaaacaaagaatgcagttgcagtatataaaaaaattggaaaactaatcaatgaagctgaaacgacactaagcaacaatgtattattagaaactgtactgcaaatggtttataaacatcaaaagcaagagttagagaaagaattgttggattttttaggaacagggaatatagaccttgtttctctgttacttcagcatagaagaatgatcgttgctacacctatagaaacgacgattctgctaataaaaaatgcggtcaattcaacgccagagttcctgacacagcaagatatcaggaatcaagttttgaaaagtgcagaggatgccaagaataggaaattaaatcccgccactaaaataatcaagtacccacacgtcttcagaaaatatgaagcaggatccactacagctatggcctttgccggtcaaaaattcactttgccagtagggactacaaggatgtcgtacaatacccatgaagaaattataattccggcagcagatcaggcatccaacaagaactatctctatacaaaactattgaaaataagtgatttggatcatttttgcaagacagtatttccctatgaaactttaaaccaaatacaatcccttgtttaccccgtagcttataaaacaaatgaaaatatgctaatttgtgcacctactggtgcaggtaaaacagacattgcattactgacaataattaatacaataaaacaattctccgtggtcaacggggaaaatgaaattgatattcaatatgatgattttaaagttatttatgttgcccctttgaaagcactcgctgctgaaatcgtcgacaagtttagtaagaaattggcgccttttaatatacaagtaagggagttaacaggcgatatgcaattgacaaaggcggaaattttagccactcaagtaatagtcacaacccctgagaaatgggacgttgtcacccgtaaagcaaacggcgacaacgatttggtttcaaaggtcaaattactaattattgatgaagttcatttactgcacgaagatagaggttcggttattgaaactttagttgcacgtaccttgagacaggtagaaagctctcaatcaatgattcgtattatcggtctatcagctacattacccaattttatggatgtagcagatttcttaggagtaaatagacagatcggaatgttctattttgatcaatcattccgtccaaagcctctagagcagcaacttttgggctgtagaggtaaggcaggtagtagacaaagtaaagagaatatcgataaagtcgcttacgacaaattgagtgaaatgattcaaagagggtaccaggtaatggtatttgtccactcaagaaaggaaactgttaaaagtgcaagaaactttatcaaactagcagaatctaaccacgaagttgacctttttgcacctgaccctatcgaaaaggataaatattctagaagtttagtgaagaacagagacaaggatatgaaggagatttttcaatttggttttggtatccatcatgctggtatggcccgttcagatagaaatcttactgaaaaaatgtttaaagacggtgctatcaaggtactgtgttgtactgcaacattagcatggggtgttaatttacctgctgattgtgttatcatcaagggtacacaagtatatgattctaaaaagggtggattcatagatctaggtatttcagatgttattcagatttttggcaggggtggtaggccgggcttcggttccgcaaatggtacaggtattttatgtacttccaatgatcgtctggatcattatgtttccttaattactcaacaacaccctatcgaatctagattcggttccaagttggttgataacctgaacgccgaaatttcattggggagcgtgacaaatgtagatgaagcaatcgaatggcttggttacacatacatgtttgttcgtatgagaaaaaatccttttacttacggtattgattgggaggaaattgcaaatgacccgcaattatatgaacggaggagaaaaatgatcgtagtagctgcaaggcgattacatgctctccaaatgattgtgttcgatgaagtgtcaatgcatttcattgcaaaggatttgggcagggtgtcctctgatttttatcttttgaacgaatccgtcgagatattcaatcaaatgtgtgatcccagagccaccgaagctgatgtattgtccatgatcagtatgagcagtgaatttgacggtataaaatttagagaagaagaatccaaggagttgaagagactttctgatgaatctgttgagtgccagattggaagccaacttgacacccctcaaggtaaagcaaacgtgctattacaggcttatatttcccagactagaatttttgactcagcactatcatccgattcgaattatgttgctcagaactctgttagaatttgtagagcattgtttttaataggtgtcaatagaagatggggtaaattttcaaacgtcatgctaaatatttgcaaatctattgaaaagaggctctgggcctttgatcaccctctctgccagtttgatttgcctgaaaatattatcagacgcatcagagatactaaaccttccatggagcatcttttagaattagaggcagatgagctcggagagctggtgcataataagaaggccgggtctaggttatataaaatattgagccgatttccaaagattaatatagaagctgagattttccccattacaacaaatgtaatgaggatacatattgcattagatccagactttgtatgggattcccggatacatggtgatgcacagtttttttgggttttcgttgaagaatctgataagtcgcaaatccttcattttgaaaagttcatcttaaacagaaggcagttgaataatcagcatgaaatggacttcatgatcccattgtcagaccctttgcctccgcaggttgtcgtaaaggttgtgtcggatacttggattggctgtgaatcgacccatgccatctcttttcaacatttaatcagaccatttaacgaaactttacagacaaaattgttgaagttacgtcctctatctacatcagccctccagaatcctttaattgagtcaatttatcctttcaagtatttcaatcccatgcaaactatgacattttatacactttacaataccaatgagaatgcgtttgttggctcgcctacaggttctggtaaaacgattgtggctgaattggctatatggcatgccttcaaaacatttcctgggaaaaagattgtttatatcgcaccaatgaaagcattagtacgtgaaagggttgatgactggagaaagaaaataacaccagtgaccggagataaagttgtagagttaaccggtgattctttgccagatcctaaagatgtgcatgatgccaccattgttattacaactccagaaaagtttgatggtatttcccgtaattggcaaactcgtaagtttgttcaagatgtatctttaattatcatggatgaaattcatttgttggctagtgatcgtggtcctatcttagaaatgattgttagtcgtatgaattatatttcctctcaaaccaagcaaccggtcagactgctaggtatgtcaactgctgtttcaaacgcctacgacatggctggctggttgggagttaaggaccacggactgtataacttcccgtcaagcgtccgtccggttccattgaaaatgtacattgatggatttccagataatttggcattctgtcctctgatgaaaacaatgaacaaacctgtgtttatggccattaaacaacattcacctgataaaccagcattaatatttgttgcatcgcgtagacaaactagactaacggctttagacttgatccacttatgtggaatggaagataatccacgtaggtttttgaatatagacgatgaggaggaactgcaatattacttatcacaggtcactgacgacactttaaagttatcactccagttcggtattggattgcatcatgcaggtctagtgcaaaaagatcgttctatttctcatcagttgtttcaaaaaaacaaaattcagattctgatcgctacatcaaccctagcgtggggtgtcaatttgccagctcacttggttatcatcaaaggtacacaattttttgatgcaaaaattgaaggatatagagatatggatttaacagatatcttgcaaatgatggggagagctggtagaccggcttatgacactacaggtactgctatcgtttatacaaaagagtccaaaaaaatgttttataaacatttcctaaacgttggttttcctgtcgagtcctccttgcacaaggtattagatgatcatttaggtgcagaaataacgtcaggtagcataactaataagcaagaagcgttagattttttgagttggacatttttgtttcgtagagcgcatcataacccgacatattatggcattgaagatgatacaagtacagcaggagtcagtgaacatttgagttctttgatagatagcacattagaaaatctgcgagaatcacaatgtgttttattacatggagatgatattgttgctacgccattcttaagtatatcctcatactactatatttcacatttaacgatacgccaattattgaaacagatacatgatcatgcgacttttcaagaggtattacgatggttatcgttggctgttgagtataatgaattgcctgtaagaggtggtgaaattatcatgaatgaagaaatgtcgcagcaatcgaggtactccgttgaaagcacttttaccgatgaattcgaattaccgatgtgggatccacatgtaaaaacatttttattacttcaagctcatttaagccgtgtagatttaccgattgcagattatatccaggataccgtatcagttttggatcaatctctacgtattctacaggcttatattgatgtcgccagtgaattgggttactttcatacggtattgaccatgataaagatgatgcaatgcataaagcaagggtattggtatgaagacgatcctgttagtgtacttccaggattacaactgagaagaatcaaagattacacttttagcgagcaggggttcattgaaatgacgccgcagcaaaagaagaaaaagctgttaaccttggaggaaataggaaggtttggatataagaaattattaaatgtttttgatcaactaacttttggaatgacagaaagcgaagatacgaaaaaacgtttcgtcagtgtctgccaaagattaccggttttagaaggcatgaaatttgaagaacaggaaaataacgaggtgttaacattttatagcaagcacctttctagtaagcataataatgggtttgaagtatattgtgataaattccctaagatacaaaaagaactatggtttttaattggacacaaaggcgatgaactgctgatgattaaaaggtgtcaaccaaaacaaatgaataaagaggtcataatacattgtgatctatttattcccgaagaaattcgtggcgaagaattgcaattttcccttattaatgacgctttaggattacgttatgatatggtccataaactaatctcttag

SEQ ID NO: 76870 - DNA, 525 bp, Saccharomyces pastorianus
atgcaacatttcgaaagttcagataagatagaaaaggatgatgatacatcaagaattaaattacgctcttcttctttggccgctccaatcctcgaggctgttcaagaagcccagccttttgaagaagccactttctctaacttacagaagatacatccgttaacagaaaactcaacttgcaatggttatgttatttacgataaagatggaaatttgaaatccatgaaggatacatttggtaggaatataaaaacacctgatatttcaaatcctacaagagcaagaaatgaaaggccattggatgcaatacgtggatttgaatactccataacaaaagatccccgctggttgcaagagctagaaacatctaagttgggatttaaacctagacctggatttgccgtcattaatcaagactcacaggcttcaataaatttatctcaactggaagaaaaagttatggaaagccaaaaaaaaaaggagaaaagacacatatcacggctttctcggttactctgcagatga

SEQ ID NO: 76871 - DNA, 3201 bp, Saccharomyces pastorianus
atggtaaagcagcagggatccggcaagaccaacttggccaacgaagatgaagcatatgaagctatttttggcggagagtttggctctttagaaatcgggtcatacattggcggggatgaaggtgccaattcaaaggactatacggagcatttgccggatgctgtagattttgaagatgaagatgaacttgctgatgacgatgacgatttgccagaagaatctgatgctaatttgcatccagctatgatgactatgggcgcgtatgatgatgtaaacgagaacggtgccgtactcggtatcgactcaaatagtttgaatatgcaactgcctgaaattaatggtgatttgtctcaacagtttattttggaggatgatgggggtactcccgcaactagcaatgctttgtttatgggaatggatgcaaatgaaattcatctcgccactgaaactggagttcttgatggtagtggcgcaaatgaaattgggcattctcaactttccattggtggcgttactggaaatgatatgtcgataaatggtggatttatcatggaaccagatatgtcagatggcaagcataagaaagccaccaaattagacttgataaaccatgagaagtatcttctaaaaaaatactttcctgattttgaaaagggtaaaattttaaaatggaacaagctgatttatagaagatctgttccttatcattggcacagtgaaatatctagggtaaagaaaccgtttatgcctttaaatttgaaattcaaggttcaacaggatgataagaggctattcaactcaaggacaatatcttacgtcgctccgatttatcaagggaaaaacaatttacttcaaagtaactcttctgcatcccgaagaggtttaattcatgtttccattgatgaacttttccctatcaaagagcaacaaaaaaaaagaaagattattcatgatgaaaagaccatatcggaagacttgcttattgccactgatgattgggaccaagaaaaaatcatcaaccaaggtacttcatcaacagcaaccttggcggattcgtctatgacacccaacttaaagttctccggcagttataaattgaagagcttgattgaggatgttgctgaagattggcagtgggatgaagacatgatcattgatgcaaaattgaaagagtctaaacatgctgaattaaatatgaatgacgaaaaactgttgctgatggttgagaaaacaaataatttagcgcagcaaaagcaacaactggatagtagtaacttgatattgcccctcaacgaaactattttgcaaaaaaaattcaatttatctaatgatgataaatatcaaatcttgaaaaaaacccatcaaacaaaagttcgttctaccatctcgaacttaaatattcagcattctcaacctgcgattaatttacaatctccattttacaaagtggctgttcctagataccagttgaggcatttccaccgtgaaaactttggttcgcacatcagaccaggtactaaaattgtcttcagtaagttaaaagcgcgtaaaaggaaaagagataaaggtaaagatgtcaaagaatcattttctacatcccaagatctaaccatcggggatactgctcctgtttatttaatggaatattctgaacaaacaccggtagctttgtctaaatttggtatggccaataaattaattaattattatcggaaagccaatgaacaagatactctaaggcccaaattgcctgttggcgaaactcacgttttgggagttcaagacaaatcaccattttggaactttggatttgttgaacctggtcatatcgtccccacattatacaataacatgattagagcacccgttttcaaacatgatatatcaggaacagattttcttctgacaaaaagttccggatttggtataagcaatcgattttacttacgtaatattaaccatctttttacggttggacaaacttttcctgtcgaggagattcccggacctaattcaagaaaggtgacatcaatgaaagctacaagactgaaaatgattatttatagaattctaaaccataatcacagcaaggcaatttctattgatcccattgcaaagcactttcccgaccaagattatggacaaaacagacaaaaagtgaaggagttcatgaaatatcaaagagatggtcctgaaaaaggtctgtggaggcttaaagatgatgaaaaattgttagacaatgaagcagtgaaaagtttaattacgccagagcagatcagccaagttgaatcaatgagtcagggcttacaattccaagaagataatgaagcatataattttgattctaagctaaaatctctagaagaaaacttgttaccatggaacattacaaaaaattttattaattcaacacaaatgcgagctatgatacaaatacatggtgttggtgacccaacgggctgtggtgaaggtttttctttcttgaaaacttcaatgaaaggtggttttgttaagtctggttctccttccagtaataacaatagttcaaacaaaaaaggcactaacacgcatagctacaatgtggctcaacagcaaaaagcttacgacgaagaaattgcgaagacctggtatacacatacaaaatcgttgagcataagcaatccttttgaggaaatgaccaatcctgatgagattaatcagaccaacaagcatgttaagacggatagagatgataagaaaattctgaagattgttagaaagaaaagagatgaaaatggtataattcaaaggcagacaattttcataagagatcctagggtcattcaaggatatataaaaatcaaagaacaggataaagaagatgttaacaaattgttagaggaggacacttcaaagataaataacttggaagaacttgagaaacagaaaaaactgttgcaactagaattagctaatttggaaaaatcacagcaacgtagagcagcaaggcaaaattcgaagagaaatggtggtgccacgagaacagaaaactctgtggataatggtagcgaccttgccggtgtaactgacgggaaagcagccaggaataaaggtaagaacactacaaggagatgtgctacatgcggacaaatcgggcacattagaacaaataaatcttgtccaatgtatagcagtaaagataaccctgcttcaccaaagtag

SEQ ID NO: 76872 - DNA, 918 bp, Saccharomyces pastorianus
atggttgaggaaaattccagagttttgattgttcttccttatacaccgcctagtgctactttgcagaggattatagggcaaactattccgttcttaagagaatgtcaaagtcaactagacatcgtgattgtacctgaattcaaaacctcattccagttggattctgcgctagggaagatgtacagtattaccagggatgtccttttgggctatggaatgatcaacagcggaatcgacatcatattcaacaatactcatttcgtcgagagtaatttgcaatggaaagtggttttattgccacaggaatccacttttgaaacttggaagctagagttgggacaaggacaataccatagtatagaacattatgcattacacgataatataatggaagagatagaaggtcccaaagatgctaacaaatttcatgtcaccgcattgggcggaacgttcgaccacattcacgatggacataaaatattgttgagcgtctctacattcatcacgtcacaaaggttaatttgtggaattacgtgcgatgagctcttgcaaaacaagaaatacaaagagttgattgaaccttatgatacacgatgcaggcacgtacatcaattcatcaagttgttaaaaccggatctctccgtagaactagttcccttaagggacgtgtgcggccccacagggaaagtacccgagatagaatgtttagttgtgagtagagaaaccgtcagtggggcagagactgtgaataagactaggattgaaaaaggcatgagcccattggtagtacatgtggttaatgtacttggaggaagggaggaagacggctggagcgagaagttaagcagcacggaaatcagacgcctacttaagtcctctgcttcgccaacgtgtactccacaaaacccttgcgtataa

SEQ ID NO: 76873 - DNA, 1161 bp, Saccharomyces pastorianus
atgcgtctctctaacttaattgcttctgcctctcttttatctgctgctactcttgctgctcccgctaaccacgaacacaaggacaagcgtgctgtggtcactaccactgttcaaaaacaaaccactatcattgttaatggtgccgcttcaactccagttgctgctttggaagaaaatgctgttgtcaactccgctccagctgccgctaccagtacaacatcatctgctgcttctgtagctaccgctgctgcttcctcttctgagaacaactcacaagtttctgctgccgcatctccagcctccagctctgctgctacatctactcaatcttcctcttcctcccaagcttcttcctctagttcttccggcgaagacgtcagcagctttgcctctggtgtcagaggtatcacttataccccatacgagtccagcggtgcttgtaaatccgcttcggaagttgcttccgatttagctcaattgactgacttcccagtcattagattgtacggtaccgactgtaaccaagttgaaaatgttttcaaggctaaggcttcgaaccaaaaagtctttttaggtatttactacgttgaccaaatccaagacggtgtcgacaccatcaagtctgctgttgaatcttacggttcttgggacgatgtcaccactgtttccattggtaacgaattggttaacggtaaccaagctaccccatcccaagtcggtcaatacattgactctggtagatctgccttgaaggctgccgattacactggtccagttgtttctgttgatacttttattgctgtgatcaacaaccctgaattgtgtgactactccgactacatggctgttaatgcccatgcttactttgacaagaacacagttgcccaagactccggtaaatggttactagaacaaatccaaagagtctggactgcttgtgatggtaagaagaatgttgttatcactgaatctggttggccatcaaagggtgagacttacggtgttgctgttccatctaaggaaaatcaaaaggacgctgtttccgccattaccagctcctgtggtgctgataccttcttattcactgccttcaacgactactggaaggccgacggtgcttacggtgttgaaaaatactggggtgttctatccaatgaataa

SEQ ID NO: 76874 - DNA, 816 bp, Saccharomyces pastorianus
atgggtttggcagctacaagaaccaaacagcggtttggtttagaccccagaaatacggcatggagtaacgacacctcgagattcgggcaccaatttctagaaaagtttggatggaaacccggtatgggtctggggttatcccccatgaattcgaacacttcgcatatcaaagtgtcaattaaggacgacaacgttgggctcggtgctaaattaaaacgtaaagacaaaaaagacgagtttgataatggtgaatgcgcagggttggatgtcttccagcgaattcttggtaggctgaacggaaaggaaagcaaaatatcagaggaattggacacgcagagaaagcaaaagattattgacggaaaatggggtatccattttgtcaagggtgaagttttagcaagcacgtgggatccaaagactcacaagttaagaaattactccaacgcgaagaaacgaaagagggaaggagacgatagcgaagatgaagatgatgacgacaaagaggataaagaaagtgataaaaagaagcacaagaagcacaaaaagcataagaaagacaagaaaaaagacaagaaggacaaaaaggagcataagaaacataaaaaggaagagaagagattgaagaaggaaaaaagggcggaaaagaccaaagaaacgaaaaagacgtcaaaattaaaatctagtgaatctgcatccaatatccccgatgcggtaaacacaagactatcggtgcgctccaaatggataaaacaaaagagggccgcgttgatggactccaaggcactgaatgagatctttatgataacaaacgactaa

SEQ ID NO: 76875 - DNA, 4434 bp, Saccharomyces pastorianus
atgacgattaccgtgggggatgcagtttcggagacggagctggaaaacaaaagtcaaaacgtggtactatctcccaaggcatccgcttcttcagacataagcacagatgttgataaagacacatcgtcttcttgggatgacaaatctttgctgcctacaggtgaatatattgtggacagaaataagccccaaacctacttgaatagcgatgatatcgaaaaagtgacagaatctgatattttccctcagaaacgtctgttttcattcttgcactctaagaaaattccagaagtaccacaaaccgatgacgagaggaagatatatcctctgttccatacaaatattatctctaacatgtttttttggtgggttctacccatcctgcgagttggttataagagaacgatacagccgaacgatctcttcaaaatggatccgaggatgtctatagagaccctttatgacgactttgaaaaaaacatgatttactattttgagaagacgaggaaaaaataccgtaaaagacatccagaagcgacagaagaagaggttatggaaaatgccaaactacctaaacatacagttctgagagctttattattcacttttaagaaacagtacttcatgtcgatagtgtttgcaattctcgctaattgtacatccggttttaaccccatgattaccaagaggctaattgagtttgtcgaagaaaaggctatttttcatagcatgcatgttaacaaaggtattggttacgctattggtgcatgtttgatgatgttcgttaacgggttgacgttcaatcatttctttcatacatcccaactgactggtgtgcaagctaagtctattcttactaaagctgccatgaagaaaatgtttaatgcatctaattatgcgagacattgttttcctaacggtaaagtgacttcttttgtaacaacagatctcgctagaattgaatttgccttatcttttcagccgtttttggctgggttccctgcaattttggctatttgcattgttttattgatcgttaaccttggacccattgccttagttgggattggtatatttttcggtgggtttttcatatccttatttgcatttaagttaattctgggctttagaattgctgcgaacatcttcactgatgctagagttaccatgatgagagaagtgctgaataatataaaaatgattaaatattatacgtgggaggatgcgtatgaaaaaaatattcaagatattaggaccaaggagatttctaaagttagaaaaatgcaactatcaagaaatttcttgattgctatggccatgtctttgcctagtattgcttcattggtcactttccttgcaatgtacaaagttaataaaggaggcaggcaacctggtaatatttttgcctctttatctttatttcaggtcttgagtttacaaatgtttttcttacctattgctattggtactggaattgacatgatcattggattgggccgtttgcaaagcttattggaggctccagaagatgatccaaatcagatgattgaaatgaagccttctcctggctttgatccaaaattggctctaaaaatgacacattgctcatttgagtgggaagattatgaattaaacgacgctattgaagaagctaaaggagaagctaaagatgaaggtaaaaagaacaaaaaaaagcgtaaggatacatggggtaagccatctgcaagtactaataaggcgaaaagattggacaatatgttgaaagacagagacggcccggaagatttagaaaaaacttcgtttaggggtttcaaggacttgaacttcgatattaaaaagggcgaatttattatgattacgggacctattggtactggtaaatcttcattattgaatgcgatggcaggatcaatgagaaaaactgatggtaaggttgaagtcaacggggacttattaatgtgtggttatccatggattcaaaatgcatctgtaagagataacatcatattcggttcaccattcaataaagaaaagtatgatgaagtagttcgtgtttgctctttgaaagctgatctggacattttaccggcaggcgatatgaccgaaattggggaacgtggtattactttatctggtggtcaaaaggcacgtatcaatttagccaggtctgtttataaaaagaaggatatttatctattcgacgatgtcctaagtgctgtcgattctcgtgttggtaaacacatcatggatgaatgtctaaccggaatgcttgctaataaaaccagaattttagcaacgcatcagttgtcactgattgagagagcttctagagtcatcgttttaggtactgatggccaagtcgatattggtactgttgatgagctaaaagctcgtaatcaaactttgataaatcttttacaattctcttctcaaaattcggagaaagaggatgaagaacaggaagcggttgttgccggtgaattgggacaactaaaatatgaatcagaggtaaaggaattgactgaactgaagaaaaaggctacagaaatgtcacaaactgcaaatagtggtaaaattgtagcggatggtcatactagtagtaaagaagaaagagcagtcaatagtatcagtctgaaaatataccgtgaatacattaaagctgcagtaggtaagtggggttttatcgcactaccgttgtatgcaattttagtcgttggaaccacattctgctcacttttttcttccgtttggttatcttactggactgagaataaattcaaaaacagaccacccagtttttatatgggtctttactccttctttgtgtttgctgctttcatattcatgaatggccagttcaccatactttgcgcgatgggtattatggcatcgaaatggttaaatttgagggctgtgaaaagaattttacacactccaatgtcatacatagataccacacctttgggacgtattctgaacagattcacaaaagatacagatagcttagataatgagttaaccgaaagtttacggttgatgacatctcaatttgctaatattgtaggtgtttgcgtcatgtgtattgtttacttgccgtggtttgctatcgcaattccgtttcttttggtcatctttgttctgattgctgatcattatcagagttctggtagagaaattaaaagacttgaagctgtgcaacggtcttttgtttacaataatttaaatgaagttttgggtgggatggatacaatcaaagcataccgaagtcaggaacgatttttggcgaaatcagattttttgatcaacaagatgaatgaggcgggataccttgtagttgtcctgcaaagatgggtaggtattttccttgatatggttgctatcacatttgcactaattattacgttattgtgtgttacgagagcctttcctatttccgcggcttcagttggtgttttgttgacttatgtattacaattgcctggtctattaaataccattttaagggcaatgactcaaacagagaatgacatgaatagtgccgaaagattggtaacatatgcaactgaactaccactagaggcatcctatagaaagcccgaaatgacacctccagagtcatggccctcaatgggcgaaataatttttgaaaatgttgattttgcctatagacctggtttacctatagttttaaaaaatcttaacttgaatatcaagagtggggaaaaaattggtatttgtggtcgtacaggtgctggtaagtccactattatgagtgccctttacaggttgaatgaattgaccgcaggtaaaattttaattgacaatgttgatataagtcagctgggacttttcgatttaagaagaaaattagccatcattccacaagatccagtattatttaggggtacgattcgcaagaacttagatccatttaatgagcgtacagatgacgaattatgggatgcattggtgagaggtggtgctatcgccaaggatgacttgccggaagtgaaattgcaaaaacctgatgaaaatggtactcatggtaaaatgcataagttccatttagatcaagcagtggaagaagagggctccaatttctccttaggtgagagacaactattagcattaacaagggcattggtccgccaatcaaaaatattgattttggatgaggctacatcctcagtggactacgaaacggatggcaaaatccaaacacgtattgttgaggaatttggagattgtacaattttgtgtattgctcacagactgaagaccattgtaaattatgatcgtattcttgttttagagaagggtgaagtcgcagaattcgatacaccatggacgttgtttagtcaagaagatagtattttcagaagcatgtgttctagatctggtattgtggaaaatgatttcgagaacagaagttaa

SEQ ID NO: 76876 - DNA, 942 bp, Saccharomyces pastorianus
atgcgtttctctactacactcgctactgcagctactgcgctatttttcacagcctcccaagtttcagctattggtgaactagcctttaacttgggtgtcaagaacaacgatggtacttgtaagtccacttccgactatgaaaccgaattacaagctttgaagagctacacttccaccgtcaaagtttacgctgcctcagattgtaacactttgcaaaacttaggtcctgctgctgaagctgagggatttactatctttgtcggtgtttggccaacagacgacagtcattacgctgctgaaaaggctgccttgcaaacctatttgccaaaaattaaagaatccactgttgctggtttcttggttggctctgaagccttataccgtaacgatttgactgcctctcaattatcagacaaaattaatgacgtccgtagtgtcgttgctgacatttccgattctgacggaaagtcatactctggtaagcaagtcggtactgtcgattcctggaatgttttggttgctggttacaattctgccgttatcgaagcttccgattttgttatggctaacgcgttctcctactggcaaggtcaaaccatgcaaaatgcctcttactcattctttgatgatattatgcaagctctacaggttatccaatctactaaaggttctaccgatattaccttctgggttggtgagaccggttggccaactgatggtaccaactttgaaagttcttacccatctgttgacaacgccaaacaattctggaaagaaggtatctgttccatgagagcttggggtgttaacgttattgtttttgaagcctttgatgaagattggaagccaaacacctccggtacctctgatgtcgagaagcactggggtgttttcacttcaagtgacaatttgaaatactccttggactgtgacttttcatga

SEQ ID NO: 76877 - DNA, 1026 bp, Saccharomyces pastorianus
atggcagtaaaacataaatccgagagccttaagcacgaagagggggctgccaaaaaggcaaagccaggcctattgaagctaaaaaaaatcatggatatagaatctaatgtggtcaaatattccatatgcataccgacaactgttatcgacaattgtaataatttggagcaagttacatttactgcatatcaaatagctcggacagctgtattgttcaatgttcaagaaatcatagttctagaccagtcaaaagataaaaagcatgaaaaaaaatcaagatcaaaggagactatctctgattgtttattacttgctacactattacaatattttgtaacgcctccaaacttactggatactacattcaaaaaaaaaaacaagttatatttaaagtgtgcatctacctttccgccattgaagcagctaccttttatgaacgcatctgccgaacaacactacaaggaaggcttatcaatcgcacgagatagctcaaaaggtaaatctgatgatgctctaacaaatttggtgtatataggaaagaatcaaattattacgttatctaaccaaaatattcccaatactgcgcgtgtaacagttgatacagagcgcaaagaagtagtgtcacccatagattcttacaaaggaaaaccactcggctatcatgttcgaatggcaagtactttgaatgaggtgtccgaaggctacacaaagatcgtttgggtcaacagtggtgacttccactacgacgaagagttgtcaaagtaccacaaggtagaaacaaagctaccatacatcgcaaaactgaaaaaaagttcaacatcagaaaaaccctgtaatatcctgcttatctttgggaaatggggccatttaaaacgttgtttcaggagatctgacttagaatcctcttctttacatcattacttttctggtcaactgcaattccctgcttccataccccagggaaatatacccattcaagatagcctacccatagctcttaccatgtttcagcgttgggcaagttga

SEQ ID NO: 76878 - DNA, 933 bp, Saccharomyces pastorianus
atgtcttacagaggacctactggaaattttggcggtatgccaatgtcatcatcgcaaggaccatactctggcggtgcacaattcagatcaaaccagaaccaatccacttctggcatcttaaagcaatggaagcattcttttgaaaagtttgcctccagaattgaggggctcactgacaatgcagttgtttataaattgaagccttacattccaagtttgtcaagatttttcattgtggccaccttttatgaagattcgtttaggatcttatcacaatggtcagatcaaattttttatctgaataagtggaagcattacccatacttctttgtcgttgtgtttctagtggttgttaccgtttccatgttgattggcgccagtttgttagttttaagaaagcaaaccaattatgccaccggtgtgttatgtgcttgcgttatttctcaagcattagtttatgggttgtttacgggttcatcatttgtcctaagaaactttagtgttattggtgggttgttaattgcattcagcgattcaattgttcaaaacaagacaacattcggtatgcttcctgaattaaacagcaagaacgacaaagcgaagggttacctgttgtttgctggtagaattttaattgttttaatgtttatcgctttcactttcagtaaatcatggtttactgttgttttgaccattatcggcacaatatgtttcgccattggttacaagacaaaattcgcatccattatgttgggtttgatactaactttttacaatatcacgctaaacaactactggttttataacaatactaagagagatttcttgaagtatgagttttaccagaacttaagcatcattggtgggcttctattagttactaatactggcgctggtgaattatccgttgatgaaaagaagaagatttactag

SEQ ID NO: 76879 - DNA, 1302 bp, Saccharomyces pastorianus
atgttttctttacctaccctaacctcagacatcactgttgaagtcaacagttccgctaccaaaaccccattcgtccgtcgtccggtagaaccggttggtaagttctttttgcaacatgctcaaagaactttgagaaaccacacctggtctgaatttgaaagaattgaagctgaaaagaacgtcaaaaccgttgatgaatccaatgtcgacccagacgagttgttattcgacactgaattggccgatgaagatttactgactcatgatgctagagactggaaaaccgccgatttgtatgctgctatgggtttgtctaagttgcgtttcagagctactgaaagtcaaatcatcaaggctcacagaaaacaagttgtcaagtaccatccagacaagcaatctgctgctggtggtagtttggaccaagatggctttttcaagattattcaaaaggcctttgaaactttgactgattccaacaagagagctcagtacgactcatgtgattttgttgccgatgttcctcctccaaagaagggtaccgattatgacttttacgaagcttggggtcccgttttcgaagctgaagctcgtttttctaagaagactcctattccttctctaggtaacaaagattcttccaagaaggaagttgaacaattctatgctttctggcacagatttgactcctggagaacctttgagttcttggacgaagatgtcccagatgactcttctaacagagaccacaagcgttacattgaaagaaagaacaaggccgcaagagacaagaagaagactgctgataacgctagattggtcaaacttgttgaaagagctgtcagtgaagatccccgtattaaaatgttcaaagaagaagagaagaaggaaaaggaaagaagaaaatgggaaagagaagccggtgccagagctgaagctgaagctaaggccaaggccgaagctgaagccaaggctaaagctgaatctgaagccaaggctaacgcctccgcaaaagctgacaaaaagaaggctaaggaagctgctaaggccgccaagaaaaagaacaagagagccatccgtaactctgctaaggaagctgactactttggtgatgctgacaaggccgccacgattgacgaacaagttggtttgatcgttgacagtttgaatgacgaagagttagtgtccaccgccgataagatcaaggccaatgctgctggtgccaaggaagttttgaaggaatctgcaaagactattgtcgattctggcaaactaccatccagcttgttgtcctacttcgtgtga

SEQ ID NO: 76880 - DNA, 348 bp, Saccharomyces pastorianus
atggagatgaccttgtttctgaacgaatcatacatctttcatagacttcgtatgtggagtactgttttctggggcctttgtctattcgtatgcgcagaatgtgacagtgccaataataggggtgccagggtgccttataaaacccttttccgtgcctttgaagtttccgttttcggtcaaaaagaatatccgaattttagatttggaccctcgtacagaagcttatgtttaagcccatattcaatttgctgtaaacggcctccaatggaagaggtaatgctatattatccctctcctgatagtttaattaaaaatagaaaacgtgtattgggagtcgcttatttgtag

SEQ ID NO: 76881 - DNA, 708 bp, Saccharomyces pastorianus
atgagttcagaattattaatatctgattctaaaccaagaccagaaggattaagaaaattatgcgaaggtgagacagtgatccttccaagggacataacccccagcaaatgcgcttatttcttaaaacagaatatcgtattcatttcatatattttcatccatattattattaccataatcttaaaccgcctggcattatctgcacacggtaatactttgattgttatcttagcggctttactaattacaatttcactattccttttactcctcttaccttacttaaactgctcaagatataagttaagatgtttagatgatgattgtaagttcaaattattagcggaagtcattacacataaacctaacgtggacttgagcacatgggaccgtattgcatatgacatgaaccaatttgtatatgaccgtcgtatatgtgcagatagatcttttttctacgatggcagttcttgctatcaggtttttaaaaagttggtggctaccccgtatcttgtgaattccaatatgaatagtatagatgctgatctggagatgagaagtaatgcagcaaccaacattaatgattctggtaatagttcattacacatcgaattgggcacttatatttttaaagcattggccgttttcaggaactctgttgacaagtactgggaggataagtatccagagatgggggtcacagtttga

SEQ ID NO: 76882 - DNA, 1884 bp, Saccharomyces pastorianus
atggagtctgttcactctcgcgatcctgttaaagaggaaaagaaacatgttttcatgggaatggaacacgagttgaatcctgagactcataacgattccaactccgactcatatggtctccctcagttatctgaaaaatacaatgccttgagacagaacaggagcctaattatccagcagactgaaatcattggctctgcttacaataaatggtacttacaagcgattttacttttgagtgctttcatatgtggctacggttatggactggacggtaacatccgttatatttacactggttacgccacatcatcatataatgagcattctctgctgtctacaatcaacgtcattaatgctgtggtcagtgccgcttcgcaaatcatatacgctaggttatctgatgtgtttggtagactataccttttcattagtgctgtcatcctatatgttgtgggtacaattattcaatcacaagcttatgatgttcaaagatacgctgcaggtgccattttctacaatgctggctatgtgggtgtaatccttattcttttgattatcctatccgatttttcatctttaaagtggagactgctgtatcaatttgtcccgacttggccttttatcatcaacacatggattgctggtaatatcacttccagagccaatcctgttgtcaactggtcttgggatgtaggtatgtgggctttcatctttcccctatcatgtgttccaatcgttttgtgtatgttgcacatgcaatggagggccagaaagactcctgaatggcacgctttgaagggccagaagtcctattatcaagaacatggttttattaagatcttaaagcaattgttttggatgttagatgtcgttggtgtccttttgatgggttgttccctaggttgtatcttggtcccactgaccttggctggtggggtcaaaactacctggaatgattcaagattgatcggcccctttgttcttggctttgttttgatccctatcttatggatttgggaatatcgattcgctagagatccaattcttccatataagctggtcaaagatagggctgtatggtcttctatgggtatttctttcctgattgattttatttactatatggccgctgattatttgtacacggttatgattgttgctgtcaatgaatccgttaaatctgcaaccagaattgccacattatcttcatttgtctctactgtggcctctccatttttcgctttacttgtaacaagatgtacgagattgaaaccattcataatgtttggatgcgcgctatggatggtggctatgggtttattgtaccactttagaggtggaagtcagtcccattcaggtattattggtgcattatgtgtctggggtgtgggcactactttgttcacttacccagttaccgtctctgtacaatccgccgtctctcatgaaaacatggcgacagttacagctttaaactataccctctatagaattggttctgctgtcggttccgcagtttccggtgccatttggactcagactttgtacaaacaaattttgaagagaatgggtgatgttgctctagccacaactgcctacgaatctccatatactttcattgaaacctatacttggggtaccccacaaaggaatgctttaatgaacgcttacaaatacgttcaaagattggaaactatcgtggctttagtattttgtgttccattaattgcattctccttatgtctaagggatcctaaattgactgatactgttgctgtggaatacatcgaggatggtgaatatgtcgacacgaaagacaatgatccaattttggattggtttgaaaaacttccatcaaaattcacttctaaacgggaataa

SEQ ID NO: 76883 - DNA, 1758 bp, Saccharomyces pastorianus
atgatcacccaaactgagctagataactgcttacaatgggctcaaaataatggagccttcatcgatccgaaaatctcttttaggattacagaggatgctggtgttagtgcatttgtaaacgaaaaattctctcccaaacccgaccaagctttgattagggtacccgaaactctgctgatcacttcccagcaagctttatcagaattttcccaggctgctaatgaaaggagtcttttgaattccgtgacacagttgtacttgtcaaagttgaaatttggcaccgatgcagttcacctgaaatccttttacaaaccatatttagatgtgctacccttgcaccttccacaaccatatttttggtctactgatgaagtcatgaatttgcatggtacagacgtgtacttaactatgagagatacgttgaacaaactagtaaaggagtggaggatgctgttccaagctttatctatcgaacactcttctcaagataagcagttcttgtctttattccaggagaataaagactctgccgtagtgccgttggaacagttctgcgcacacatcaatggatgtaaactagaagattcggaatggaactcgttcgtggcgtatctttggtcgtactgcatctttaattctagggcatttcctcgtgtcattttaggcagggccggtacagaccgcaccaatctgaacgaaggatttttgtatccaatagtagatttattaaaccataaaaacgatgtatcagtaagatgggagatgaatgaacaaaatgaactttgtttcatgtcgcagactaccacatttagtgcacaggatgaattgtttaataattatggtaatatttctaatgaaaaatgtttgttaaactacgggttttgggattcctcgaataagtatgacttctctaggttgactttaaagctaccatccaccttagttagcggtttgcccgtggattttaacaaatcaggtaatttcgttactgacgatggagaaactaccattttacaatttagtttaaaaacttctgaaccattaccaccggttctactagcgttatttgcctacctaagtaaattaaagtctgaagaaactccaaccgtaaggagcgtattggaaggtattgatcaattaacatctgtagtatcccagagattgctgttttataagaattttaaaattaaaacttcttcgactcaaaaattacgccctcatgttattaaactaatcaaactatactatcaagataacaaaaaaattctgaacgccactactgagaaattgtccgttttacaaaaaaaaatatatagcaataacaaggagttttctctgtcattcaagacaatttttaaaaacgacaaaatatttgccaattctctcttactggtatttggtgctataaattacgaagatttgatcacaaaagactgtcttaatgacgcattgttgctctggatagtcaaattaatcaacgataaaagtaataatcagggaggtttcattaaacaaaccttcaaagaagttagtgattcaattgtcattgaaaaagaagatgttatggagtttttgccgttctataaaaaatacttccctaatttatcggagagaattccagaaatttatagtgtcggtgattggggcataagacagttcattgtggcagatactgcgattgatagattggtttggatcaggaaatcaaataaagagcccatatttctaatgaagaaggcatacgacttacagatttag

SEQ ID NO: 76884 - DNA, 1641 bp, Saccharomyces pastorianus
atggaaccgctgctttttaatagtgggaaagcaaatccctctcaagatgttttcatagatgtggaagttggtgatattaccacaaaatatggttccacaaatactggatcattcagttcgatggatactgtggaagcgcaggcgataaaggcagagacggcaagattcatggaagttccacagggaagacatttaggtgtgttctccacggttgtgttatttgtttcgaggataatggggtcaggtatatttgcagtacccagtgtgattttactgaatacaggtggtaataagctgatatattttgcgatctgggtttttagcgctgcgatcgcttttgcaggattgtatctttttctagaatttggttcctggataccgaaatcaggtggacgtaaaaacttcctcgaacggagttttgaaagacccagactattaattagtgtggtgttttcgtgttacagtgttttaactggctatgcattgacgggatctatcgtcttcggtaaatatgtgttgagcgcatttggagtcacggatgactcgtggtccaagtacgtcagcatatcatttataatatttgccgttctcattcacggtgtctctgtaaggcacggagtgtttatacagaacgcacttggtggtttgaagttgatcatgattgtcttgatgtgctttgccgggctatacacgcttttcttttataaaagcaccggtcaagttgcctgggacctcccagtaacccaagttgagaaagattctctcctgtcggtgtcctctattgctactgcctttatcagctcattcttttgtttttctggatgggatacagttcacacggttacatcagaaattaagaatcccgttaagacgttgaaggtgtcaggtcccttatcgttgataatttgttttgtctgctacacaatgatgaatgtggcatacttgaaagttttgacatatgaggaaattgttagtgcaggccccctggttggttccgtgttgtttaccaaacttttcggacccagagttggtggcaaattcattgctttttctatcgccatttctgcagcatctaatattctggtcgtcatttacagtatatcaagagttaaccaggaaatattcaaagaaggttatttaccattcagtattcatatgtccaaaaattggccatttgatgcacctctaccatctatttctttatgtggctttataaccattgcttggatattgattttacccaaagagggcgaatccttcaattatctggtatcgatggatggttatggtaatcagtttttcttattattggtcgctattgggctctttatttggaggttcaaacacaagaacgaagtcccagagattcgtgcatctacttttggagtattagccattattacattatcattatacatgttgatggcaccattctttgccgaccctagcctaaacagagttgggttcctgccgccctaccaaatcatgtcattactggtaatagttgcatgcttctttttctggttagttaaattcgttttactacctaaattcttccattataaacttttacccaaaatcacttatttgcatgatgggctcattgtcacagaatgggtgaaaaagccatgtctgtgttag

SEQ ID NO: 76885 - DNA, 462 bp, Saccharomyces pastorianus
atgtgggtaagaagtaattattcttgcttttcttcagaaccagtttcttgctcaatttcttcttcatcattttctggtctaataacagcaacatctacagttaactccctgtcatcgaaaaccttgcctttaaattcttcagctttagcttcaatatcaacgttttcaccactgaaagtgacaaatgccatacctctattagcagaatcggatgtgaagatcctaccagtgtgttggtctctcatttttctcattggcaaagagatggagtcggcgtcagtaccgaaaaattcagcgacctcctctttggtagctttgaatgggacgttattaatatataaggtatcctttgatctttccatttggtctaatggaatcttttcccttttttgtccattgaaaccacctctggcgccgcctctacctctgaagttccctctgcctctgaaacctcctctgtag

SEQ ID NO: 76886 - DNA, 885 bp, Saccharomyces pastorianus
atgtctactgaaattgaagaagctactaatgccgtaaacaacttgagcatcaacgactccgaacagcaaccaagggctcctactcataagacagtaattgaccccgaggacacaatctttattggtaatgttgctcacgaatgtaccgaagacgacttgaagcaattgtttgtggaggaattcggggatgaagtcagcgtagagatcccaattaaggaacacaccgacggtcacattccagctagtaaacacgctctagtcaagttcccaaccaagattgattttgataatatcaaggagaattatgacacgaaagtcgttaaggacagagaaattcatattaagagagctagaactccaggccaaatgcaaagaggaggtttcagaggcagaggcggtttcagaggcagaggaggttttagaggaggtttcagaggcggctacagaggaggtttcagaggcagagggaacttcagaggtagaggcggcgccagaggtggtttcaatggacaaaaaagggaaaagattccattagaccaaatggaaagatcaaaggataccttatatattaataacgtcccattcaaagctaccaaagaggaggtcgctgaatttttcggtactgacgccgactccatctctttgccaatgagaaaaatgagagaccaacacactggtaggatcttcacatccgattctgctaatagaggtatggcatttgtcactttcagtggtgaaaacgttgatattgaagctaaagctgaagaatttaaaggcaaggttttcgatgacagggagttaactgtagatgttgctgttattagaccagaaaatgatgaagaagaaattgagcaagaaactggttctgaagaaaagcaagaataa

SEQ ID NO: 76887 - DNA, 771 bp, Saccharomyces pastorianus
atggctccaggtaagaaagtcgctccagctccattcggtgctaagtcaaccaagtctaacaagactagaaacccattgactcactctactccaaagaacttcggtattggtcaagctgtccaaccaaagagaaacttgtccagatacgtcaaatggccagaatacgtcagattgcaaagacaaaagaagatcttgtccatcagattgaaggttcctccaaccattgctcaattccaatacactttggacagaaacaccgctgctgaaaccttcaagttgttcaacaagtacagaccagaaaccgctgctgaaaagaaggaaagattgaccaaggaagctgccgctatcgctgaaggtaagtctaagcaagacgcttctccaaagccatacgctgttaagtacggtttgaaccatgttgtctctttgattgaaaacaagaaggccaagttggttttaattgctaacgatgtcgacccaattgaattggttgtctttttgccagctttgtgtaagaagatgggtgttccatacgccattgtcaagggtaaggctagattgggtaccttggttaaccaaaagacctctgccgttgccgctttgactgaagtcagagccgaagacgaagctgctttggctaagttggtttccaccattgatgctaacttcgctgacaaatacgatgaagtcaagaagcactggggtggtggtatccttggtaacaaggctcaagccaagatggacaagagagctaagacctccgactccgcttaa

SEQ ID NO: 76888 - DNA, 2130 bp, Saccharomyces pastorianus
atgtttccctctctcttccgacttgtagtattctccaaacgttacatattccgatcaagccagcgcctttacactagtttaaaacaagaacagagccgtatgtccaaaataatggaagatttacgaagtgactacgtcccgcttatcgccagtattgatgtaggaacgacctcatccagatgcattctgttcaacagatggggccaggacgtttcaaaacaccaaattgaatattcaacttcagcatcgaagggcaagattggggtgtctggcctaaggagaccctctacagccccagctcgtgaaacaccaaacgccggtgacatcaaaaccagcggaaagcccatcttttctgcagaaggctatgccattcaagaaaccaaattcctaaaaatcgaggaattggacttggacttccataacgaacccacgttgaagttccccaaaccgggttgggttgagtgccatccgcagaaattactggtgaacgtcgtccaatgccttgcctcaagtttgctctctctgcagactatcaacagcgaacgtgtagcaaacggtctcccaccttacaaggtaacatgcatgggtatagcaaacatgagagaaaccacaattctgtggtcccgccgcacaggaaaaccaattgttaactacggtattgtttggaacgacaccagaacgatcaaaatcgttagagacaaatggcaaaacactagcgttgataggcaactgcagcttagacagaagactggattgccattgctctccacgtatttctcctgttccaagctgcgctggttcctcgacaatgagcctctgtgtaccaaggcgtatgaggagaacgacctgatgttcggcactgtggacacatggctgatttaccaattaactaaacaaaaggcgttcgtttctgacgtaaccaacccttccagaactggatttatgaacctctccactttaaagtacgacaacgagttgctggaattttggggtattgacaagaacctgattcacatgcctgaaattgtgtcctcatctcaatactacggtgactttggcattcctgattggataatggaaaagctacacgattcgccaaaaacagtactgcgagatctagtcaagagaaacctgcccatacagggctgtctgggcgaccaaagcgcatccatggtggggcaactcgcttacaaacccggtgctgcaaaatgtacttatggtaccggttgctttttactgtacaatacggggaccaaaaaattgatctcccaacatggcgcactgacgactctagcattttggttcccacatttgcaagagtacggtggccaaaaaccagaattgagcaagccacattttgcattagagggttccgtcgctgtggctggtgctgtggtccaatggctacgtgataatttacgattgatcgataaatcagaggatgtcggaccgattgcatctacggttcctgattctggtggcgtagttttcgtccccgcatttagtggcctattcgctccctattgggacccagatgccagagccaccataatggggatgtctcaattcactactgcctcccacatcgccagagctgccgtggaaggtgtttgctttcaagccagggctatcttgaaggcaatgagttctgacgcgtttggtgaaggttccaaagacagggactttttagaggaaatttccgacgtcacatatgaaaagtcgccgctgtcggttctggcagtggatggcgggatgtcgaggtctaatgaagtcatgcaaattcaagccgatatcttaggtccctgtgtcaaagtcagaaggtctccgacagcggaatgtaccgcattgggggcagccattgcagccaatatggctttcaaggatgtgaacgagcgcccattatggaaggacctacacgatgttaagaaatgggtcttttacaatggaatggagaaaaacgaacaaatatcaccagaggctcatccaaaccttaagatattcagaagtcaatccgacgatgctgaaaggagaaagcattggaagtattgggaagttgccgtggaaagatccaaaggttggctgaaggacatagaaggtgaacacgaacaggttctagaaaacttccaataa

SEQ ID NO: 76889 - DNA, 2040 bp, Saccharomyces pastorianus
atgcacgacaagaagtcgcccatggcgaattcccactacttgaaaaatctaaaacagcagtttcgcaacaagaaccttatcgaaacgactatccatctagtaaagtgcaatgaccatgactcattggcctttttagcaagaacatacggggttccaccacagttgcgacacgtcgtgtggccgatcctgctgaagtaccacccaatgtgcatttcaccaaacattacctccaataccatttcttgggacccaataaccaatgatttcatacttaatgacccttttctgaaaagtaaggctccaaccgataagcaagacaagagcgacgatgaaaatattctcccgtacgatatcgaatccattatcctgcatgatttgaaaaaatacttccactccaggtctaatcctgctggctcatcgagtaatgctaacaccaccaatatcgccaccccgacacctgtttcgtcgtccgacgcttccactatttcttctatggaggtactgtctccctcattagactatgagttccagatcatcgagactttgaaaaatgccatcgtgaaatttctgctgaagtggtcaaaaatcttcaagtacgaaagcggtcttgcctggattgctctgggattggctgaatggtatcccatctatccctacgaaaccatgtctcctttcaacgagactcattcattttacgaagtggaggattatgtagttctgagcggaagaaagcacgctcttctaagcactaacaacggcaataacggaaatagcaactcctctagcaacaacaccaacaacaataacacgaatataacatcgggcatgcacaacttgagcatcaacacaaataccagcttgcacaattctccgtacatttctcacacgttatcatacctttataaggaatatccgttaccctttgagctgcgatcaaaattgcctacaaaaccaattttctcatttagtgcccttttcgaaagactagctcttgtcattctacattgccctgataccatactggcacacaaacaattgaaaaatgactcgaacgcatcttccagctcaaaggcaaactcaaacttcaacacaaattatttccctattatatctggtggcgatctttcatttcagacccaagtttttttcaaggtattctcttcaattttgccagagctgtaccaacctttgacagaagaatcttccttacaaccttcgtcgtcaagaaactcctggatatattggtggttgaaatgctctggagctaaagctttacaaagacaagatagagggcgtgtatgggatttgctgctcggttggaggcccaaaccaaacatggacacgataaatttctttttgaactataacgataagaaaatggatcacctctatcacgatacaccacagtgtgacaacgagcagtactggatgaaagattggatcgctttgtacaataatgatccgttttggttccccgatctggatagcatggcactaggttcgaaaaaatttccctatgattatagtgtcttcaaagaattaattttaaggaatagatacggaggtactcaaagcaaagctcaaaaggacaacacagtaccatctcctggtagtgattcaaatgataagtcagaattgaaactaccgttttcttccattgatcctcatatgcaattgattttcattttcatcgcgattttgcagtttaacgaatttaagctattagaatttgaagaagcggaaatttctgagtttcttaataacgttcctctgctaacaaaatttgatgactcttcctataggaagttatacgagaatacagaatctagcataaccagtttgccttcttcaccgactacttctacaatggcgtcattacaatccagttccaattcgagtgcccatatctcgaactatcacatgttaatcgaagtcggtaatgatgctaaggcttcccattgttttgatgatcttttaaatatggctggggatatttggaggaaatggctatggagagagttagaggaaagctctctttga

SEQ ID NO: 76890 - DNA, 1851 bp, Saccharomyces pastorianus
atgcagacgtcaatggtgagcgcaaaagttagtatatggctagtatgtagcgttatatgcagtagcctggtacgggctacgcaatctgtgtgttcgtcgcaaaacacagcgaccactgacggtgtacgaaatcaatttcagagtaatggttggtgttcaaataactgtgctggtcatcagtttgccatcgtacaggggttcatgtgctggtgcagtgattcggaaccgagcactcagacatcggtgggagactgcagtggcacttgtcccggttatggctacgaagattgtggtaatgcggataaggatctttttggttatatatatctggggcagaccccgctaagttctgtacagagtgtggaaacgtcaacagagtccagtgtgtacgtttcaagtagctctatcacgagtagtagtagtacgagtattgcggacacaaccacaatctcgccgactctgacgtcaacgagtacgaccccattgacaaccgcctcaaccagtacaacaccatcaactgatataacatcggcactgcccacgactacaagcacaaagttgtcaacatccattcccacaagcacgacatcgtcaacctctaccaccacaagtacctcatcgtcgacttctaccactacaagcaccacatcgtcgatttctacgaccgtaagtgtcacatcatcaacatctaccaccacaagtactacgtcgtcaaccctcatttccacgagcacatcatcatcatcatcatcaacaactccaaccacaacatcgtcagcctccatttctacaagcacgacgtcgtcaacttccacttcaacaagtacaacatcgccaacttcttcttcagcacctacaagctcgtctaatacaacaccaacgagcacaacgttcaccacgacatcacccagtacagccccttcaagcactacggttacttacaccagtaccacagcatctccaataacgtccactataacttctgtaaacctgcagacctccttaaagtattctgtgataacagtgacttcagtgcacaccatggacactaacatttcggaaatcacctcgagatatctcaccatgacaaaagtaataacgcagatttactcttccaccctcggggctactcctacttctgcagtggctactacgtcggccagcgtaggcggtagaataacaaacaataacaatagtaacaccaccaatagcaatacaccaactaacaagtctacagaaaagaaaggatactgggattcgcccgggaaaatagccgctactttcgtcgtggtcggagtggtatgtttggtaattatatgcgtactaatatacttaatacatcattatagaacaagacccgctcggaaggctcaagattttgagaatgaatatcagagtaagttttaccagtccaagtacccaaatgaagttaccactaccacgttacacacgccttcaccatcttcaaattcaactttctcgaccccaagattaatatacactgatgaaaagggacaaattatgtctgaatcaccatctccacgtcaatctacgtattccttgactgcaggcagtccaccaaatgacccaaacacgttggcaagcccatttcacgatcccactcttcccagaagaacttctacttttcttcattcgcccattcaaaagcaacacgaaaaaatggaatcaaacgttactctaggtgaagacacggtactggtggatcagaggctagacccaagtaagatgcttaacactttagcaaatgacgatgccacaaaccactctaccatttcgttatcagacaacgtagactactccaggagggttctgcgggtaatgaacgaataa

SEQ ID NO: 76891 - DNA, 999 bp, Saccharomyces pastorianus
atgggtgtcatcaagaagaaaagatcgcaccatggaaaggcttcgcgccaacaatactactctggggtacaggttgggggagtaggcagcatgggcgccataaacaataacatcccgtcgttgacgagcttcgcggaggaaaacaactatcagtacggatacagcggctccagtgccggcatgaatggcagatcgcttacgtacgcgcagcaacagcttaataagcaaagacaggacttcgaacgtgtacgacttagaccagaacagctcagcaatatcatacatgacgagagcgacacgatatcgttccgatccaacctttttaagaactttataagctcgaacgacgcatttaacatgctgagtttgaccacggtaccgtgcgacagaattgagaagtccagattgttcagtgaaaaaacaataagatatctcatgcaaaaacaacacgaaatgaaaacacaagcggcagagttgcaagagaagcctctgacgccgcttaaatacacaaaacttatagctgcggcagaggacggaagccgtagcacaaaggatatgatagatgctgtcttcgagcaagatagtcatttgaggtaccagccggacggcgtggtcgtacatcgtgacgatccagcgctagtgggtaaactccgcggagatctccgcgaagcgccggcggactactggacgcatgcttatagggatgttttggcgcaataccacgaggccaaggagcgtatcaggcagaaggaagtaactgcaggtgaagcacaggacgaagccagcttgcagcagcaacagcagcaagatttgcagcaacagcaacaagtagtgactacagttgcctcgcaaagtcctcatgcaactgcaacggaaaaggagccagtacccgccgtggttgacgacccactggagaacatgttcggagattattccaatgagccgttcaacaccaatttcgacgatgaatttggagatcttgatgctgtatttttttaa

SEQ ID NO: 76892 - DNA, 2151 bp, Saccharomyces pastorianus
atgaaaaccgaaatcagcactgcggattcccttcgtgatcctccctctaatggtctaaaggccgactctgagctggttatcagagaggatatagaccaatttttgccttcggaagtatcttcgttggggtcagatcaccagaatgatggtgaggattcagacactgacagtgacaactttttgcaagaccctgaagacgatgtggatgaagaaagcactggtagaggtacagtcactaccacttccacatccactgagtcaagaggccgtccatcttcttgtatcttcgtggcaagcttagcagcagccctatccgatgacgaattatgtctgtcggtgactgaaaatttcaaaaaatacggtgatttggctagagttaaagttttgcgtgataacgcaaatagaccttatgcttttgttcaatacaacaacgatcatggtgctaaacatgctctgatccgcgctcagggtactttattaaatggcagaaggttgcgttgtgaacctgcaaaagtgaacaggacattgtacttgaaaaaccagcaaagtattgatttcaacgagatcagtcaaatttgtgaaaaatttggtggtttggaacagattgttcctgatagaactgataatcaatacacgggaagatatacttatccgatatcttcggcaaattcttggtttgttcaattcgtttacagagacgatgcaatcagagcttatgcgaatttacgaactgatcccaattggatcatcgaatgggcacaaaatataaacgtcccaaaaaattataaccttttacacaaaagcaaattcaaaagttccaaataccatcaaaacaacggtattatcaataacgatggtagtaacaacaacgataataataatagtaataataataatagagaggattcaaggaggaatggcgacgttatagaagaggagtgcggacatgtgcatggtagtgattcagaggaaaaattgacaagcgatggtatttatgacgacgaagataaagattccgagatcaccattgataaaagatccattttcgtgggtcaattagacaaagaaaccaccagagaggaattgaatagaagattttccactcatggtaaaatccaagatattaatttaatcttcaagccaacaaacatatttgcgtttattaaatatgaaaccgaagaagctgctgctgctgctttggaaagtgaaaaccatgcaatttttttgaataagacaatgcatgttcaatataaagaggtaggtggtcgtcacaacaggaagttctctggtaagaacggtggcagcaactttaaccatcatcagttttttagcaccagatcgggcaaaacatttacagggccagaactgaacttagcaccaccaccaatcaacatgtacaggaaaatgagcggcggatcccagcaggaaagcgaaactatgatgccatacatgcccatggggcccatgcccatggggcctccaccaccaaatgcagcaagtctcagtgattttgatatgttccccccaagttactccacgtttatgaagggaatgatgccattgaggcgtaaatctatgcccaattcttggtcatccccttcttcaaagagtgtgaactctgaaaatgaaagtgttaatggtggtgatgagaattccgaattgccttccgaaattcctgaatcatctggtagatataatgctgctaattcctttaccacatataataattcctcagcaggaagctctaacaacaacaacaacaacaacaacaacaacaacagtaacagtaataagtctcaatataaaaagcgctatgcaaggaggtcaagctacggatacaatgaagtacctccaaaaccatactatttccagccttattactatcaccccatgcaataccatatgggcccaatgggcccattgcatccttctcaaggttctgctggaaatcaccatccatatatgatggtttatcccatgtcaccacctccgccttctgggttagatggaagcatgatccctcctccaataaatgtgggccaatcacatgctgctaatcatggcagtacccatgttcatgcgaacgaattcatatcaaacgatactggtgacataaatgaagataacaaagcttatagtttagattactaa

SEQ ID NO: 76893 - DNA, 3441 bp, Saccharomyces pastorianus
atggatgaatgtttacccaattcatgtctactaggtgttcacctcgtcatttcaacgcattcggggccacaaatagtttatcactacccaccctccaatacagcatttttaacaaataatccaacgaagcatcagcacctctatggaaaccatgcaaatctaaataaaaacacaagtacaaataaagaagaaaaactctttaattctggctctacgaaaacagcttctcaaattgctctaaacgagtcagcgaaaagttacaataccgctattacgccatcaatgacaaatactaatactaataatgtgacattacctccaactagatcgcatgctaatactgtaggatcacaaagttcaattcctgcggctactaatggtgtaggttatagaaaaaccgatatcgaagatacttctcggacttttcaataccaagaaactgaatctgaaacgtcatcatcgggattaagtgacagcgaattgtccacagactacttagacatttctagcgattcgttttctatatcttcttccttatcgtcatcttctttatcttcttctccctcaagttcatcctcatcttcccctccgcaagatggcttatcaagaactaattcgagtttccaatctacggattcaatgtctccaacttcaccacaaatgataatggaaaacgatagtatttcagtagcggaatcatatctagattctgggactaataacaaatcaagggccgcttccaagagatcccagaatttcttccataaattgagtaccaagaagagtactgattcaaaaatacattctccagtaagaaagcttaaatctaagccatcacaaagcactaaaaaaggcaacaaactgttaaaaaatacgtccaatgagactgatggaaatgcttttacaggaagttgttcaatttcttctaaaaaatctttatcgagtacaggagagcataaccaagaacttcgtaatagtagcctgaacgacactcctggccaatcacctcatcattaccaccatcgttaccaccattatcataaaaatgccgcgacgagccaacgaaattcccatacccagtacgatgttgaagaagaagacatggaagtttcggcaatgttgcaggatggtaaaatctctatgaatgaaattttttttgaagaggaaaacttccaggatataaataaaattctagaatttgataatgattttgttgcagaattttgtagccctgagagggaaatgtgcaataccagattcgaattcacggtggataatttctgcttcttaggcttacctattcatgtagattctcaaggcagatggagaaaatccaagcacaaaaataaaacccgctctaaaagatcttcgagtactacaacaaacatcagtagaaagaaatctatcgcttccaaaatttcatcactgagtgagaatactttgaagaaagttaatagtggtgaagctgacactgtttatgacagtaatattggtcatgaggcttctactgatacaccgaatttgaggataaatactgatgtcagtggaaacgaatttgagagagaaaaggaagacttgggcaaaaatatgaacatgtttcatgtatgctttgttatgaatccgcatttaatcgaatataataaaaggattgatgacatgtatcagtttgttgttacaaggttatcattattgttaagatatgtgcaatcaaaaacctcgtacatttctagcgaatgccatataattttaaaggaaaaagaacgggtactgaaacattcaaaaacataccaatctataaggggcgcaggaaacaaggggaagtatctgtaccaaagaattttagccaaatcttcgttggctagggcgctaacggaatgtgttgataaaatccaacgaaatgaaatcgcatgtcttgagatcaatgacgataaagtaatttccttgcaaatcccgattcaaaacgagtttgaaaaaatgccaaacttcaaactgcaacccgtgctaagaggctcatatttgacgtccattttgaacatgaaatttttagaaaaatcatcattgagaattgaaggtcaaaatcgtcaaaacgatcaggctcaattcagtgatacccataataacatatacaggtttggcaataatattaatagtaccggccactgtggagcagcaaatgtggatgacggggacgacaatgaaagcaattactactgcgacgacaatgatgaccttttaaactatgcgctattattattggacgagccaaataatattattagctccctcgaaactttttcataccaggacgatattggcactatcatattgaaacatttagtcagaaatatccagccaaatatccccttaaggtcatatcgctatctgataactgatttattagataacccttcttcactggacgaccttactacagaaacaaactcattggaatcaagcatactgcgctcttgcgcattgcatttaatgtattggagacatgcaagaatagtgatcccactaagctccacatacacgtatattgtttcacccttggctcctattcaaggttatacaatagatgattataaaagtacttcacaaaatgatgggaacgtgaaaaaaatggaggatcgcgaaaataataagaatggaagcgacagagtaccactaatttatcaaaattcgatgttgttcagatccaaattcccatcattgcccagtttacccatttttttaagtttgttgtccacggacaaacctcaggcgtacagtaacataatcccatcaagggaacataagccagtttacctgaacgcgttagcgtggttaatacagtacgggtatgtaacccaattattgactttcataaatatccgagtggacaaacacataaaaatggcagtagatgaggatctagaaaaggaaggcttccgtaagactaatactgctagaaggcccagcatggactacaaaaaaactgataaaaagttggatgatgaagatgggcaaagtagagatgcaaacgccagcgaagcgtgttcaggaaagaatgaaggcatgcagtccaacgacaacaacaaagatgtggacgaaaaagataacgaaaatgatagtcgtgttgatgatcgtgatgacaatgaaatagctattgcggatgaagaagaaatactacacttcgaatacgatgatccagaaatgcaacatgactatactataattttggaacctgaaagagccactgcgattgaaaaaagatggctttatagatgtatttatggtcagccttcagatatccagattctttttaacaagttgctcaagtacttcaatggaaaggtccccatggaattggttatcatcaaagaggaaattagcagacatgacctaaagaaattgctcaatgctctagataagtatttaatcgagatacaccattggtaa

SEQ ID NO: 76894 - DNA, 1197 bp, Saccharomyces pastorianus
atggctttggagggattgcggaaaaaatataaaacaaggcaggaattggtcaaagcactcactcctaaaagacggtccattcacttgaactccaatggtcactccaacggaactccctgttcaaacgcagatgttttggctcatattaagcatttcctgtcattggcggctaattcattagagcaacatcaacagcctatttcaatcgtctttcaaaacaaaaaaaaaaaaggcgatacaagcagtcctgacattcacacaacattggacttccctttgaatggcccgcatctatgcactcatcagttcaagttgaaaagatgcgcaatccttttaaacttattgaaagtcgttatggaaaaattaccgctaggtaaaaacactacagtgagagatatcttctactccaacgtggaattgtttcaaagacaagcaaacgtagtccagtggctggacgttatacgctttaatttcaagctctctccaagaaaatccttaaacattataccagctcaaaagggtttagtttattcgcctttccccattgatatttatgacaatattctgacatgtgaaaatgaaccaaagatgcaaaagcaaacaattttccctggtaagccctgtctaattccattttcccaagatgatgcggtcatcaagttagggacaacaagtatgtgtaatattgtaatagtggaaaaagaagctgtcttcaccaaattagtaaataattatcacaagttgagtacaaataccatgctcattacaggtaagggatttccagatttcttgacaaggttattcctaaaaaaactagaacaatattgctccaaattgatatcggactgttctatatttaccgatgcggacccctatgggattagcatagccctaaattatactcactcgaatgaacgcaacgcttatatttgcacgatggcaaactataaaggaattcgtattacgcaagttttagcacaaaataatgaagtgcataacaaatccattcaattgttgagtttgaatcagcgcgactactccttagccaagaatttgatagcatctctgactgccaacagctgggatattgcaacttcaccattaaagaacgtcgtcatagaatgtcagcgggaaatttttttccaaaagaaagctgaaatgaacgagattgatgccagaatttttaaatacaaatga

SEQ ID NO: 76895 - DNA, 1398 bp, Saccharomyces pastorianus
atgctaagatcaaatttatgcagaggatctcgaatccttgcaagactgaccactacaccaaggacatacacatctgcggcgacagctgcggctgcgaatcggggacatatcatcaaaacatacttcaatagagattctacgacaattacgttctccatggaggagtccagcaagccggtttccgtttgctttaacaacgtttttcttagagatgcctcccatagtgccaagctggtgaccacgggagaactgtatcataacgagaaattgaccgctcctcaggacattcaaatctctgaggacggaaaatctctagtggtgaaatggaaagatggcggtcatcaccagttccctttacaattctttatcgactataaaggttccagttttgtttcgccagcaacaagaaaacaagaatccagatatagaccccagttatggaataagcgcatcctgaaagataacgtcaaggacttactctctgtgagctacaacgagtttattgatcctaaggatgactccaagcttttccaaacgctggtcaacctacaaaagtttggtatcgctttcatttccggtactccttcatcctcctctgaaggccttaccatacaaaagatctgtgaaaggatcggacccataagatcgactgtacatggcgaaggtacatttgacgtgaatgcatcccaagcgacaagtgttaatgcccattatgccaataaagacttgccgctacatacggatttaccatttttagaaaatgtgccaggtttccagattctacaatctctacctgctacagaaggggaagatcccaatactagacccatgaattacttcgtggacgcattttatgctacccgtaatgttagagaatcggattttgaggcttatgaggctttacaaattgttcctgtaaattatatatatgaaaacggcgataagaggtactaccaatccaaacctttaatcgaacatcacgacattaacgaggacaatactcttctgggtaattatgaggccttgattaaatgcattaactactctccaccataccaagcacctttcactttcggaatttatgataagccctcagatctaaataataatccggacttgaatttaattaccaccccagcaaaactaacagagagatttttgtttaagtctttcattagggggttgaacttgttcgagagtcatatcaatgacttcaacaatcaatttagattgcagttgcccgaaaactgttgtgttatctttaacaacaggagaattttgcatgctaactctttaacaagctcaaaccagcaatggttaaagggttgctatttcgattctgatactttcaagagtaaattaaagttcttggaagagaagtttcctcatgacaaataa

SEQ ID NO: 76896 - DNA, 1203 bp, Saccharomyces pastorianus
atgtctgaaaatcaacgtttaggattatcagaggaagaggtagaagcggctgaagtacttggggtgttgaaacaatcatgcagacagaagtcgcagccttcagaggacgtctcacaagctgacaaaatgccggcaagtgagtcgtctacgacgccgctaaacattttggatcgcgtaagtaacaaaattatcagtaacgtagtgacattctacgatgaaataaacaccaacaagaggccactgaaatcaatagggaggctgctagacgatgacgatgacgagcatgatgattacgactacaacgacgatgagttcttcaccaacaagagacagaagctgtcgcgggcgattgccaaggggaaggacaacttgaaagagtacaagctgaacatgtccatcgagtctaagaagaggcttgtaacgtgcttgcatcttttaaagctggccaataagcagctttccgataaaatctcgtgtttacaggaccttgttgaaaaggagcaggtgcatcctttgcacaagcaagatggaaatgctaggacgaccactggagctggcgaggacgagacatcgtcagacgaagacgacgacgatgaggagttttttgatgcctcagagcaggtcaacgccagcgagcagtctattgtggtgaaaatggaggtggtcggcacagtcaagaaagtctactcgctgatatcgaagttcacagcaaattcgctgccggagcccgcaagatctcaggttcgggaaagtcttttaaacttacccacaaattggttcgacagcgtccacagtacatcactgccgcatcatgcgtcgtttcattatgccaactgtgaagaacaaaaagtggagcaacagcaacagcaacagcaacagcaacttctgcagcagcaactcctgcaacagcaacagcaaaaaaggaacaaggatggcgacgactcagcctcgccgtcctcctccgtaactgcgaatgggaaagtactcattctcgccaaagaatccctggaaatggtgagaaatgtcatgggcgtagtcgactccacgttgggcaaggctgaagaatgggtgaagcagaaacaggaggtaaaagaaatgatcagggagcgtttcttgcaacagcagcaacagtacaggcagcaacagcagaaggatggcaattacataaagccctctcaggacaacgtggatagcaaggactaa

SEQ ID NO: 76897 - DNA, 594 bp, Saccharomyces pastorianus
atgagatgtctgcgtaagcgtcaaacaatatatgcgtactcttcgtcgctgacggtcttgtatctgacccaggggaaagactggtactgcaattgtggctcttcgaccttcaagtactcaactttcaggccactgcatgtacagtacggaatctcgaaatcaatgttgaccaacttatctcgaggagtaacgtgggaagtttgttggtcgtgcacttgtctatatagttcttccagcctgggtcccgtgcgcaagggcggtggattcattgaggttttcatttcttcttgcaggcggtcatattcttcctggttaaagagggggaactctgccaccatggatgcacacgtatttggatcatcttcgtcactgttgtactgtgagctcttgtttgtgctatgttctcggtgccccttcatggtttgtatctcccagaggagaaaatcgtcactcaagttaaacacgaccttgccgatgtttgccttgaatctaatttgcttgctgaggtctattttatattcctggaagacttttgtcaggggaattctcacgtttagcttcgacgttgagttggtgggtttaaaatttgtttga

SEQ ID NO: 76898 - DNA, 363 bp, Saccharomyces pastorianus
atgcacaacaagattgttagaatcgcgtccagtgcactcacagggggcaaactactcgagaagctaaaacccttgacccgttgggaagttcaatgggaccctaataagaccaaatgtttgggaataacaagagaggtaacattcaaggactacgaaaccacatgggcctttttgactcgtgtatcgatgagatctcatctatggggccaccatcccctggttcacacaagttacacctgggtcaagctggaacttcatacgcatgacatagacccgaaagacggggctcacagccagcttagcgatatagacgtccggatggccaagagaatagattcctacatcgatgagatgacaacttga

SEQ ID NO: 76899 - DNA, 2208 bp, Saccharomyces pastorianus
atgggagaatttaaacctccgctacctcaaggcgctgggtacgctattgtattgggcctaggggccgtatttgcaggaatgatggttttgaccacttatttactgaaacgttatcaaaaggaaatcatcacagcagaagaatttaccaccgccggcagatctgtaaaaaccggcttagtggctgccgccgtggtttctagttggatctggtgttctacattgttaacgtcgtcaacaaaggaatatgcagacggtatatttggcggttatgcgtacgctgctggcgcatgcttccaaattattgcattcgcaattctggcaattaaaaccaagcaaatggctcccaatgcgcacacatatttagaattagtgagaacaagatatggtaagatcggccatggctgctacttgttttatgccatcgcgacgaatattttagtcacttcaatgcttttaacttcaggttctgctgtctttagtgatttaaccgggatgaacactattgcatcgtgttttttactgcctgtgggtgttgttgtttatactctatttggtggtattaaagcaactttcttaacggactatatgcacacatgtgtcattatcatcattgtcctcgtatttgcctttaaagtttatgcgactagtgatgttttaggctcaccgggaaaagtttatgacttagttcgtgaagccgccaagaggcatccagtagacggtaactatcaaggtgaatatatgaccatgacatccaaatccgctggtattttattaattattaacctgattggaaatttcggcaccgttttccttgataatggttattggaataaagcgatttctgctagtcccgcagcgagtttgaaagcatatgccatcggtgggttagcatggtttgcagtaccttctttgatttcattgaccatgggattagcatgtcttgcggtggaaacgtctccaaacttccccacctatcctgacccacttacttcgttccaggcaaattctgggttggtcttgccggcagctgcaattgctatcatgggtaaggggggtgctgtggcatcgctgctaatgattttcatggccgtcacatctgctatgtctgctgaactgattgccgtttcatctgttttcacttacgatatctatagagaatatattgatcctcgtgcaagcggtaagaaattgatttacacatcacacgttgcttgtatcttttttggtcttgccatgagtggattttcggttggtttatactatggtggtatttctatgggttatatctatgaaatgatgggtataattattagtagtgcggtattacctgtcgttttgaccttatgttccaaagacatgaatttggtggccgctgtagtgtcgcctattttgggcacaggactggctataatgtcatggcttgtctgtaccaaatccctttataaagaattgaccgtggatactacgttcatggattatccaatgttaacaggtaacttggtggctttgctatcaccagccatttttattcctattttaacgtatgtctttaagccacaaaattttgactgggagaaaatgaaagatattactagagttgacgaaactgcagagttagttcaggctgaccctgatatccagctttacgatgctgaagctaacgataaggaacaaggagaagaaacaaattctctggtctcagatagtgaaaaaaacgatgttagagtaaataatgaaaaattgattgagcctaacctcggtgttgtgataagtaatgccatttttcaagaagatgacacacagttacaaaatgaattagacgaagaacaaagagaactagcacgcggtttaaaaattgcatacttcctatgtgtttttttcgctttggcatttttggtagtttggcccatgcccatgtatggttccaaatatatcttcagtaaaaaattctttaccggttgggttgttgtgatgatcatctggcttttcttcagtgcatttgccgtttgtatttatccactctgggaaggtaggcatggtatatataccactttgcgaggcctttactgggatctatctggtcaaacttataaattaagggaatggcaaaattcgaacccacaagatctgcatgtagtaacaagccaaattagtgcgagagcacatagacaatcatcacatttcggacaagttgatgaaataatttag

SEQ ID NO: 76900 - DNA, 366 bp, Saccharomyces pastorianus
atgtctgactttcaaaaggaaaaggttgaagaacaagaacaacaacaacaacaaatcatcaagattagaatcactttgacctccaccaaggttaagcaattggaaagcgtctcttccaacattgtcaagaacgctgaacaacacaacttggtcaagaagggtccagtcagactaccaaccaaggttttgaagatctccaccagaaagactccaaatggtgaaggttccaagacttgggaaacctacgaaatgagaatccacaagagatacatcgacttggaagctcctgttcaaatcgttaagagaatcactcaaatcaccattgaacctggtgtggatgtcgaagttgttgttgcttccaactaa

SEQ ID NO: 76901 - DNA, 1218 bp, Saccharomyces pastorianus
atgaacatcggtggaggaaaatttttacttgggaggatatcgaataatccaacttcagggatagtagggcttgctaatgttggtaaatcgacttttttccaagcaataacaaactcaaaattgggaaatcctgcaaattatccattcgctaccattgacgcagaatgtgccaaagtcaatatacctagcgtgccgctctctaatttattgagaatatatcagagtgcgaaatgcgtacctggaacactcacaatatatgatattgctgggctcaccagaggcgcatctcaaggccatggtttgggtaacaagttcttaaacgatatcagacacgtagatgggatatttcaagtggtgagaggattcttaaaggaagacatcacccatatagaaggtaatgttgatcctgtcagagatctatccgtggtacaagatgaactcatcttgaaagacttagaatttctggaaaacattagggaaagacttagtaagaagatgagaatggtttcgaagaattctaaagaacatcaggaaatgaagatagagacagaattattagatgcattagaggaacatttgtttaacggtaaaaaaatccggcatttcaaagatcattggaacctggatgaagtcaaaattttgaataagcataactttttaacctccaaaccaactttgatattgctaaatgtttcacctcaagattacgttaggaatgaaaataaatttgtcagaaatattatagaatggattaacgaattttcaccaggagataaattcctacttttcagtgcagaatttgaatcgcaattgatggaatgtaaaggcatagcgtcagagtattttgacaagatcaaggaagataccaatgtttctgatcaacagttagtttctgcgataccgcaaataatactagaaatgagaaagttgttgaacttaattagcttctttacatgcggcccacaagaagttcaccaatggaatataagggagggaaccaccgctcaagaggccgcgggtgtaatccatagcgacttgcgtgaaacatttatcagcgctgatgtaataaaatatgacgatctgaagaagatggaaccaccgctaaatgagtctttactaaaatctaagggacttatcaaacgtgcaggcaaacaatatattatgcaggacaatgacattgccttattcaaagccgccggtgggaaaattaagaaatag

SEQ ID NO: 76902 - DNA, 924 bp, Saccharomyces pastorianus
atgaccggcatggaatcaggagagaatttggaaaacatggaagatattttggcgagacatcgcaaggaaaataaagatttacagaataagataacgggtatgaaaaagcaggctactaaatccaaaaggaaagaagttaattcgaaatgcctagatcttcaagataaactaaagactaagcaagaaaatgaaataagggattggaaaattgcaaataatgaagtgtttgacgcagaacaagaagatgaagtgactcctgaaaaacttttagaacaactatccatatctcgagatgagaaagaacaacagaatgttcccgttcaacaacagcaacaaggccagacaaagaagcgtcgcaatagacaaaaggaaagattggccaaaagagatgcagcaattgctaaaatgaaagaagaggctgctttagaagcatccaaacaaccggacttgaaaaaaatggagcaggagtctatagatcagttatgcgagttgaagaaactaaaacaattcgatatacaacccgatggccactgtctctttgcatctatattagatcagttaaaattacgccatgatccaaaaaaactggatcaagacatggatgtcatgaagctgagatggttgagttgtaattacgtacaggagcacagggatgatttcattccatatttgtttgatgaagaaactatgaagatgaaagacattgatgagtatacgaaagagatggagcatacagctcaatggggtggtgaaattgagattttggctctctctcacgttttcgactgccccattagcattctgatgagtggaagacctattcaagtgtacaatgaatgtgggaaaaatcctgaattgaagctagtttactataaacacagctatgcattaggtgagcattataattcattgcatgattcttga

SEQ ID NO: 76903 - DNA, 963 bp, Saccharomyces pastorianus
atgccaacaaattccatcaaattattagcaccagatgtccaccgaggtttagctgaacttgttgccaaaaggctaggtctacagttaacaagcagcaaactaaaaagagatccaaccggtgaggtttccttttctattggagaatctgttagggaccaagatatctttatcatcacgcaaattggctctggtgtcgtgaacgatcgtgttttagaactactgatcatgatcaatgcttcgaagactgcgtctgcaagaagaatcactgctattattccaaatttcccatatgcaagacaagatagaaaggataagtctcgtgctcctattaccgctaaattgatggccgatatgttaacaacagccgggtgtgatcatgttattactatggatttgcatgcttcccaaattcaagggttcttcgacgtcccagtagataatttatatgcagaaccaagcgtagttaggtatatcaaggaaaatgtcaactatatggattcaataataatttcgccagatgctggtggggcaaaacgtgctgccactttggctgatcgtttggatctaaattttgcattgatccataaggaaagagctcgtgccaatgaggtttctcgtatggttcttgttggggatgttactgataagatttgtatcattgttgatgatatggccgatacttgtggtactttagctaaggctgctgaaattcttttggagaatagagctaaatctgttattgctattgtcacgcacggtgttttatcaggcagagctattgaaaatattaacaattctaaactggatagagttgtttgcacaaatactgttccatttgaagaaaaaatcaagaagtgcccaaaactggcagtcattgacatcagtagtgtgctggctgaaagtattcgtcgtttgcataatggtgaaagtatttcttatttatttaagaattatcccttataa

SEQ ID NO: 76904 - DNA, 1758 bp, Saccharomyces pastorianus
atggatcaatttgagtatatcgttactttagaatttggaaaccaaaatcaggttgaatccgcttatcaaattttcaagagtattccgaaaaagttgaaggcaaaaagtatcggggaagaaagtatcaaaagtaataatcaagactggcaggattggagagtctgtgacttggaaatagacatgataactgatttcaaaaatcaaacatcaaaagaagaggaaagtgatttgattacttcacaatacttaggccatgggataataaggctattcaagctaaacaatgccaataatactcttaatgagaaggagattttgactatcccgggagatgatactatgatatgtatcctgtttgttccaacttattttaccgttcacgatttattgcatttttatattggtgatgatattgttaataagcaagtttcaaactttcgtatattacgaaatcagcagaagggaatgggttttaatttcacggtcttaattaaattcaggaatgcacttgatgcgaaaaatttcaaggaagagttcaatggcaaaagtttcagcaggatggatcccgaaacatgccatgtgatctctgtaaaggaaatagtttttcaaaaaaagctcttccaaagaccagccgctaacgaggacttcccctatctacttactgatccattcactgttaagaaaaaaaaggaactggtaaaagtcgaactccccacatgtcccgtttgccttgaaagaatggattcagaaactactggattagtaacgatcccgtgccagcacacttttcattgccaatgcttaaataagtggaagaattcaaggtgtccagtgtgtcgacattcaagtctgcggctaagcagggaatcattattgaaacaggcaggtgattccgcacattgtgcaacatgtggttccactgacaatctatggatttgcttgatctgcggtaatgttggatgcggtcgttacaattccaaacacgcaatcaagcattatgaagaaactttacattgttttgcgatggatatacggacacaaagagtgtgggattatgcgggtgataattatgtccatcgcctagttcaaaatgaagttgatgggaagttagtagaggtcggcggctccggtgatgatgacaacaatgatataggcaactccgatgaactacaaaatgttgtttacgggaacaggagcaaaaacggtgagaaatcgaactctaataaaaaagatggggagctggcggcaaattttttaaggcatagggagtatcatctagaatatgtgcaagtcctaatatctcaattagagtcccaaagagaatattatgaactgaaattacaagaaaaagatcaaactgcgtctgattcgtcgaatgttgaaagtttgaagaagtctatggaagatttgaaactccaatttcaggtcactcaaaaggagtggcagaaaagggaaatggcccagaaatctaagcttgaggaagatatgttagtaatcgaaggactacaagcgaacctagatcacttatcaaaaaaacaagagcagttagagcgagaaaacaaagcgttagaagagtctaaacaagatttggaagagcaagtcaaggacctaatgttttatctagattctcaagaaaaattcaaagacgctgatgagagtgtaaaagaaggtaccatcctaatacagcaaccacatggggcagcacaggcatccaaaagcaagaagaagcgcaacaaaaataaaaaagcagggaaatga

SEQ ID NO: 76905 - DNA, 993 bp, Saccharomyces pastorianus
atgacgccttctaatatggatgataataccagcggattcatgaaatttattaaccctcagtgccaagaggaggattgttgtatcagaaataatctattccaagaagatagcaaatgtataaaacaacaaccagacctattaagcgagcaaacagcacccttcccaattttggaggaccagtgtcctgctttgaaccttgacagatcaaataatgatttgctattacagaacgacatatctctccctaagggtagtgatcttcaagcaattcaactaacccctagttcaggcgactactctacctatgttatggcagataacaataataatgataatgatagttatagtaatataaattattcttctaaaaatagcggtatatctccaagttcgaggactccctcagttgctcataatgagaatgttccagatgactctaaggcaaagaaaaaggctcaaaacagagccgcccaaaaagccttcagagagagaaaagaagccagaatgaaagaattacaagataaattgttagaaagtgaaaggaaccgccaaagtttattgaaagaaatcgaggaactaagaaaggcaaatactgaaatcaacgcagagaacagattgctactgcggagtggtaatgaaaatttttcaaaggacatagaagatgataccaactacaaatattctttcccaacgaaagatgaattttttacctctatggtcctggaaagcaaactgaatcacaaaggcaagtattcgctgaaggataatgaaattatgaagcgaaatacccagtatactgacgaagcaggaagacatgtactaacagtccccgccacctgggagtatctttacaaactttcagaagatagggactttgatgtgacatacgttatgagcaaattgcaaggacaagaatgttgtcatacccatggacctgcgtatccaagaagtttaattgattttctagtggaggaagctactttgaatgaatga

SEQ ID NO: 76906 - DNA, 354 bp, Saccharomyces pastorianus
atggatttgtatccaccagcttcatgggcagcattagtgcctttttgtaaggcattgacgttcaaagttccagtggtccttggtaatcgtaatccatcgccgccatcgccattgccgcccatggccctttcattgtcattgctgataccgttatcaagactgtccttgtctggtagttccgatacagcagatggatcattgctcatttcttgtattagtcgaggatcttgtgggatatttaggatggggtgtgaggcagtgaagggaagaagtttgggttgcttgctacctcgctctaattgtacgtacggatgtatgtctttaagaaagtatgtaagtgtgtgtagtatgtga

SEQ ID NO: 76907 - DNA, 393 bp, Saccharomyces pastorianus
atgagaaaagagtcgtttctcactttttatttctcgaatcacctgtatttgtgccccgcgataatcaggctctcgagcgtatgtacacttgccagaactgattattatctaccatcaaatatagcagtgacctacgacatacaaatttcatctctcggattcacttaccgaattgatttttttcttgcactcttttctgacccggcacggccttttcttaccgagataaacaggaaaatagggcagtatgcgtgtgttatacgtgagagagagcaagcgggtgagtattcgtttcattacagtttatgcattaacataaacgtatacatattacacatacacatatacatagatagatacatatacgcatatattaatgctcaggtgcaataa

SEQ ID NO: 76908 - DNA, 1236 bp, Saccharomyces pastorianus
atgacatcagctacggacaaatctatcgataggttagttgttaatgcaaaaacaagaagacgaaactcttccgtgggtaaaattgatttaggtgatacagttcctggctttgcagccatgcctgaaagtgctgcctctaaaaatgaggccaaaaaaaggatgaaagccttgactggtgactctaaaaaggatagtgacctactgtggaaggtttggttttcatatagagaaatgaattaccgtcatagttggttgacaccattcttcatacttgtatgcgtgtatagcgcgtactttttatctgggaatagaacagaatcaaacccgctgcacatgttcgtagccatatcatatcaagttgatggcacagactcatatgcaaaaggtatcaaagatttgagttttgtgtttttctacatgattttcttcacatttttacgtgagtttttgatggatgttgtaattcgaccattcacggtatacctaaatgttacttccgagcatcgtcaaaagcgtatgctagaacaaatgtatgccatattttattgcggagtttcagggccctttggtctttatattatgtaccatagtgatttgtggttgttcaagacaaaaccaatgtacagaacatatcctgatataaccaatccgttcttgtttaagatattttacttgggtcaagcggcattttgggcgcaacaggcttgtgttcttgttctacaattagaaaagccaagaaaggattacaaggaattggtttttcatcacattgtgacattattattaatttggtcatcatatgttttccattttaccaaaatgggattggctatctatattactatggatgtgtcagattttttcctttctttgtctaaaacattaaactatctgaattctgtatttactccctttgtgttcggcttgttcgtgttcttttggatctatctgcgccatgtcgtgaatatcagaatattatggtcagtcttaacagaattccgtcatgaaggtaattatgtgttgaattttgccacacaacaatacaaatgttggatttcgttgccaattgtatttgtactaattgctgcgttacaattagttaacctgtattggctgtttttaattcttagaatcttgtacagattgatatggcaaggtatccaaaaggacgaaagaagtgacagtgattctgatgagagcgctgaaaatgaagaatctaaggaaaagtgtgaataa

SEQ ID NO: 76909 - DNA, 489 bp, Saccharomyces pastorianus
atgttatgcttctctggtacattaggctgtaccaaatatggagcctttcttttaattttgtcatatagatctcccatggcgcgtaatgatgggtcatccttgaatgaatcagacagttgcttgacaacatcagtcaccgctttttttagagtaatgtgtacagaatggctctcgatgagcgcatataacaaagaggtaaaattttttgaactaatttcctgtcttaagcgggaaccacaattttctgccaaagataccgtcaaagagagggttcttaagatcacgttagcatcctgttgttctagcctcttctctataagagacataacctcttgtccattatcttcgggatcttccttcaccaaatcgcaaacatctaaaatgtattgccagttatcacttctcaacttgggatctgttgccttcaacagtgcattccttattttaatcgcagatgatgacatttttgtcaacggtttccttagatag

SEQ ID NO: 76910 - DNA, 1359 bp, Saccharomyces pastorianus
atgtcatcatctgcgattaaaataaggaatgcactgttgaaggcaacagatcccaagttgagaagtgataactggcaatacattttagatgtttgcgatttggtgaaggaagatcccgaagataatggacaagaggttatgtctcttatagagaagaggctagaacaacaggatgctaacgtgatcttaagaaccctctctttgacggtatctttggcagaaaattgtggttcccgcttaagacaggaaattagttcaaaaaattttacctctttgttatatgcgctcatcgagagccattctgtacacattactctaaaaaaagcggtgactgatgttgtcaagcaactgtctgattcattcaaggatgacccatcattacgcgccatgggagatctatatgacaaaattaaaagaaaggctccatatttggtacagcctaatgtaccagagaagcataacatgagtacccaggcagacaactcagatgatgaggaattacaaaaagcactaaaaatgtctttgtttgagtacgaaaagcaaaaaaagctacaagaacaggaaaaagaaagtgccgaagtccttccgcagcaacagcagcagcatcagcagcagaatcaagctcctgctcacaaaataccggcacaaaccgttgtgagaagagttcgggctctatatgacttaaccacaaacgaaccggatgaattgtcctttaggaagggcgatgttattacagtgctggaacaagtatatagagattggtggaagggagctcttcgaggaaatatgggtatatttccattaaattatgtaacaccgattgttgagccatcgaaagaagaaattgagaaggaaaaaaataaggaagccatagtattctctcaaaaaactaccatagatcaacttcataattcgcttaatgcagcttctaaaacgggaaattcaaatgaagttttgcaagatcctcatattggagatatgtacggatctgtaacgcctttgaggcctcaagttacgagaatgttaggtaaatatgctaaagaaaaagaagacatgttatccctgcgtcaagtcttagcaaatgcagaacgctcatataatcaactaatggatcgtgcagctaacgcacatatctcaccaccagttccaggccctgcactctacgcaggaatgactcatgctaataatactccagtaatgccacctcagaggcagagttaccaaagcaatgagtactcaccttacccttctaatttgccaatccaacatcctacgaatagcgcaaataataccccacaatacggttatgatcttggatattcagttgttagccaaccaccacctggttatgaacaatag

SEQ ID NO: 76911 - DNA, 1314 bp, Saccharomyces pastorianus
atggctctcaataaactaaagaatataccttctttaacaaacagttctcatagctcaattaacggcattgcatccaatgctgcaaattccaaaccaagcggagcagacacggatgatatcgatgagaatgatgaatctgggcaaagtattctattaaatattatttcccagctgaagccaggttgtgatttatctagaatcacactaccgacatttattctggaaaaaaaatcgatgttggagagaatcactaatcaattacaattcccagatgttcttttagaagcacactccaataaagacgggctgcaaaggttcgttaaagtggtagcatggtacctagcaggttggcacattgggcccagggctgtgaagaagcccctaaatcccattcttggagaacactttacagcttattgggatttgcctaacaagcaacaagccttttacattgcagaacaaacgagtcaccaccctcctgaatctgcgtatttttacatgattccagaatcgaatattagagttgatggagttgttgtgccaaaatcgaaatttttaggaaactcaagtgctgcaatgatggaggggttaactgtattgcaattccttgatatcaaggatgcaaatggtaaaccagagaaatatactctatcgcaaccaaatgtttacgcaaggggaattctgtttggcaagatgaggattgaattgggagatcacatggtcattatgggtcctaagtatcaagtggatattgagttcaaaacaaaaggctttatttctggtacctatgatgcaattgaaggtacaattaaggattacgatggtaaggaatactaccaaattagtggtaagtggaatgatattatgtatatcaaagatttgagggaaaaaagctctaaaaagactgttctcttcgatactcatcagcattttcctctagctcctaaagtccgcccattggaggaacagggagaatacgaatcgagaaggctttggaagaaggttacggatgcgctggctgtacgtgaccatgaagtagctacagaagaaaagtttcagatagaaaaccgccaaagagagctggccaaaaagagggccgaagacggcgttgaatttcattcaaaactatttagaagggcagagccaggtgaggatttagattattatatttacaagcacatccctgaagggaccgacaagcatgaagaacagatcaggagcattttggaaactgccccgattttaccaggacagacattcactgaaaaattttctattccggcttataaaaagcatggaatccaaaagaattag

SEQ ID NO: 76912 - DNA, 1074 bp, Saccharomyces pastorianus
atgacgcgagatagcccagattctaacgacagctataagcatataaacaagaatactacacaaaaaacctcgtttgatagaaattcattcgattatattgtacgatcgggattagctggaggtatatcaggttcatgtgcgaaaacactaatcgcacccttagatagaataaaaattttatttcaaacatcaaatccgcactacacaaagtacgcaggctcactaataggattagtagaggcagccaagcatatatggatcaatgatggggtaagggggttttttcaaggccattcagcaacccttttaaggatttttccatatgctgctgtcaaatttgttgcttatgaacagattaggaataccttgattccctcaaaagaatttgagtcacattggagaaggttggtgagtggttcactggcaggattatgcagtgttttcataacatatccgttagatctcgtgagggttaggttagcatatgaaacagaacataagagagtaaagctaggaagaataatcaagaaaatatataaggaaccagcttcagccacgctaatcaaaaatgattatattcctaactggttttgtcattggtgtaatttttataggggttatgttccaactgtacttggcatgataccatatgcaggtgtttccttttttgctcacgatttacttcatgatgtgctgaagagtcctttctttgccccttattcagtattagaactttcagaagatgatgaattggaaagagtacagaaaaagcagagaaggcctttgcgtacgtgggctgaattgatctctggtggtctagctggtatggcctcccaaacggcagcatatccatttgaaattattaggagaaggctccaagtaagtgcactgtcaccaaaaactatgtatgatcataaatttcaatcgatatctgaaattgctcacataatatttaaagaacgtggagtacgtggattttttgttggtctaagcataggttatattaaagtaacacctatggttgcatgtagttttttcgtctatgaaagaatgaaatggaattttggcatttaa

SEQ ID NO: 76913 - DNA, 1341 bp, Saccharomyces pastorianus
atgaatgccctaaaatatttctcaaatcatttaataactacaaagaaacaaaaaaaaatcaatgttgaggtgacaaagaatcaagatctactaggcccttcaaaggaagtttcgaacaaatatactagtcacagcgaaaatgattgcgttagtgaggtggaccaacagtacgaccactcctcaagccacttaaaagaatctgatcaaaatcaagagcgcaaaaattctgttcctaaaaaaccaaaagctttacgttccatcctaaaagagaaaatagcgtcaattttgtgggcactactactttttcttccgtattatctgataatcaagcccttgatgtctttatggtttgtttttaccttcccactaagtgtcatcgagcgtcgtgtaaaacacaccgataagagaaacaggggttcaaatgctagtgagaatgagctgcctgtcagttcaagcaatattaacgattctagcgagaaaacaaatcctaaaaattgcaatctaaatacgattcccgaggcagttgaggatgacttaaatgccagtgatgagataattctacaaagggataatgttaaaggctcattacttagagctcaatcagtcaaatcaaggccaagaagttattccaaatcagaactatcactttctaatcattcaagttctaataccgtatttggtacaaaacgaatgggaaggttcttatttccaaagaagctgatacctaaatccgtacttaacacacaaaagaaaaagaaactggttatagatctcgatgagaccttaattcactcggcttctcgaagtacaacgcatagtaattcttctcagggtcacttggtggaagtgaagtttggattgagcggaattcgtacactatactttattcacaagaggccttactgtgatttatttttgacaaaagttagcaaatggtacgaccttatcatttttacagcatccatgaaagaatacgctgatcctgtgatagattggttagaaagctccttcccatccagtttttcaaaaagatattaccgttctgattgcgttctaagggatggtgttggatacattaaagatttgagcattgtcaaggactccgaagaaaacgggaaaggcagctcctcttctttggatgatgtcattattatagataacagcccggtaagttacgcaatgaatgtagataacgctattcaagtagaaggatggataagtgatccaactgatacggacttactgaacctgttacctttcttggaggctatgaggtattcaacagatgtcaggaatatactggcattgaaacatggagagaaggcattcaacataaactga

SEQ ID NO: 76914 - DNA, 282 bp, Saccharomyces pastorianus
atgtctttcttaggtttcggtggtggtcagcctcaattatcatctcaacaaaagattcaagctgcggaagctgaactagatttggtcacagacatgttcaataaattggttaataactgttataaaaaatgtatcaatacttcttattccgagggtgagctgaataagaatgaatcttcgtgcctagacagatgtgtggccaaatattttgagaccaatgttcaagtcggtgaaaacatgcagaaaatgggccaatcatttaacgcagccggtaagttttag

SEQ ID NO: 76915 - DNA, 702 bp, Saccharomyces pastorianus
atgttcgcgaaaacagcagctgctaatttaaccaagaagggtggtttgtcattgctctccaccacagcaaggagaaccaaagtcaccttgccagacttgaagtgggacttcggtgcattggaaccttatatctccggtcaaatcaacgaattgcattacaccaagcaccatcaaacttatgtgaacggattcaacactgctgttgaccaattccaagaactctcagatcttctggccaaggagccctctcccgcaaacgcaagaaaaatgattgctatccaacaaaacatcaagttccatggcggtggtttcacaaaccactgtctattctgggaaaacctggctccagagtcgcagggcggtggtgaaccacccaccggcgctttggcaaaggcaatcgacgagcagtttggcagtctggacgagctgattaagttgaccaacacaaagctagcaggcgtgcagggctccggatgggccttcattgtgaaaaacctctctaatggaggcaagctggacgttgttcaaacctacaaccaggataccgtcacaggcccactagttcctctagttgccattgacgcctgggaacacgcctactacttgcagtaccaaaacaagaaagccgactacttcaaagccatttggaatgtggtcaactggaaagaagcatccagaagattcgatgctggcaagatctga

SEQ ID NO: 76916 - DNA, 1341 bp, Saccharomyces pastorianus
atgattataaggcgcttattttcaatttcaaatcgctcattcttcttgaagaaacctcaatttgatgtaaaaagaataatagagatgattcctcagtaccaaacttctatccagaatagagagctgatagaggcagatagtattatacgaagcttacaactgttgggtgaacggtatcaaaatataaaagagattgataaagttattgcggatattcaaatacagaggaaatcaattgaggctcaaatcaaaaaggataaaacaaaaattacggaatactcagctgcgctgaaggccctgaaagaacagtacaacgatcaaaatagcaaatcatcggagttgaaaaagaaaatcttggagacctgcaaatcacttccaaataccttggatcctacggtcccattagatgccccacagattgaacaatggataaaccctttaaaaacacataaaacttcagaagctcaggcgcatgttgatatcatgcttaaaaagaatatgttagacctacagactgcctcgaacgttacaggaatgtcatggtactatctattgaatgacggagcacgtctcgaacaagcattggtagcatatgccttgaaaaaggcaaacgaaaatgggttttcaagctgcgtaccgccaagcatcacgaagaaggagttaatagatgcatgtggatttaatccaagagatatgaataatgaaaggcaaatttacgctcttcaagacaccaatttaggattggtggctaccgcggagatacctttggcaggtctaggggcaaacaaagttctagagttaaactcgggagaatgttctaagaaactagttggagtaagtagatgttacagagctgaggcaggtgccaggggaaaagatacgaaaggtctctatcgcgttcatgagtttactaaagtagaattattttgctggagcaagccagaaaccagtgcaaaagtccttgaggaaataaagcaatttcagatttctgtagttgaggaattaggaataccggccaaagtactaaatatgccatcaaacgatcttggtaatcccgctttcaagaaatacgacatcgaagcttggatgccaggaagggggaaatttggcgagataagtagtgcctccaattgtaccgatttccaaagtagaagattaaatacaaagtacagggacgataacacaggaaagctagaatatgtgcacacgctgaatggcacagcaatggctatcccaagagtgatagtagcactagtagaaaatttctatgacccaagcaccggtaagatatctgttcctgaatgtttgagggagtttatgaatggccaacgatacatttaa

SEQ ID NO: 76917 - DNA, 717 bp, Saccharomyces pastorianus
atgcctattaatattcgcagagcgacaatcaatgacattatatgtatgcaaaatgccaaccttcataacctacccgaaaattatatgatgaaatattatatgtatcatattctctcgtggccggaggcttcgtttgttgctactaccaccactttggactgtgaagatagtgatgaacaagatgagaacgacaaattggaattgaccttagatgggaccaatgacggcagaacaatcaagttggatccaacatacttggctccgggcgaaaaattagttggatacgttctcgtgaagatgaacgacgaccccgaccagcaaaacgagccaccaaatggtcatattacttccttaagtgtcatgagaacctatagaaggatggggattgccgaaaacttaatgagacaagctttatttgcgttgagagaagttcatcaagcggaatatgtttccttgcatgtgagacaatctaatagagcagctttacacttgtacagggacacattggcgtttgaggtgttgagtatcgagaaaagctactatcaggatggtgaagatgcatacgccatgaagaaggttttaaaattagaggagttgcagataagcaacttcacccatcgccgtttgaaagagaatgaggaaaaactagaagacgatctagaaggcgatctactagaggatatcattaagcaaggcgtaaatgatatcattgtataa

SEQ ID NO: 76918 - DNA, 876 bp, Saccharomyces pastorianus
atggcacccagaaaacgctttaggctactcgaattagggtcaccaacaaattctaaaaggaaagttcaaaaacctcttcaagagaagaccccaaacttgcgagtttctccacttgcttctaaaattggtaaagaaaccaagaataaggaaatcagaaaaacaaaaaaaacagaatcagaaaatatattcaattcgaaacatgtcgatttaagactagaaagcccacatccaggattaaattttgtaagtgatgctcaacagtactcaaaggctggagatgttcgatatttgaaaaataaatcaagcaataccttgaaaaacgaaagacaaacaatagagcgcccctcatttgataattccttaaggttcgaggacattgagcagcctccaaaatctacttcaacgccggttctttctcaatcttctcaaataaatgtagaaagagaagcacccatgtttccagttccttactatattgctccttctcctatgtataattttagcccgtatcaaaatttcgttggaaacccaacgttcctgacgccaagtcataacccaaacctaaactatgccattcccatccaacggccggagttgctttatccgaatgttaacgtatacgattcgccattgtttaagaaaacaagactgccccatcagaccaaaagtctagataaagaacaaaattaccaatatcttccaatatatccggtctcgatttctaataacggagattttgttggccaagagacaccaagggcagcaccaaagttaagtaaaaagagactttcaagtacattggatgttaattgttccgattatgagtctagtggacaaaatgcaacttataatgatagtgaatctccccttaattaa

SEQ ID NO: 76919 - DNA, 1980 bp, Saccharomyces pastorianus
atgccaaactctcatggtaatgtattgaataatatctctttaaatagcaagcaaaatcccagatcgatttctaaaagttgcccaaatgataaagatgcaaggcagaaaagcttcaaaacgatatcagcccaagcactagtacgcgtgcaaggagctggatataagctcggtgatgtgaaattaaaggatgctgaagtcaaagaaaagaatagcctcaaaaaatacgattgtaaaaatgcaactcaagaaaagaaagaacaagagcaagtatttgaaaaaactgttgcaaagggaagcgtgcaaaaatatatcacgaaaacttcaaagacaaatagtttgtttataggaaatcttaaatcaactgtcactgaagaaatgctaaggaagatattcaaaaggtatcaatcttttgaatctgctaaagtgtgtcgtgattttctcaccaagaaatcattgggttatggctatttgaatttcaaggataaaaacgatgcagaatctgcaaggaaagaatttaattatacggttttttttggtcaagaagttaaaataatgccatctatgaaaaatacattatttagaaaaaacatcggaacaaatgtttttttctctaacttaccactggaaaatccccaactgaccacaagatcattttatctaataatgatcgagtacggaaatgtactgtcatgtcttctagaaagaagaaaaaacattggattcgtttatttcgataacgatatttctgctagaaatgtaatcaaaaaatacaataaccaagaattttttggaaataaaattatatgtggattgcattttgacaaagaagtaagagctagacctgaatttacaaaaagaaaaaaaatgattggctccgacatagttatcgaagacgaactattggctagcaataatttatcagataatgctcgttcgaaaacaatattagtcaaaaatttaccatctgacacaacacaagaagaggtcttggattacttcagcactattggccccataaaatctgtattcatctctgaaaagcaggcgaacacaccacataaagcgttcgtcacatataaaaatgaagaagaatctaaaaaggcacagaaatgtttgaataaaacaatttttaaaaaccataccatttgggttggtcctggtaaagataagcctgttcataatcaaattggaacgaacaagaaaacaaaggtttatctaaaaaatttaagcttcaattgcaataaggagtttatttctcaactatgtttacaagaaaaaataagattcagtgaaattaagatcacaaactataactcattaaattggacattttgtggacatgttgagtgtttttctcgtagtgatgctgagagattatttaatattttggataggagactaattggaagtagtttggttgaggcatcatggtcaaagaataatgataatatactaaatgagatagactatgacgatggtaacaacaatgaaaattataagaaattaatcaacattagttccatgatgcgtttccgcacacaagagttatcagctcatcaaaagggattaacgtcacagtttcaacaagtagtttccccattctcatcatattcaaattcctacacaaacatgaactctctcgtagctacgccgatgaaacctcatccagcatttaatttaattacaaatactgttgacgaaaaactgcatcagcctaagagaactaaacaggagaatgcagaaatacttgagtccttaaaaaaaattataaacagaaatttacaacgtataagtatttctggtttaaataaagaagaaaatctgcgcagcatttccgagtttatttttgacgtattttgggagcatgactcagaaaggctatcgcactttttattaatgacaaatacttcattagaatcacagaaaattctacaaaaacaagtcactagagctgctgaaagcctcggatttacagtttga

SEQ ID NO: 76920 - DNA, 1665 bp, Saccharomyces pastorianus
atgtcatctttgtacattaaggaggctaccggtgtagacgaattgaccacagccggttcacaagaccatccattcaaaaccccagcatatgctttgttcgcatctcaacagaagagcgatgccacggaacctaagcttttcgtgtttaagacagaagacaacgagtaccaggaaatcagtgcttctgctttgaagaaggctcgtaagggctgtgatggtttgaagaaaaaggcagtcaagcaaaaggaacaggagttgaagaaacaacaaaaagaggcagaaaatgctgccaagcaattgtctgctttgaatatcaccattaaggaggacgaatcgctaccagcagccattaagactagaatttatgactcttattccaaggtcggacaaagagttaaggtttccggttggatccatagattacgttctaacaagaaggttattttcgtcgtcctcagagacggatctggtttcattcaatgtgtcttgtccggtgatttggcattggctcaacaaactttggacctgactttggaatccaccgttactctgtacggtaccatagtcaaattgcctgagggtaaaaccgctccaggtggtgttgaattgaatgtcgactattacgaagttgtaggtttggcccccggtggtgaagactcctttacaaacaaaatcgcagagggctcagacccttccttactgttggaccaacgtcatttggccttgagaggagatgccttgtctgcagtcatgaaagtgcgtgctgctctactgaaaagcgttagacgtgtttatgatgaagaacatttgacagaagttaccccaccatgtatggtgcaaactcaagtcgaaggtggttccactttgttcaagatgaactattacggcgaggaagcttacttgacccaaagttcccaattatatttagaaacctgtttgggctccctaggtgatgtttataccatccaagaatctttcagagctggaaagtcccacacaagaagacatttgtccgaatatacccatatcgaagctgaattggccttcttgactttcgacgatctattacaacatattgaaactttgatcgtcaaatccgtgcaatacgttttggaagacccaattgctggcccactcgtaaaacaattgaatccaaactttaaggctccaaaggctccattcatgagattacagtacaaggatgccattacctggttgaacgagcacgacatcaagaacgaagagggcgaagacttcaagtttggtgacgatattgcagaagctgctgaaagaaagatgaccgataccatcggcgtcccaatctttttgacgagattcccagtagaaatcaagtctttctacatgaaacgttgttctgacgacccccgcgtcactgaatccgttgacgttttgatgccaaacgttggtgaaatcactggtggttctatgagaatcgacgacatggacgaactaatggcagggtttaagcgtgagggtattgataccgacgcctactactggttcattgaccaaagaaaatacggtacttgcccacatggtggttacggtatcggtaccgaacgtattttggcctggttgtgtgacagattcactgtcagagactgttccttgtatccacgtttcagcggtagatgtaagccatga

SEQ ID NO: 76921 - DNA, 456 bp, Saccharomyces pastorianus
atgaacagatcttttcactttctaataaagtacatatatatacatgttcttcttgttttttattttcacattaagcagcaggctattatgcctttttttatttttttcttttcatcattcgatggactttcatttgaccttcgagtggtagcgttttcagccaagcacgttttcgttggcgtttgttcacccttttttgttgtaggtttttttggttcatctagagtagttgttactgaatggctttcgaagcttgtattacctcctcctccagtttcaataacaccggtcttccctttgtcacgtaagagaggcgaattctccagcggatacatcttgcttataaacccttgcaaaagtttcctgcgatcacttttagatttttcaatcttcaatagtactgccaagaacaaatcttcaacatttacattgaacttggaagatgtctcaaaatag

SEQ ID NO: 76922 - DNA, 90 bp, Saccharomyces pastorianus
atgaaaatcaaattctcaagaggggctcgattttcagcgaccttttcttttgataagtaccctttcttgctatacgaggtggtccgataa

SEQ ID NO: 76923 - DNA, 5787 bp, Saccharomyces pastorianus
atgaccggcgggcagtcttgcagttctaatatgatcgtctggataccagatgagaaagaagttttcgcaaaaggggagctgatgagtaccgatatcaacaagaataaatttacaggccaagaagaacaaataggaattgtccacccgttggattccacggaggtttctaatctagtgcaggtacgaatatccgatgtatttccagttaacccatcgacttttgacaaagtagagaatatgtctgagttaacccatttgaatgagccgtctgtgctttataacctagaaaagaggtacgattgtgatctaatatacacctattccggcttatttttagtggcgattaacccttatcacaatttgaatttatattctgaagaccatataaacttgtaccacaacaagcataacaggttatcaaagagcagcttggatgaaaactcccatgaaaaactaccgccgcatatatttgcaattgcagaagaagcctatgagaatcttttatctgaaggaaaagatcaatctattttagtcactggtgaatccggtgcgggcaagacagaaaatacgaaaaagattctacaatatctagcatctataacttctggttctccttccaatatagctcctgttagtggtagttctattgtagaaagcttcgaaatgaaaattctacaaagtaaccctatcttagagtcttttggtaatgcacagactgtacgaaataacaattcttcaagattcggtaaattcataaagatagaatttaatgaacatggtatgatcaatggtgcgcatatcgagtggtaccttttagagaaatcaagaattgttcatcaaaattcgaaagaaagaaattatcatatattttaccaactattatccggtttagacgattctgagttgaaaaatctacgccttaaatctaggaacgtaaaagattacaaaattttatccaactctaaccaggatattataccaggaatcaacgacgtagagaattttaaagaattgctctcggcattgaatattattgggttttcaaaagatcaaataagatggatatttcaagtagtggcaattattttattaatcggtaacattgagttcgtatcagacagagcagaacaagcatctttcaaaaatgatgttagcgcaatttgtagcaatttaggcgtggacgaaaaagatttccaaactgccatattaaggcctagatcaaaagccggaaaagagtgggtttcacagtccaaaaactcccaacaagctaagttcatcctaaatgccttatcaagaaatctttatgagcggttgttcggatatattgtggatatgattaataaaaacttggatcatgggagtgcaactttgaattacattggattgttggatattgctggttttgaaatattcgaaaataattcctttgaacaattatgcatcaactatacgaatgaaaaattacagcagttctttaataaccatatgtttgttttagaacagagcgaatatctaaaggaaaacattcagtgggattatatagattacggaaaagatttgcaactgacgattgatttgatcgaaagcaaggggccaccgaccggtgtactaccgttattggatgaggaagccgttttgcccaaatccactgatgagtcattctactctaaactgatctcaacttgggaccaaaactcttcaaagtttaaacgttcaagattaaaaaatgggttcattttgaaacactatgctggggatgtggaatacactgtggaaggctggttatccaaaaacaaagatcctttaaacgataatctcttgtctttgttgtcttcttcacaaaacgatatcatttcaaaactgttccagccagagggcgaaaaatcttctagtgctggtgtggaagccaacatctccaaccaagaagttaagaaatcagctaggacaagtaccttcaagactacatcatcacgccatagagaacagcagataacattactaaatcaactagcttctacccacccacattttgttcgttgtataattccaaacaacgtgaaaaaagcgaaaacatttaacagaaggttaatcttagatcaattacgttgtaatggtgtgctagagggtattagacttgccagagaaggttacccaaataggatagcattccaagaatttttccagcggtatagggtcttgtatcctgaaaattcaaccaccacgactttcagttctaaattaaaagccagtaccaaacaaaactgtgagtttcttctaacgtctttgcaactggatacaaaagtttataaaattggtaatactaaattgtttttcaaagctggagtattggcagatttggaaaaacaaaaagatgttaagctgaataatattatgattaaactaacagcaactatacgaggttacacagtaagaaaagaaataacgtaccatctacaaaaattaaagaaaacaagggtgattggtaataccttcagattatacaatagactggtgaaggaagatccttggtttaatttatttatcaggatcaagccacttttaatatcatccaatgacatgaccagaaccaaaaaattcaacgagcaaattaataaactgaagaacgaccttcaagaaatggaatctaagaagaagtttttggaagaaaagaaccaaaaaactgtcaatgagttggaaaatacgcaggacttgctaaatcaggagaaagagaatttaagaaaaaatgagagcttattaaatagagttaaaaccagctcagaaacattacaaaaacaattcgatgaccttgtttctgaaaaggatgaaattagcagggaaaaactagaagttgcgcaaaatcttgaagaagctcatcaaaaaatccaaggccttcaagaaactattagagaacgggaggcgaccttagagaaattacactcaaaaaataacgaactaataaagcaaatatcagacttgaactgtgatatttctaaggaacagagctcccagtcattgatcaaagaatctaaattgaagctggaaaacgaaataaagagattaaaagatgtcataaactcgaaagaggaagaaataaaatcgttcaacgataagttaagttcctcagaagaagatcttgacataaaattggtcactttagagaaaaattgtaacattgcgatgtcaagactacaatcccttgtaacagaaaattcagatttgcgttcgaaaaatgagaatttcaagaaagaaaaggcagcactgaataaccagttgaaaaataatgaaagtgaactgttaaagatgaaagaaaaaattgataatcacaaaaaagagcttgctactttttccaagcaaagagatgacgcagttagtgaacatggtaaaattactgctgaactaaaagagacaagaatccaacttaccgagtataaatctaactatcaaaagattaaagaagaatattccaacttccaaagagaaacgaaggaacaggagcaaaagaaaagaaacagcctggttgggtctctgaacgatagtaaaattaaagaattggaagctcggttgtcacaggaaatatccttaaatcaatacttaaacaaaagaatatcaggaaattctgtagaaacgaatatttcgtctactagacgttccacatcgtattcagatgatccacttgacaaagaagatataataaaaaaatactatgaccttcaattagcgtttactgaaataactaggaatctagagaatgaaattgaagagaagaagaacttaatttctagattgagattcactgaaacaagactagcatcttcgtcttttgaggaccaaaagattaaggcacaaatgaagaaattaaaaaaattgatccaggatatggaccctagtattcctttggacagtattttaaatgagccgctaaataactgccctgacaaagagtctgatattaacaaattaatgcttgaggtcgattatttaaaaagacaattggatatcgaaacaagagctcactacgatgcagaaaatgccatatctgctttacacagtaaatttagaaagatccaagaggaaagctccctgtcatcttctgatatttacaaactgaagttcgaagccagtgaagaaagagtcaaatccttggaagacaagctaaaaaccatgcctttacgtgatcgaacaaatttacctgtcggagatattataaagaaccgtgatagcatttcaaaatatgaagaagaaattcgctattataaacttgaaaactacaagctccaagaaatattaaatgaatcaaatggaaaattgagccaactcactcttgacttgaggcaatcaaaatccaaagaagccctacttagtgaacaattagacagattacagaaagaccttgaatctacggaacgccaaaaagaactactatcatccaccataaaacagcagaaacagcaatttgaaaactgcatggacgatctgcaagggaatgaactgcggctaagagaacatattcatgcactaaaacaagctgaagaggacgtaaagaatatggcgtctatcattgaaaaattgaaaactcaaaataagcaaaaggaaaagttaatctgggagcacgaaatggaaagaaatgactcagatatgcaactacaggaaactctgctggagttgaagagagtccaagatgtaaagaaaatcctgagtgatgatttggcccatttaaaggagcgattgagcgctgtagaagatagatcccaatacacggatgagattaatagattaaaggaagaattgaactgctctttaaaagctgaaacgaacttaaaaaaagaatttgcaacccttaagtacaaactggaaacttcgactaatgattctgaagcaaaaatctccgatctgctggagcagctcgatcattatacaaaagtggtggaaatgttgaacaacgaaaaagatgctatttctcttgcagaaaaagaactttatcagaaatacgaggcactcaatactgaatgcgagtctcttaaaggcaagatagggtctttgactaaaatcaagcaggaattggaatctgacttaaatcaaaagactgatgcgctacagatatcaaacgcagcactctcaagttccacacaaaagaataaagagattactgaaaaaatcaaatatctggaggaaacactacaactgcaaatggaacaaaatttaaggaatggggagttggttaagacattacaggccagctgcaatggatataaagataagtttgatgatgagaagcagaagaatattgatttatatgaagaaaatcaaactttacaaaagctcaacaccgacttacagcttcaactaaaaaatttgcatgaaagattatcagacactactgaaaaaaacgcatggttatcaaagattcatgaattggaaaatatggtaagcctagaaacggacttgaaatatgaagaaatgaaaaagaacaagagtttggagagagcagtggaagagttacaaactaagaactcccaacaaacagatgtaatagaactagcgaataaaaatagaagcgaatttgaggaagctactttgaaatatgaggctcaaatctctgacttagaaaagtacatttctcaacaagagcttgagatgaaaaaatccattagagataattcttcttaccgcgacaaagtgcaggaaatggcccaagaaattgaattctggaaaagccgttatgaatctaccatgataggctcgaaaaatattgatagtagcaatgcacagagtaaaattttcagttaa

SEQ ID NO: 76924 - DNA, 1449 bp, Saccharomyces pastorianus
atgctaaggaacggcgttcagaggttgtactctaacatcgctagaaccgataattttaagctttcgtcactagcgaatggactgaaagtggcgacatcaaatactcctggacactttagtgccttaggcctatacatcgacgcaggatcacggtttgaaggtaggaatttgaagggttgtacacatatcttggatagactagcattcaaatcaaccgaacacgtcgagggccgagcaatggcagagacgttggagttactgggtgggaattaccagtgtacctcgtctagagaaaatttgatgtatcaggcttctgtgttcaaccaggatgtgggtaaaatgcttcaattaatgtcagaaactgtgaggttccctaagattactgagcaagaactgcaagaacagaagctgtcggcagagtatgaaatcgatgaagtttggatgaagccagaattggtattacctgagctgttgcacacagcagcatactccggagaaactttggggtcccctttaatctgccctagagagctcattccttctatttctaaatactacttattggactacagaaataaattctacaccccagaaaatactgttgcggcatttgttggtgttcctcatgaaaaggcattagagcttacagaaaagtatctcggtgactggcaatctacacaccctccgatcaccaaaaaagttgcccaatatacgggcggggaaagttgtattccaccagcaccagtgtttgggaatttaccagaattattccacatccagatcggatttgaaggtctccctatagatcatccagacatctatgctttagcaacattacaaactttacttggaggtggtggttctttcagtgctggtgggccaggaaaggggatgtattctcgtttgtatacccacgttttgaaccagtattactttgttgaaaattgtgttgcgttcaaccattcttattcggattctggtattttcggtatttcattatcttgtataccgcaggcagctcctcaagcggttgaggtaattgcacagcaaatgtataatacatttgctaataaggatttgaggttaactgaagacgaagtatccagggccaagaatcagttgaagtcttcactactaatgaacctagagtctaaactggtagaattggaagatatgggtagacaagttctcatgcatggtcgcaaaatcccagtcaacgaaatgataagtaagatcgaagatttgaagccagatgatatctcacgtgttgccgaaatgatatttacgggaaatgtaaataatgctggcaatggtaagggtagagctactgttgtaatgcaaggagacagaggatcctttggagatgtggaaaatgtactgaaggcgtatggattgggtaacagctcctcctccaaaaacgatagtcccaagaagaagggttggttttga

SEQ ID NO: 76925 - DNA, 1074 bp, Saccharomyces pastorianus
atggttcgtgccttcaaaattaaagttccagcttcttccgccaatatcggccctggttatgatgttcttggtgtcggtctttctctattcttggagttagatgtcaccatcgactccagccaagctcaggaaacaaacgacgatcccaacaactgcaagctgtcttacactaaagaaagtgaaggctattctacggtcctattgcgttctgatgctaacctgattaccaggactgcgttatatgtgttgcgttgcaacaatattagaaacttcccctccggaaccaaagttcacgtctccaacccaatcccacttggccgtggattgggttcctctggtgcagcagttgtggcaggtgttattttaggtaacgaagtggcccaattgggtttctctaagcaacgtatgttggactactgtttgatgattgaacgtcatccagacaacataaccgctgctatgatgggaggcttttgcggttcattcctaagggacttgaccccacaagaggtggaaagacgtgagattccattggctgaggtgcttccagaaccttctggtggtgaagataccggtctggttcccccattacctcccaccgatatcggtagacatgtcaaataccaatggaaccccgccattaaatgtattgcgatcatcccacagttcgagttgtccaccgccgactccagaggcgtccttccaaaagcctacccaacccaggacttggttttcaatctacaaagattggccgtcttgaccacagctttgaccatggacccacctaatgccgacttaatctaccctgctatgcaagatcgtgtccaccaaccttatagaaagacattgatcccaggtctcacggaaatcttatcatgtgtcaccccatccacataccctggcctattgggtatctgcttgtcaggtgcaggcccaactatcttggctttggccactgagaatttcgaagaaatctctcaagaaattatcaacaggttcgccaaaaacggcatcaagtgctcctggaaactactggagcctgcctacgatggtgctagcgtcgaacagcaatga

SEQ ID NO: 76926 - DNA, 642 bp, Saccharomyces pastorianus
atgaacaaggaatctaaagatgatgatatgtccttggggaagttttccttctcccacttcctatattacttggtgctaatagtagtaatagtgtacggtttgtacaagcttttcactggacatggatccgacattaatttcgggaagttcttgttaaggacatccccttatatgtgggccaatcttggtattgccctttgtgtaggcttaagtgtcgtgggggcagcatggggtattttcattactggttcatccatgattggtgccggtgtgcgtgctccaaggattaccaccaagaatttaatttccattattttctgtgaagtggttgccatttacggtctgattattgccattgtcttttcttcgaaattgactgtggctactgctgagaacatgtactcgaaatcaaacctgtacactggttattctcttttctgggcaggtatcactgtcggtgcttccaatttgatttgtggtatcgctgtcggtatcaccggtgcgactgctgccatttccgatgctgctgattccgcattgtttgttaaaattttggtcattgaaattttcgggtccattttaggtttattaggtttgattgttggtttattgatggccggtaaagcttctgaatttcagtaa

SEQ ID NO: 76927 - DNA, 2982 bp, Saccharomyces pastorianus
atggtggacgaaagtgataagaaacaacagactattgatgaacaatcgcagataagtcctgaaaagcagacaccaaataagaaggataaaaaaaaggaagaagaggagcagctatccgaagaagatgcaaagcttaaaacagatttagagctattggttgaaaggctgaaagaagacgattcatctttatatgaagcgtctttgaatgccttaaaggaatcgatcaaaaattctacgagttctatgaccgccgttcccaaacctttgaaattccttcgtccgacatatccagacctatgttctatctacgacaaatggacagatccaaacttgaaatcctctttagcggatgtcttgtccattttagccatgacatactctgaaaatggtaaacacgattcattgagatatagattactctccgacgtttctgattttgaagggtggggacatgagtacatccgtcatttagctttggagatcggtgaagtatataatgatcaagtggaaaaagatgctgaagatgaaacatcatctgatggatctaaaagcgatggatctgcggctacttccgggttcgaattttccaaggaagatactcttcgtctatgtttagacattgtcccatactttttgaaacacaacggtgaagaagacgcggtagatttgcttttggaaattgaatctattgacaagctacctcaatttgtcgatgagaataccttccaaagagtttgtcaatatatggttgcatgtgttccacttttgccacctcctgaagacgttgcctttttaaaaaccgcatattctatttatctatctcagaacgaacttacagatgcaattgctttggcagttagactaggggaagaggatatgatcagatccgttttcgatgctactagcgatccagtgatgcataaacaattagcatatattttagccgtacaaaagacatcgtttgagtatgaaggtgttcaagatataattggaaatggtaaattgtctgaacactttttatatcttgctaaagaattgaatctaactgggccaaaagtcccagaagacatttataagagccatttggataactctaaatctgtgttctcaagcgccggcctagattctgctcaacaaaatctagcttcgtcatttgtcaacgggttcttaaacttaggttattgtaacgataaattaattgtggataatgataattgggtatataaaaccaaaggtgacggtatgacttccgcggtagctagtattggatctatataccagtggaatctggatggtttgcaacaactggataagtatctctacgttgatgagccagaagttaaagctggtgcattattaggtattggtatttccgcttccggtgtgcatgatggtgaagttgaaccagctttgttacttttgcaagattatgttactaacccagacactaaaattagttcagcagctattcttggcctgggtattgcatttgctggtagcaagaatgacgaagtgttgggtttgttattaccaattgccgcatccactgacttgcctattgaaactgcagctatggcttccttagctttggctcatgttttcgttggtacttgtaatggtgacattacaacttctatcatggacaactttttagagcgtacagccatcgagttgaagaccgactgggtaaggtttttggcacttgctttaggtattctatacatgggccaaggtgaacaggtggatgatgttttagaaactattagtgctattgaacatccaatgacatcagctattgaagtattagttggttcatgtgcttatactggtacgggtgatgttttgttaattcaagatttgttacatcgtttgacccctaaaaacgtaaaaggtgaagaagatgcagatgaagaagaaactgccgaaggacagactaatagcataagtgactttttgggtgagcaagtgaatgaacctaccaagaacgaggaagctgagatcgaagtggacgaaatggaggttgatgccgaaggagaggaagttgaagttaaaacagaaataacagagaagaagaatggtgagagtttagaaggtgaagagataaaatccgaagaaaagaagggaaaatcttccgataaggatgctactacggacgggaaaaatgatgatgaggaggaagaaaaagaagcaggcatagtcgatgaacttgcttatgcagttttgggtattgctttgattgcccttggtgaagatattggcaaggaaatgtctttacgtcattttggtcatttaatgcattatggtaatgaacacatccgtcgtatggttcctttagcgatgggtattgtttccgtttctgatccacaaatgaaggtgttcgataccttaactcgtttttcacatgacgccgatttagaagtttcaatgaattcaattttcgctatgggtctatgtggtgctggtactaacaatgcaaggttagctcaactattaagacagttggcaagttattattcacgtgaacaagacgctttgtttatcaccagattagcacaagggttattgcatcttggtaaaggtactatgacaatggatgtgttcaatgatgcacatgttttgaataaggtgacattagcatcaatattaactaccgcagttggtttagtatcgccaagtttcatgttgaagcatcatcaattgttctacatgttgaatgccggtataaggccaaagtttattctagcattaaatgatgagggagagccaataaaggttaatgtgcgcgttggtcaagcagtggaaactgtcggccaagcaggcagaccaaaaaagattactggctggattacgcaatccactcctgttttactaaatcatggcgaaagagcagaactagaaactgatgaatatattagttacacaagccatattgagggcgtagtaattttaaagaagaaccctgactatcgtgaagaggagtaa

SEQ ID NO: 76928 - DNA, 885 bp, Saccharomyces pastorianus
atgactttaatggtacctttcaaacaagttgatgtattcactgagaagccctttatgggaaatccagtagcagtaataaacttcttggaaattgatgaaaatgaagtcagtcaagaagaattacaggcgattgccaactggacaaacttatcagaaacaacgtttttatttaaaccatctgataaaaagtatgattacaagttgaggatctttactccaagaagtgaattgccatttgctggtcacccaaccattggttcatgtaaggctttccttgagttcaccaaaaacaccactgcgacttctctcgtccaggaatgtaaaataggcgctgttccaataacaattaatgagggactaattagcttcaaagctccgatggctgattacgaaagtatatcgagtgagatgattgctgattatgaaaaagcgattggtttgaaattcataaagcctcctgctcttttacatactgggccagagtggatcgtggcgctagtagaagatgcagaaacttgcttcaatgcaaacccaaattttgctatgcttgcacaccagacaaaacagaatgaccatgtgggaattatcctagcaggccctaaaaaggaagccgccatcaaaaactcctacgaaatgagggcgtttgctccggtgataaacgtttatgaagatcctgtttgtggtagtggttctgtagcccttgcaagatatttgcaagaagtttataagtttgagaaaaccacggatattaccatttctgagggtggaaggttaaaaagaaatggcctaatgttagcttcaattaagaaagaagctgataatagcacttcctactatatagcaggtcatgccactaccgttattgatggtaagatcaaagtttag

SEQ ID NO: 76929 - DNA, 1449 bp, Saccharomyces pastorianus
atggctgataagatagagaggcatactttcaaggtcttcaatcaagatttcagtgtagataagaggtttcaacttatcaaagaaatagggcatggagcatacggcatagtgtgttcagcgcggtttgcagaagctgccgaagataccacagttgccatcaagaaagtgacaaacgttttttcgaagaccttactatgtaaaagatccctacgtgagctaaagcttttgagacatttcagaggccacaaaaatattacatgtctttatgatatggatattgttttttatccagacgggtctatcaatggactatatctttatgaggaacttatggaatgtgatatgcaccaaatcatcaaatccggtcaacctttgacggatgctcattatcaaagtttcacataccaaatattatgtggtttaaagtatattcattctgcagatgtcttgcatcgtgatttgaagcccggcaatttacttgtcaatgcagattgtcaattgaaaatctgtgattttgggttagctagaggttattcggagaatcctgtcgaaaacagtcaatttttgacggagtacgtggccactagatggtatagagctccggaaataatgttgagttaccaaggatataccaaggcgattgacgtatggtcagctggctgtattttagcggagtttcttggtggaaagccaatcttcaaaggaaaggattacgttaatcaattgaatcaaatattacaagttttagggacacccccagacgaaactttgagaaggattggttctaaaaatgttcaggactacatacatcaattaggtttcattccaaaagtaccttttgtcaatttatatccaaatgccaattcacaagcattagacttattggagcaaatgctcgcgtttgaccctcaaaagagaattaccgtggatgaggccctggagcatccttacttgtccatatggcatgatccagctgacgaacctgtgtgtagtgaaaaattcgaatttagttttgaatcggttaatgatatggaggacttaaaacaaatggttatacaagaagtgcaagatttcaggctgtttgtgagacaaccgctattagaagagcaaaggcaattacaattacagcagcagcaacagcagcagcaacagcaacagcaacagcagccttcagatgtggataatggcaacgccgcagcgagtgaagaaaattatccaaaacagatggccacgtctaattctgttgcgccacaacaagaatcatttggtattcactcccaaaatttgccaaggcatgatgcagatttcccacctcgacctcaagagagtatgatggagatgagacctgccactggaaataccgcagatattccgcctcagaatgataacggcacgcttctagaccttgaaaaagagctggagtttggattagatagaaaatatttttag

SEQ ID NO: 76930 - DNA, 1272 bp, Saccharomyces pastorianus
atgacaaaagcttatactatcgttatcaagctgggcagttcgtcgctcgtcgacgagagcacaaaagagccaaagttgtccatcatgacgttaatcgtcgagaccatgacgaaccttaagcgcatgggccacaaagtgatcatcgtatccagcggcggcattgccgttggtttggacgctctccacattccgcacaagcctaagcagttgtctgaagtgcaagcgattgccgctgtcggacaaggccgtctcatcgcacgctggaacatgctgttttcccagtatggcgagcaaacagcgcagatcctgctcacgcgtaacgatatactgcgttggaaccagtacaataacgcacgcaatacaatcaacgaactgctggccatgggtgtcatccctatagtcaacgaaaacgatacgctatccattagcgagatcgagttcggcgataacgacacgctttctgccattaccgctgctcttgtaggggcggatttcccgttcttgctcacagatgtggactgcctatatacagacaatccgcgcactaatccggatgctcgtcctattgttctcgtgccagagctatcagagggccttccgggcgtcaacacttccagtggttcaggctccgaggttggcacgggcggaatgcgcaccaaactcatagccgccgacctcgcctctaatgccggtatcgagactattgtgatgaagagcgaccgtccagagtacgtcccgaagatcgttgactacattcagcatcacttccgccctccgcgccatatcggaaacggcacacagcagcagtttctcgatcttcaggatacagagctcgaacagttgcgtcgctacgatgttcccatgcacaccaagttcttggctaatgacaacaaacacaagcttaagaacagggaattttggattctgcacggactcattaccaagggcgccattatcatcgacgagaacagctatgataaacttttgtcaaaggatatggctagtctgactccaaacgccgtgatcgaagtccgagacaacttccacgaacttgaatgcgttgatctcaaaataggccagcggttacccaatggcgaattggatatctcgaaggcgattcagtctgttggatgcgtccgctccaattatacgagtctggagcttgcgaagatcaagggcttacccagtgagaagattcacgatgttttgggctacagtgtgagtgaatacgtagcacatagagaaaacatcgctttccctccgcaattttga

SEQ ID NO: 76931 - DNA, 1416 bp, Saccharomyces pastorianus
atggaaagttttgaaaatttgagcataagagacagtttcactagcggaatggaacacgttgacgaggagttaggaggcctctccgacctaagtatatctaagcaggggccaactttgtcaccacagcttatcaaccgatttatgccccattttccctcgagcccatcacctctgcgaaatacattggattttagtgctgctaaagctgatgaggaagaagatgaccgaatggaaatagatgaggttgatgatacaagttttgaagaagaatataataacgagccaatcgaaactcatactgaagcgactgagaatgccgtggtggaagaaatcgaggctaccccagaagaaagacaaaagcaagagaagaatgaaagccaagaccaaagtgtagaagaggtcgagaacattgtttcaccgcatcgttcaactgtcataaaggcattattatcaccgaccgatttaggtgtggccgcagctactaaagttgaaggtgttgtgccattaccaccatcggccaatcaagatgacaatgaaagttcgaataacaacgcagagggtgaagacataatcagaaatgaagaagtcgaagatgagatcaaatcatcacttggcaaccacaagtcaagccagtacgcaaatgcgttcgattcggaaataatcaagagggaattaagatcaagatcaaaatatcaaccaattcaggtttcattcaatacacacaactacttctattcagataaggacggcattaaaacttattctcttactaaaccaaatcacaataaaatagatgaattttacgaccaaaatgaagctttcaagttgcctaaaccatggtcacccaattcacatccggcatcaagagcgtcatatgccctaatgtcatatttacagttatttctcaatgcgatcactacagtagtgatttttagttttatactctcatttatcatagcgcttcaaaaggacttgaaatccacatgggaacaaagaaaacatgaactgcagtacgaatccagaatttgtcaagagcagtacctcacaaatcgttgtaaccagacgcctggcttgccggctctgggcgaacaatgtgctatatggaaacagtgtatggacagaaataacgatatctttttccgtgcaagatcaacgttgagcgcaaaattgttcggagacattatcaactcattcatagatccattaaactggaaaacactatttgttattttttgtggtgtgataacttggtgtttcagttcgaatttcttactgggttttgtaagagccaagagctactatggcaatggcatcaaaacatatcccttgccatcttcaccgaaatcgccgacatcagaagaaacacactcatctatgacagcatctggagaggactcacacctacttaagcaatag

SEQ ID NO: 76932 - DNA, 1935 bp, Saccharomyces pastorianus
atgtccaaggtctatctgaattcagacatgattaaccatttgaactccacagttcaagcttactttaacttatggttggagaagcaaaacgcaataatgcgttctcaaccccaaattattcaagataaccaaaaactgataggcattacaacgctagttgcctcaattttcactctgtatgttttggtcaagataatctccaccccagcaaagtgttcctcgtcctataagccagtcaaattctcccttcctgcaccagaggccgctcaaaataattggaagggcaagaggtctgtttccactaacatatggaatcctgaagaaccaaactttattcaatgtcattgtcccgccacaggtcaatatctaggttcttttccatcgaaaacggaagctgacatagatgaaatggtttctaaggcaggcaaagctcaatctacttggggcaattctgatttctcaagaagattgagagttttggcttctttgcatgattatattctaaataatcaagatcttattgcgagagtagcgtgcagggattcaggaaagacaatgttagacgcatcgatgggtgaaatcttggttactttagaaaaaattcaatggactataaagcacggccaaagagcgttgcaaccttcgagacgtccgggccccactaattttttcatgaagtggtataaaggtgcagaaatccgttatgaaccactgggtgtgatcagttctatcgtttcctggaactatccattccataacttattgggtccaattattgcagcattgttcacagggaatgccattgtagtaaaatgttcagaacaagttgtctggtcttcggaatttttcgtcgagctgatccgcaaatgtttggaagcttgtgatgaagatccagatttggttcagttgtgctattgtttacctccaactgaaaatgatgattccgcaaattatttcacctctcatcctggtttcaaacatatcacttttattggcagtcagcccgtagcgcactatattctaaaatgcgctgccaaatcattgacacccgtagttgtggagcttggtggtaaggatgcgtttattgtcctagactcagctaagaatttagatgctttatcttctatcatcatgaggggtactttccaatcatccggtcaaaattgtattggtattgagagggttattgtcagtaaggaaaattatgatgatttagtcaagattttgaatgaccgtatgactgcaaatccactacgccaagggtctgatattgatcatttagaaaatgttgatatgggggcaatgatatctgacaacagattcgatgaactagaagctttggttaaagatgctgttgcaaagggagctcgtttacttcaaggtggttcccgcttcaaacatccaaagtatccacaaggtcattatttccaaccaactcttttggtggatgtcactccagaaatgaaaatagcacaaaacgaagtgtttggcccaattttagtcatgatgaaagctaagaatactgaccattgtgtacaactagccaactctgcgccatttggtctaggtggttctgtgtttggtgcggatatcaaggaatgcaattacgtcgcaaatagcctacaaactggtaatgtagccattaatgattttgctacattctatgtttgtcaattaccatttggtggtatcaatggttcaggttacggtaaatttggtggtgaagaaggtcttttgggtttgtgcaatgccaaaagtgtctgttttgatactttgccttttgtctccactcaaattccaaaaccattagactaccctattcgtaacaatgctaaggcttggaattttgtaaagagtttcatcgtaggagcttatacgaattccacatggcaaagaataaagtcactgttctctttagctaaagaagccagctag

SEQ ID NO: 76933 - DNA, 2076 bp, Saccharomyces pastorianus
atgccgtttggaatagacaacaccgacttcactgtcctggcggggctagtgcttgccgtgctactgtacgtaaagagaaactccatcaaggaactgctgatgtccgatgacggagatatcacagctgttagctcgggcaacagagacattgctcaggtggtgaccgaaaacaacaagaactacttggtgttgtatgcgtcgcagactgggactgccgaggattacgccaaaaagttttccaaggagctggtggccaagttcaacctaaacgtgatgtgcgtagatgttgagaactacgactttgagtcgctaaacgatgtgcccgtcatagtctcgatttttatctctacatatggtgaaggagacttccccgacggggcggtcaactttgaagactttatttgtaatgcggaagcgggtgcactatcgaacctgaggtataatatgtttggtctgggaaattctacttatgaattctttaatggtgccgccaagaaggccgagaagcatctctccgccgcgggcgctaccagactaggcaagctcggtgaagctgatgatggtgcaggaactacagacgaagattacatggcctggaaggactccatcctggaggttttgaaagacgaactgcatttggacgaacaggaagccaagttcacctctcaattccagtacactgtgttgaacgaaatcactgactccgtgtcgcttggtgaaccctctgctcactatttgccctcgcatcagttgaaccgcaacgcagacggcatccaattgggtcccttcgatttgtctcaaccgtttattgcacccatcgtgaaatctcgcgaactgttctcttccaatgaccgtaattgcatccactctgaatttgacttgtccggctctaacatcaagtactccactggtgaccatcttgctgtttggccttccaacccattggaaaaggtcgaacagttcttatccatattcaacctggaccctgaaaccatttttgacttgaagcccctggatcccaccgtcaaagtgcccttcccaacgccaactactattggcgctgctattaaacactatttggaaattacaggacctgtctccagacaattgttttcatctttgattcagttcgcccccaacgctgacgtcaaggaaaaattgactctgctttcgaaagacaaggaccaattcgccgtcgagataacctccaaatatttcaacatcgcagatgctctgaaatatttgtctgatggcgccaaatgggacaccgtacccatgcaattcttggtcgaatcagttccccaaatgactcctcgttactactctatctcttcctcttctctgtctgaaaagcaaaccgtccatgtcacctccattgtggaaaactttcctaacccagaattgcctgatgctcctccagttgttggtgttacgactaacttgttaagaaacattcaattggctcaaaacaatgttaacattgccgaaactaacctacctgttcactacgatttaaatggcccacgtaaacttttcgccaattacaaattgcccgtccacgttcgtcgttctaacttcagattgccttccaacccttccaccccagttatcatgatcggtccaggtaccggtgttgccccattccgtgggtttatcagagagcgtgtcgcgttcctcgaatcacaaaagaagggcggtaacaacgtttcactaggtaagcatatactgttttatggatcccgtaacactgatgatttcttgtaccaggacgaatggccagaatacgccaaaaaattggatggttcgttcgaaatggtcgtggcccattccaggttgccaaacaccaaaaaagtttatgttcaagataaattaaaggattacgaagaccaagtatttgaaatgattaacaacggtgcatttatctacgtctgtggtgatgcaaagggtatggccaagggtgtgtcaaccgcattggttggcatcttatcccgtggtaaatccattaccactgatgaagcaacagagctaatcaagatgctcaagacttcaggtagataccaagaagatgtctggtaa

SEQ ID NO: 76934 - DNA, 741 bp, Saccharomyces pastorianus
atggcagaattttcagctgatctatgtctttttgacctagatggtaccatagtgagtacaacagtggccgcagagaaagcatggaccaagttgtgttacgaatacggtgttgatccttccgagttatttaagcattctcatggtgcaagatcacaagaggttttgagaaggtttttccctaaattggatgatacagacaataaaggtgttcttgctctagaaaaagatattgctcatagttacttggacacagtaagccttattcctggtgcagagaacttactgttatcgttagatgtagatactgagactcaaaaaaagctacctgaaaggaaatgggctatcgttacctctggttctccatatttggcattttcatggttcgagacaatattgaaaaatgttggaaagcccaaagttttcattactggatttgacgtgaagaacggtaagcctgatcccgagggttactcaagagctcgtgatttattgcgtcaagatttgcaattaactggtaaacaggatctgaagtatgttgtctttgaagatgcacccgtgggcataaaggccggcaaagcaatgggcgcaattactgtgggtataacatcctcgtatgataaaagcgttttatttgacgcaggagcagattatgtagtctgtgatttgacacaggtttccgtggttaagaacaatgagaacggtatcgttatccaggtaaacaaccctttgacgagagattaa

SEQ ID NO: 76935 - DNA, 1683 bp, Saccharomyces pastorianus
atgaattggtcttttctactacagctggtaataacaatattgttaattgtactgggcgccaactggttgctaagctcttttctacttgattttaagagagatttaacaggggtggctttgtcacagcaatctagcatatccagtgttcgtaaagaaaatgaaacagcatattatcgaagcattttagtgcccacaggattcccattgacgacaggattagggctatctttaaaatacaaaataagaaatggcaatttcggtgatgtttggaatgccataatggaagtttccaagggaaaaaacataattaaatttacaggaagagaaaaaagttattcgttgagtgaacttaatggtatggccaagcgcatatttccgaaactttccaataagaatttcaaaaatatcggtatagctaattctattgctaccgtagagggttttactctctccttggcttccatgatggcctctataagaacaggttcaatacctcatttcttgccagctgttcctagacaacgactagaagatgttgatgtcctgatcatcgactcatggaagtcttttaagatgctaaacggcagcgaggattggtacaagcttattattgtttgcgatgatcctatcgaatcactacaatttgatgcgaactgtgatgttatcacttggaaagaacttatcgacggttttaccaaggatacagagtaccaatacaccccgccagatgacaactctgatgataagaaaatttttgcatacgtaacttcaccatggaatggaactaatagttttaatcaaatctgtctggtgagtaatatagcggaattcatcaaagggttccccttgggcaatgaattgaatagtaatgaatacctaaccatttcgacaaaattggcaaattctagtgcaagcctgcatatttggggaaagctttttgcagttttgctgcatggtgggtctgcatcttttatcaatcctgcaacgatagattacgagtcgttgcaagaaactacgttgctgtttaccgaaacaaaggatgttgtcaaattaattgattctaattctagaagtgggctgctgaataaaatctacttatcctgggccacgaacttactgagcgagggtatttttacgaaaattgccagaatcgagccacattctcttgaaaaattaagatgcgtttatttggcagataatgtgaaagatgctgaggttatttcgacatttcctgaaaaaattcctcagctaaaaaagactaaccggagaatcaccccaagtactgaacaattgaataaaataagagcccaattaggatcccgtgtagtcctcgagttatattgtccctacgctatcatgggacctgtggcacataccaatttttatgactatagggtttttggaaaatctgtggacgataacgttgtatgttatggaacactaagtacaacattagaaggaaaaatggtggaaacggaaacaaaccctcatttgaacatagagaagaagcagggtatgttatgtattcgtggttttagcataggtaaaccagtagagtccgatcgtttagagaaagctttgcatttagctgaaaggtttggaggaggtgaaggatggatgcctctagttggcgtttttggactatttggccaagacggttgcttatacatctataatcaatga

SEQ ID NO: 76936 - DNA, 888 bp, Saccharomyces pastorianus
atgaccattgatctagcttctatcgagaaattcctctgtgaactggctactgaaaaagtaggaccaatcatcaaatccaagtccggcactcaaaaggattatgacttgaagactggctccaggagcgttgatattgtaactgctatcgataaacaggtcgaaaagttaatttgggaatcggtaaaaacccaatatccaactttcaagtttattggagaggaaagttatgtgaaaggggagaccgtgattactgatgatcctacctttattattgatccaattgatgggactacaaactttgttcatgatttcccatttagctgtacctctcttgggctcacagtaaacaaagagcccgtagtaggcgttatatataatcctcacattaatcttctggtatccgcttctaaaggaaatgggatgagagttaacaacaaggactatgactataaatcaaaattggaatctatgggttctctaatactaaataaatccgtagtggcattacagccaggttccgctagagagggaaagaattttcagacaaaaatggccacttatgaaaaattactatcatgtgattacggttttgttcatggattcagaaatttaggatcatctgcaatgacaatggcatatattgctatggggtaccttgatagttattgggatggtggttgctattcgtgggacgtgtgtgctggatggtgtattttgaaagaggtgggcggtcgtgtagtaggtgccaatccaggtgaatggagtattgatgtcgacaataggacatatttggctgtgaggggaacaattaataacgaaagtgacgaacaaacaaaatatatcacagacttttggaactgtgttgatggccatttgaaatatgactga

SEQ ID NO: 76937 - DNA, 1545 bp, Saccharomyces pastorianus
atggttgcagaatttcaaatagcgagtgcacagtcatcggcattgacatctactgaagaagagcattgttcaataaactcagacaaagccgcaaaaccggatctggaattgaccagtgaacgaaaaaatgacggcaaacaatcgcatgaagtgaccttcaacgaggacatcgcggacccagaagatatagcacgacatatgagcaccgcccgccggtattatatttcctcgttaattacattcacatcgatggtaattacgatgatctcgtccagttggacgcttccttcaacgcacataatcgaacactttcatatttcgcacgaagtcagcactctgggaattacgctttatgtgtttgggctcggtataggacctttatttctgtctccactaagtgaactatatggacgaaggatcacatttttatacgcccttacgctcagtatcatatggcagtgtttgaccatttggtccaagaccattacgggtgtcatgtttggcagatttctatccgggttttttggttcagcctttctaagtgtggctggcggcgccattgccgatatattcgacaaagaccacattggtattcctatggcaatatacactacatcggcctttttggggccctctttaggaccaatcattggtggagccttataccatcatagttataaatggacatttatcacacttctcatcacttctggatgttgtctcgttatgatcatctttaccatacctgaaacctacaaaccaatgctgttaatacgtaaagctaagagattgaggaaagagaaaaatgatcaacggtattatgctgtcctggaagtcacccgcgaacagacttccttactttccgcaatctttctctcaaccaaaagaccctttggcctgttacttcgagaccgaatgatgggtgtgctttgcttctatactggattggaacttgccataatatatttatatttcgtagcgtttccttacgtgttcaagaaactttacaactttgggcccatggagattgcatgctcctatatcggtattatggtcggcatgatactctcggctcctacttgcttgttattccaaaaaacgtttgagtggagagtccaaagaaataatggcgtcaagactcccgaaatgagattcgagcctctgttctacggcgcctttttgaccccagttgggctcttcatttttgcattcacctgctacaagcatgtccattggattgcaccaattataggcagtgcaatttttggttcaggtgtttatttcgtctttaccggtgtttttgcgtatacagtggatgcctatagaagatatgcggcttctggaatggcttgtaacacatttgtgagatgcataatggccggtgtcttccctcttttcggactccagatgtacaagtcaatgggcgtgaattgggccggctttctcttggcaatggtgaccgtagcgatgattcctgtcccatttctgtttaccaagtacggtgcccgactgagagccaagtcgccgtatgcatgggatgattga

SEQ ID NO: 76938 - DNA, 732 bp, Saccharomyces pastorianus
atgactgtacaaattccaaaattattatttttacacggcttcttgcaaaacggtaaagttttctccgaaaaatcatctggtattagaaaattattgaagaaggctaatgtccaatgtgactatattgatgcaccagtccttttagaaaagaaggacttgccatttgaaatggatgatgaaaaatggcaagccaccctagatgcggatgttaacagagcctggttctatcacagcgaaatctctcacgaattggatatctcagaaggtttgaagtctgttgttgatcacatcaaggccaatggtccatacgacggcattgtcggtttctctcaaggtgccgcattgtcctctatcatcaccaacaagatctcagagttagttccagaccatccacaattcaaggtaagtgtagtcatttccggctattccttcaccgagccagacccagaacatcctggagaattgagaataaccgaaaaattcagagactcatttgcggtaaaaccagacatgaagaccaagatgatcttcatctatggtgcttctgaccaagccgtcccatccgtcagatccaagtacctgtacgatatatatttgaaggcgcaaaatggtaataaggaaaaggtgttggcttacgaacaccctggtggacatatggttccaaacaagaaggacattatcagaccaattgttgaacaaataacctcttccttacaagaagcttctgaataa

SEQ ID NO: 76939 - DNA, 1650 bp, Saccharomyces pastorianus
atgacgtcccaagaatatgaacctattcaatggagcgatgaatcccaaacaaataatgatagtgtcaacgatgcgtatgctgacgtgaataccactcatgagtcgcgtcgaagaacaactttgcagccaaactcaacatcccagagcatgatcggaacattgagaaaatatgctaggttcatcggtcctggtttgatggtatctgtatcgtacatggatcctggtaactatagtacagctgtagcagcgggttctgctcatcggtacaagcttttgttttctgtcttagtttctaatttcatggctgctttttggcagtacctctgcgccagattgggtgctgtcactggcctagatctggcacaaaattgtaagaaacatttgccctttggacttaacattactctttatattctggcggagatggcaattattgccacagatctggcagaagtggtaggaaccgctatttctttgaatatccttttccatatacctctcgccctaggtgtgatacttactgtggtagacgttttaattgttctgctagcttacaaacctaacggttccatgaagggtatcagaatatttgaagcttttgtttctttattggtggttcttaccgtagtttgctttactgttgaactgttttatgccaaactgggacctgccaaagaaatattttctgggttcttacccagtaaagccgtttttgaaggtgatgggttatacttaagtctggcaattctgggcgccacggtaatgcctcattcattatatttggggtcaggtgtggttcaaccaagattaagagagtatgatatcaaaaacggacattacttgccagacgcgaatgatatggataacaatcacgataattacaggccatcctatgaggccatcagtgaaactctgcactttactataacggaattactgatctcgctgttcacggtggcattatttgtcaattgtgccattcttatcgtgtctggcgctacactatacgggtccactcaaaatgctgaggaagctgacttattttctatttacaacttactctgtagtactctttccaagggagcgggaacggtattcgtgctggcattgttgttttcaggacagagtgccggtatcgtgtgtacgttgagtggacaaatggttagtgaagggttcttaaattggactgtttctccggcattgagaagatccgccacaagagcggtagccatcacgccttgtttgattttagtgcttgtagctgggcgtagcggcctctctggtgcactaaatgcttcccaagtggtactttctctcttgctgccttttgtttctgcacctttactttacttcacttcaagcaagaagattatgcgtgtacagcttaaccgtaccaaagaactttcaagaactacagacaaaaaacccgtggccgaccgaaccgaagatgatgagaccattgagctcgaagaaatgggcataggcagcagctcacaggagcgcagcttagtttctcctgctccagaatacaaagacatgagcaatggaatgatcgtcaccgtgctcgcaatcatagtatggttgattatctccggactgaacttttatatgttactgggctttactacgggcaaagaagtacacctctaa

SEQ ID NO: 76940 - DNA, 171 bp, Saccharomyces pastorianus
atgaaaagggacctaattggtccggtcaaagcattaataaagatcaacaattgctcttgcttatcaaggtgccagatctcaaggttacctcatttctttacatttcatccacattttagcacacttatttattattacaatttgaaaaattgtatcacttctgagacttag

SEQ ID NO: 76941 - DNA, 447 bp, Saccharomyces pastorianus
atgttatcaagggccatattcagaaatccagttataaatagaactttattgagagccagacctggtgcttatcatgcaactagattgactaaaaatacgtttattcaaagtaggaagtattctgacgcacatgatgaagaaacctttgaggaattcaccgcaagatacgaaaaggagtttgatgaagcctatgatttgtttgaagtgcaaagagtgctcaacaactgtttttcctatgatttagttcctgctcctgctgttattgagaaagctttgagggccgccagaagagtcaatgacttacctaccgcaattagagtatttgaggctttgaaatacaaggtggagaatgaagaccaatacaaggcctacttggatgaattgaaggatgtcagacaagaattgggcgttcccttaaaggaagagctatttccaagctcttcttaa

SEQ ID NO: 76942 - DNA, 1131 bp, Saccharomyces pastorianus
atggctaaaaagagtaactcaaagaaatctacgcctgtaagtacaccaagcaaagaaaagaagaaggttattgaaaagaaatcttccacagccattcctagggaaagagttattaaagctgtcaacgagcttataaaattcacttccaagccacaagatgaaaataatgaagaaggaaataacggtaagaaaaatctattggaagatgatgaagaagaattgaagaaagatctgcaattaatcgtagtaaataataaatcattcaccggtacttccaaatcattcaaattgaaattactaaatgtcaaacattcgttttacaagccttggaaagaagccagtgcaacagcggttaaggatttcaaagttttattaattttgaaggattctgatattaagaaagtttcagaagatgatttatttgatcaattagattcagaaggaatcaaggttgatgaaatcatttgcgggaaagacttaaagaccgtttacaaggcatatgaggctagaaacgcttttatatctcagttttctttgattttggctgacgacagtatagttacatctttgccaaaacttatgggaggcaaagcctacaacaaagtagaaactactcctatatcaattagaacacatgcaaataaggaattttccttgaccactttgacgaacaatatcaaaaaggtatacatgaatcagttgcccgttaaacttccaagaggtaccacgttgaatgtccatttgggtaatttagaatggttaaggccagaagagtttgtagataacgttgaattaatttctgaacagttaatcaaagcataccaaatcagatccatttttatcaagaccaataagtcgcccgtattgccattatactataaccaggacgttcttgatgaacttgaagctaaaaaggacaaaatcgaagaaacccacgaagatgacatggtcaccattgatggtgtacaagttcatttgtctaccttcaacaagggtttgatggaaatcgccaatccttccgaattgggttcaattttctctaaacaaattaacaatgcaaaaaagagatcttctagcgagcttgaaaaagaatctagcgagtcagaagctgtcaagaaggctaaaagttaa

SEQ ID NO: 76943 - DNA, 195 bp, Saccharomyces pastorianus
atgaatatattaaagactattcgttttatttcccagagcagcatgatttcttggtttcttcagacttgttaccgcaggggcatttgtcgtcgctgttacaccccgttgggcagctacatgatttttggcattgttcattatttttgcagctaccacattggcattggcactcatgaccttcattttggaagttaa

SEQ ID NO: 76944 - DNA, 186 bp, Saccharomyces pastorianus
atgttcagcgaattaattaacttccaaaatgaaggtcatgagtgccaatgccaatgtggtagctgcaaaaataatgaacaatgccaaaaatcatgtagctgcccaacggggtgtaacagcgacgacaaatgcccctgcggtaacaagtctgaagaaaccaagaaatcatgctgctctgggaaataa

SEQ ID NO: 76945 - DNA, 618 bp, Saccharomyces pastorianus
atgaaattcagtggcttgtggtgttggttgttattattccttagcgttaatgttattgcatctgatgtgggtgagttgattgatcaggacgacgaagtaattacacaaaaggtgtttttcgatattgaacatggtgaagagaaagttggcagaatcgttattgggttgtacggaaaggtatgtcctaagacggcgaagaacttctacaagttaagcaccaccactaattccaaaaaggggttcatcgggtccactttccatagggtgattcccaacttcatggtacagggaggggacttcacagacggcactggcgttggtggcaaatccatctatggagatactttccctgacgaaaactttactttgaagcatgatcgcaagggcagactatcgatggctaatcgtggtaaagataccaatggatctcagttcttcatcaccactacggaagaagcgtcgtggctcgatggaaagcatgtggtatttggacaggttgtggacggcatggatgtggtgaactacatacagcacgtgtccagagatgcgaatgacaaacctctcgaggcggtcaagatcgcaaaatgcggtgagtggacgcctgagctctcttcttga

SEQ ID NO: 76946 - DNA, 393 bp, Saccharomyces pastorianus
atgataccttcccggattagccacaaatttcctctattcttaaggagctcgctggccgctcctaaagctgcctatcgtttcagttcgaccatccccaaaccaagcgatcaggtacctgacgtagatgcatttctaaacaagatcggtcgaaattgcaacgaattgaaggatactttcgaaaataactggaacaaccttttccaatgggattctaagatattgaaggaaaaaggcgtgaatattcaacaaaggaaatatatactgaaacaagttcataactatcgtaacaataggccaattcatgaaattaaactgggcaagaagtcattttttggtggtgagaggaagagaaaggcatttactgctaaatggaaagctgaaaacaagcaatag

SEQ ID NO: 76947 - DNA, 945 bp, Saccharomyces pastorianus
atgactgaaggaaagaggctgcaacagatggagcttcctcaaatgaaatccatttggattgacgaggatcaggaaatggaaaaattgtatggattccaagtaaggcaacgattcatgaatggacctagtacggattccgatgaagacgccgacgaagatttaggaattgttctcgttgacagtgaaaagctggctttgccgaacaagaacaacatcaaattgccccctttgcccaattacatgacgatcaaccctaacataaattccaatcacaagtcattaactaataaaaagaagaatttcctgggcatgttcaaaaaaaaggacctgttgtcgaggagacatgggtctgccaaaaccgcaaaacagtcaagtatatctacaccatttgattttcaccatatttcgcatgctaatggtaaaagggaagacaaccctcttgagtcgcacgaagaaaaacatgatgtagaatcattagtcaaattcacgtctttggcaccgcaaccccgaccagattcaaacgtctcttctaaatattctaatgttgtgatgaacgattcgagcagaatagtgtcttcctccacaatagctacaacgatggattctcaccacgatgataacgaaaccaacaataccccaaatggcaataagcaattagactcgcctacagatttggaaatgaccttggaagacttgagaaattatacatttccttctgttcttggagatagcgtcagcgaaaagaccaatccttcctctccctctgtttcatcattttctggcaaattcaagccaagagagttgagtgcgctacatacgcccgaattaggaaattgtttcaatgtagatcagtcgctaaattcccctggtaacagaatatctgtggacgacgtgctaaaattctactatcaatgtagtgaaactagtactcctcgaaatacctga

SEQ ID NO: 76948 - DNA, 882 bp, Saccharomyces pastorianus
atgctggtagatttgaatgtaccgtggccacagaacagctatgcagacaaagttacttctcaggcggtcaacaatttaataaaaacgttatccacattgcatatgttgggatatacacacatcgccataaattttacagtaaaccacagcgagaaattccccaacgatgttaagctgttaaatcctatcgatatcaagagaaggtttggagaattgatggatcgaacagggctaaaattatacagcaggatcacgctaattatcgacgatccatcgaagggacagtctctttccaagataagccaggcctttgatattgtagcagcattgccaatcagtgaaaagggccttactttatcaactaccaatctggatattgacttgttgacctttcagtacgggtcgcgcctgcctactttccttaagcataaaagcatatgcagctgtgtgaacagaggagtaaaacttgaaattgtttatggctatgctttgcgtgacgtacaagctcggaggcagttcgtatccaatgtaagaagcgtcatcaggagttcgaggtccagaggcattgttatcggcagtggtgccatgtcaccacttgagtgccgcaacatattaggagtaacaagtctaatcaagaatttaggtcttccgagcgataggtgttcgaaggccatgggagacctagcttcactcgtcctcctaaatggccgcttaaggaataagagccacaaacagaccattgttaccggtggtggtagcggaaacggcgatgacgtggtcaacgatgttcaaggcatcgacgacgtccagaccatcaaggtagtgaaaaggagtatggatgctgaacaattaggccatgcttccaaaagacacaagccttaa

SEQ ID NO: 76949 - DNA, 1140 bp, Saccharomyces pastorianus
atgactgcaccacacagaagtactattcatattcttgggttgggtgccatgggtaccgttttggcagttgaccttttaagatttaccaatgccctagttgtgcccttatttagatcacaagaaagacttgcacaatttcagaagacaaatgggaacaacatttcgattcgcaaactttatttggaaggctcgccaatattttcttatccagtggagaaatgcgaatgccctgaaactttctctaaaaaacctattgacaacttagccgtcactacaaagacttaccaaaccaaagaagcactagctccttatttgccttatattaataaaaatacaaacttaattttgattcagaatggactgggcgttttagaactattgagagaagaaatctttacagattcaaaaaacagaccacatttatttcagggtgtcatttctcatggcgtttatcaggataaagcaggagttttcaatcatgctgggtgggctggtatgaaaattgccaaattgccttggactgaggaagaaatgattcaaaaaaaatccgtagtcgaggacgatgcagccaataactcattagtaaaattattaacagaaccaaaatttgccaaggaatttggaatagaacattccacttatcaagaaatgctctttggtcaattatttaaatttttggttaatgcatgcatgaatccagttacggctattctagattgtgtcaatggtgagatgaaggccagttgcggtccagttttcacatctattattgacgagtgtttacaaatattgagagttgcttataggccattgtttcaataccacgaaaaatacagcggtaatgaagaatacccagaaatggatgtcaatgcagtactgacaaccgataacatggtctccgaagtcactagaattggctgtgacatcaattctaggaacagtagttcaatgagacaagacactttgttcttaagagacattgaaattgagtatatcaatggctatgtcgtcaaattggctgataacttaaatctagacccaaactgctgcaaggttaataaaactatcggagaattggccactatgagattagcattgaacaggtcgagaagtatcaatggtgactggagaaaggactga

SEQ ID NO: 76950 - DNA, 336 bp, Saccharomyces pastorianus
atgttcttttttcaagggctgtatagttccatcatgtatgtatttttctatatacgtatacataccgtttttcttagagcgctctataattcaccctttacagcattaccagttttcaaatctctagcggtgactcttaaagcaccgtctttgttaatgttaaagataatttcaacaccgttagcgtttttaattcccaattccatcaacttggtacccaaagtgtatagtttttctctgacgacttcaggttcatcgtcggaccattcactttcatcgtcctcttcagcattttcttcttttggaattggctccaaagtcttttcctcgatgtga

SEQ ID NO: 76951 - DNA, 1719 bp, Saccharomyces pastorianus
atgaagtacatggtagtcagctcgcctatacaagaggttttaagattacataaatatattgagatctctactaccacaatcacagttaaaattacaaataagatgtcctctccagtgattggtatcacctttggtaacacctcttcttctattgcctacatcaacccaaagaacgatgttgatgtcattgccaacccagatggtgagcgtgccattccatccgctttatcctatgtcggtgaagatgaataccacggtggtcaagctttgcaacaattaatcagaaatcctaagaatactatcattaacttccgtgacttcattggtttgccatttgacaagtgtgatgtcagcaagtgcgctaacggtgccccagctgtcgaagttgatggcaaagttggatttgttatttcaagaggcgaaggtaaggaagaaaaacttactgtagatgaagtggtctccagacatttaaacagattaaagttagctgcggaagattacatcggttctgccgtaaaggaagctgtattgacagttccaacaaacttcagtgaagaacaaaagactgcactaaaggcttctgccgccaaaattggtctgcaaattgttcaattcatcaatgaaccttctgctgctttattagcccacgctgaacaattcccatttgaaaaagatgttaacgttgttgttgctgacttcggtggtattagatctgacgctgctgtcattgccgttcgtaacggtattttcactattttggctactgctcatgacctcagcttaggtggtgacaatttggatactgaattagtcgaatattttgctagtgagttccaaaagaagtatcaagccaatccaagaaagaacgctagatccttagccaagttaaaggctaactcttcaattaccaagaagactttgtccaacgcaacttctgccactatttccatcgattccttagctgatggtttcgactatcacgcttctatcaacagaatgaggtacgaattggtagctaacaaggtcttcgcccaattttcctctttcgttgattctgtcattgccaaggctgaattagacccattggacatcgatgctgttcttttgactggtggtgtatcatttactccaaaattaaccactaacttggaatacactttaccagaatcagtcgaaattcttggtccacagaacaagaacgcttctaacaatccaaacgaattagctgcatccggtgccgcattacaagcaagattgattagcgattacgatgctgacgaattggctgaagctttacaaccagttatcgtcaatactccacatttaaagaagcctattggtttgattggtgctaagggcgaattccacccagtattgttggctgaaacttcgttccctgtacaaaagaaattgactttgaaacaagccaagggtgatttcttgattggtgtttacgaaggtgaccatcacatcgaggaaaagactttggagccaattccaaaagaagaaaatgctgaagaggacgatgaaagtgaatggtccgacgatgaacctgaagtcgtcagagaaaaactatacactttgggtaccaagttgatggaattgggaattaaaaacgctaacggtgttgaaattatctttaacattaacaaagacggtgctttaagagtcaccgctagagatttgaaaactggtaatgctgtaaagggtgaattatag

SEQ ID NO: 76952 - DNA, 1632 bp, Saccharomyces pastorianus
atgaaaaatttaaaattaatcgatgagcatttagcaattgtacatggtatacacagaattttgacatatcttagaagcattatataccaagattctgttaagtacttcactgaatcagctataaaaatgtccaaaattgttaaaagaaaggaaaagaaggccaacgatgaattaacttctttagcagaaaagattagagcaaaagctttggaaaatcaaaagaagcttatagaagcagaaaaggaaggtggttcagagtctgattctgaagaagatgctactattgaaaagaaaaaggtttcgaaatcaaaaagcaaatccacagtgtcaacgcaaaatgaaaatactaatgaagatgaatcttttgaatcctttagcgaactgaatctggtccccgaattaattcaagcttgtaagaacttaaattattccaaacccactcccattcaatctaaggcaattcctccggcgttagaaggtcacgatataattggacttgcgcaaacaggttctggtaaaactgctgcatttgctattcccattttgaatcggttatggcatgatcaggaaccatactatgcgtgcattctagctccaacaagagaattagcacaacagatcaaagaaacatttgactcattaggatccttaatgggtgtgagatcgacatgtattgtgggtggtatgaatatgatggaccaggcgagagacctgatgagaaagccacatattatcattgctacacctggtagattaatggatcatttagagaataccaaagggttttcactgaggaaactgaaattcttggttatggatgaagctgatagattattagacatggaatttggacctgttcttgatagaattttaaagatcatcccaacccaagaaagaaccacttatcttttttccgctactatgacttccaaaattgataaattacaaagagcaagtttgacaaatcctgtgaaatgtgccgtgtcaaacaaataccaaaccgtagatacattagtgcaaacactgatggtcgttccaggtggtcttaagaacacatacctaatttatttattaaatgaatttattggaaagacgatgatcatttttacaagaaccaaggccaacgcggaaaggttgtcaggattatgcaatttgctggagtttagtgccactgcgctacatggtgatttgaatcaaaatcagagaatgggagctttggatcttttcaaggcaggtaagaggtctattctcgtggctacagatgtcgctgcgagagggttggatattccatcagtggacatagttgtaaactacgatattcctgtggattccaagtcctacattcatcgtgtgggaagaaccgcaagagctggtagatcaggaaaatctatctcactagtatcacaatacgatctggaattgatcttaagaattgaagaagttttaggtaaaaaactaccgaaggaaagtgtggacaagaacattatattgaccctaagagattccgtcgataaggctaatggggaagttgtaatggaaatgaacagaagaaacaaggagaagattgccagaggtaagggaagaagaggaagaatgatgacaagagagaatatggacatgggagaaaggtag

SEQ ID NO: 76953 - DNA, 1362 bp, Saccharomyces pastorianus
atggccaagagaagacaaaagaaaagaacacatgcacagcttacacctgagcaggaacaaggtatacctaagtcaatggtaatcagagtgggccaaacttctttggccaaccactctctgaaccaattagtaaaggacttccgccaaatcatgcaaccacatacggctataaaattgaaagagcgcaagtccaataaactgaaggatttcgttgttatgtgtggcccattaggtgttacgcatcttttcatgttcactcaatctgaaaaaacaggaaacgtctccctaaagatagctagaactccacaaggtcctactgttacttttcaagtattggactattctctgggtagagatatcaaaaaatttttgaagagacctaaatctttgaataatgatgatgtattaaatcctccattgctagtgctaaacgggttttccacatccaagagatctggtgaagacgaccaggatgtaaacgtggagaaggtcattgtttctatgtttcagaatatttttccacctctgaatcctgcgagaacttctttgaattctatcaaacgtgtatttatgatcaataaagacagggaaacaggggaaatttctatgcgccactattttattgacattcgagaagtagagatctctagaaacctaaaaaggctttataaagccaaaaataatctaagtaaaacagtgccgaatttgcatcgaaaagaagatatttcttctttgatattagatcacgacttaggcgcctatacatcagaatctgaaattgaagatgacgctatcgtgagagtagttgataatcaggacgtgaaggcaaagcattctcaaagtttgaagtcccaaagaacaccggtcgaaaagaaggataataaagagcgtgaaaaagaaacagaagaagaagatgtggaaatggaggaacctaagccttcagaaaatttgcaaccaaccccacgtaagaaagctatcaaactaactgaattaggaccaagattaactttaaaactggtcaagatagaagaaggtatttgttcaggtaaagtgttgcatcatgaatttgttcaaaaatcaagcgaagaaatcaaagccttagaaaagagacacgctgcaaaaatgaggctgaaggaacaaagaaagaaggaacaagaagaaaacattgctaaaaagaaggctgttaaagacgctaaaaagcaacgtaaattggaaagaagaaaagctagagcagcagaaggaggtgaaggtcaaggaaaagatgatgcgatgagcgatgatgagtcttcatcaagtgacagcgaacattatggtagcgtaccagaggatctagatagtgacttatttagtgaggtcgaataa

SEQ ID NO: 76954 - DNA, 1164 bp, Saccharomyces pastorianus
atgtccgatatcaacgaaaaactcccagagttactacaagacgctgtcttgaaagcatctgttcctattccagatgacttcgttaaggttcaaggtattgattactcaaagcctgaagccactaacatgagagcaactgatttaattgaagctatgaagaccatgggtttccaagctagttctgttggcactgcctgtgagattattgatagtatgagatcatggagaggtaagcatattgacgaattggatgaccatgaaaagaaaggttgcttcgatgaggaagggtaccaaaagactactatcttcatgggttatacttctaacttgatcagttccggtgtacgtgaaactttacgttatttggtgcaacacaaaatggttgatgctgtcgttacttctgctggtggtgtggaagaagatttgatcaaatgtcttgctccaacttacttgggtgaatttgctttgaaaggtaaatctttgcgtgaccaaggtatgaatcgtattggtaacttgcttgttccaaatgataactactgtaagtttgaagaatggattgtcccaattttggataagatgttggaagaacaagatgaatacgtaaagaaacatggtgctgactgtttagaggctaaccaagacgtggattcaccaatctggaccccatctaagatgatagatcgttttggtaaggaaatcaacgacgaatcctccgtattgtactgggcccacaagaataaaattccaatcttttgtccatctttgactgatggttcaatcggtgacatgttgtttttccatacttttaaagcatctccaaaacaactaagagttgacattgtaggagatatccgcaaaatcaattcaatgtccatggccgcttacagagccggtatgatcatcttgggtggtggtttgatcaagcaccacattgccaatgcttgtttgatgagaaatggtgctgattatgccgtttacattaacactggtcaagaatacgatggttccgatgcaggtgcaagacctgacgaagctgtgtcttggggtaagatcaaggctgaagccaaatccgtcaaactttttgctgatgtcaccactgttcttccattgattgttgctgctacctttgccagtggtaaaccaatcaaaaaagttaagaattga

SEQ ID NO: 76955 - DNA, 1080 bp, Saccharomyces pastorianus
atgtccgaagttatcacaattaccaagcggaacggtgccttccaaaattcatctaacctgtcctataacaacacagggatatcagatgatgaaaatgatgaagaagatatctacatgcacgatgttaactcagcttctaaaagtgagtctgattctcaaattgtgacgccaggtgagctggtcactgatgaccctatctggatgagaggtcacggtacgtattttcttgataatatgacgtattcctctgttgctggtactgtatcccgtgtcaataggctgctatcggtaattccattgaaaggtcgttatgccccagaaactggtgatcacgtcgtagggagaattgctgaagtgggtaacaagagatggaaagtagacattggcggtaagcaacatgctgtacttatgttgggctctgtgaatttaccgggtggtattctaagaagaaaatctgaaagtgatgaactacaaatgagaagcttccttaaggaaggtgacctcctgaatgcagaagttcaatcattatttcaagatggtagtgcctctttacatacaaggtctctaaagtacgggaagttaagaaacgggatgttttgccaagtcccgagttcattaatagtgagagccaagaaccatactcataatttgcccggcaacataaccgtagttctcggagtcaatggttacatatggttaaggaaaacatctcagatggacttagcgagggatacgccgtctgcaaataacagttcctcaattaaatcaactgggcccactggtgcggtatcattaaatctctccataacaagactggaagaagagtcttcatggcaaatatattcggatgaaaacgatccttccatatcgaacaacatacgacaagcaatttgccggtatgcgaacgtgatcaaagcgttagcgttctgtgaaataggcattactcaacaacgtatagtaagtgcttacgaagctagtatggtttattcaaacgtaggtgaactgattgagaaaaatgtaatggaatccataggcagtgacattcttaccgccgaaaaaatgagaggtaacggcaactaa

SEQ ID NO: 76956 - DNA, 177 bp, Saccharomyces pastorianus
atgcatttgatgtacactttgggcccagacggcaagagaatctatacattgaaaaaggtcaccgaaagtggtgaaatcacgaagtctgctcacccagctagattttctccagacgacaaatattcaagacaaagagtaactttgaagaagagatttggtttggtaccaggccaatag

SEQ ID NO: 76957 - DNA, 2991 bp, Saccharomyces pastorianus
atggaaacaattgatatacaaaatcgatcatttgttgttcgttgggtaaaatgtggccgtggcgatgtaatcaattatcagatcaagccattgaagaaatctattgaagtcggcatatacaaaaagttgaaatccagtgtagatgaccatgcttccgcagttcacattgcacctgacactaaaacattgctagactatactacgaaatctctattacataagggaagttcgagtcatattgaggagcatcacagacgttcctcacagcactctcatagttcgagcaatggatcggataataagaggaaagagagatcatattcttcactgtccattagcggcatacagcagcaatcccaggaaatacccctacgtgaaaaactctctgcgtcaggattcactttggtcaagagggtcggcaacgtttccggtaacactatggtccaaggtgatcttgaagtgaaagatacagactactattatgcatttatactggacaactcgtcttccaagaatgcaaaaaagaaaattctttttaacgcaagtgtgataaacggcgataatcaatcgatgataagcacaagatccacccctcccgcaaggcctacagctttaagcagaacatctactcaacaggatatgttatttagagtaggacaaggtcgttacttgcaaggctacctgctgaaaaaaaggagaaagagactacaaggttttaagaaaaggtttttcaccttggactttcgatatggaaccctatcgtactatttaaacgaccataatcaaacttgtaggggtgaaattgtcataagcttgtcatctgttagtgccaataagaaggacaaaataatcataattgattctggtatggaagtttgggtcttgaaggctacaactaaggaaaattggcagtcgtgggtcgatgcgttacaaacttgttttgacgatcagttcgaagataaggacacgtccactttggaagaaaatcccgacattcttgacgatgacaaggaagtaattaataaaagctcacctcaagaccacgaccacctcacgcccacggctacgaccaaaagtgcactatcacatagacagcatactcagaaagacatggatgacatatatgtcccattgcccagcgaatcttacgctactttctccatgaatctacgtttgattcaacaacgactggagcagtgtaaaaaagactcgttatcttataaaccaactactttacatcaaagatcggaggggctaaatggaacacattcgtcatcttccgtctttaccaataatagagtgtcttcattcaatcattcttcttctggtatgacgtcatctgattctttagcctctgaagaggttccttccaacaaaacatatattgagcatgctttatataaccaattggcagatcttgaagtatttgttagccggttcgttacacagggagaggttttattcaaggaccaccagatcctgtgcaagaaagcaaaagacacgagagtttctttaacttcatatcttagcgagaatgatgaattttttgatgcagaagaggaaatcagtcggggagtcattatattacctgacacagaagatgatattaataatatagtcgaggaaactccccttcttggtaaaagtgaccaaaatgagttcacaacagaggtccaattgtcgggatccgaacagatagcttcatcaagtgtggagagctatacaactaacgatgaaaatcatagccgtaaacacctcaaaaatcgtcacaaaaatcgtcgccgtggccaccctcatcatcaaaaaaccaaaagcgcccaatcctcaacagaaacatttacaagtaaggatttgtttgctctttcctatccaaagagtgttacacgccgtaatgacatacctgaagctgcagcttctccgccaagcctattatcttttttgagaaagaatgtaggcaaagatctgagctctattgccatgccagtaacctcaaatgagcctatttctattttgcagttgatatcagaaacatttgagtatgctccacttttaacgaaggctacccaacgtcctgatcctataacctttgtttctgcatttgctatttcctttctttccatatatagggataaaacaagaacgctaagaaagccttttaatcctttactggctgaaacatttgaacttatacgagaagatatggggtttaggcttatatcggaaaaggtctcacatcgtcctctagtatttgccttctttgcagagcatctcgactgggagtgtagttacactgtaacgccatcgcaaaagtttaggggtaagtctattgaattgaataacgaaggtatactgagattgaagtttaagacaactggagaactatttgaatggacgcaaccaacaactattttaaaaaatttgatagcgggtgagagatatatggagcctgtcaacgaattcgaagtacattcttcgaagggagacaaatcacacatcctgttcgataaggcaggtatgtttagtggaagatctgaaggatttaaggtttcgataatcccaccaccttcgagcaatcgcaagaaggaaactctagctggtaaatggacacagagtttagctaatgaaactacacatgaaactatatgggaagtaggtgatttagttagcaatccgaagaagaaatatggctttactaaattcaccgcaaatttgaatgagataactgaaattgaaaagggcaatttaccacctacggactcaagattaagaccagatattagagcttacgaggaggggaatgttgataaggcggaagagtggaagctgaaattggaacaacttcaacgtgaaagacgtaataaagggcaagatgtggagcctaaatatttcgaaaaagtatctaagaatgaatggaaatacataactggaccgaagagttattgggaaagaagaaagaagcatgattggtctgatatttctcaactctggtga

SEQ ID NO: 76958 - DNA, 177 bp, Saccharomyces pastorianus
atggatcggataataagaggaaagagagatcatattcttcactgtccattagcggcatacagcagcaatcccaggaaatacccctacgtgaaaaactctctgcgtcaggattcactttggtcaagagggtcggcaacgtttccggtaacactatggtccaaggtgatcttgaagtga

SEQ ID NO: 76959 - DNA, 2145 bp, Saccharomyces pastorianus
atgtcacatcttatcactttagctacatgcaacttgaatcaatgggccctagattttgaaggtaatagagaccgtatcctacagtccattaagattgccaaagagaggggtgccaggttacgtgtcggcccagaactggaaataactggctacggatgtttagatcattttttagaaaatgacgtttgccttcattcatgggaaatgtatgctcaaatcattaagaataaagaaacccatggattaatacttgacattggtatgcccgttctacacaagaatgttcgttataattgtcgtttgttatccttggatggtgagatattgttcataagacctaagatttggttagctaatgatggtaactatagggaaatgagatttttcacaccttggatgaaacctggcgtggtggaggactttatccttccacctgagattcagaaagttaccggccagagacttgtgccatttggggacgctgtgataaattcattggatacatgcattggtacagaaacttgtgaagaattgtttacacctcaatccccccacatcgccatgtctttagatggtgtggaaatcatgacaaactcatctggttctcatcatgaactgcgtaagttaaataaaaggttagacctaattttaaatgccactaaacgttgtggtggtgtttacttgtatgcaaatcaaagaggttgtgatggtgacagattatattatgatggctgtgcactaattgccatcaatggtacaattgtagcccaaggttcacaattttcgctagatgatgtggaagtagttactgctactgtggacctagaagaggtgaggagttatcgtgcagctgtcatgtctcgtggcctacaagcctccttggcagaaataaagttcaagcgtattgatattcctgtagaattggctttaatgacctccagatttgatcctacagtgtgtccaacaaaagtccgcgagcctttctatcactctcctgaggaagaaattgcactgggacctgcttgctggatgtgggattatttaagacgttgtaacggaacagggtttttccttcccttatctgggggcattgactcttgtgcaactgcaatgattgtccactctatgtgccgtttagtgaccgacgctgctcaaaatggaaatgagcaagttatcaaagacgttcgtaagataacacgtagcggcgatgattggattccagacagtccacaggatctagcctcaaaaatatttcactcctgtttcatgggtacggaaaattcatccaaggagacaagaaacagagcaaaggacctttccaatgcaattggatcttaccacgtggatttaaagatggactcattggtatccagtgtggtgtccttattcgaagtagccactggcaaaaaaccaatatacaaaatatttgggggatctcaaatcgagaacttggctttacaaaacatccaggcgcgtctaagaatggttctttcttatctttttgcgcaactgttgccgtgggttcgtggtatcccaaactcgggtggattgttagtacttggtagcgcaaatgttgatgagtgctcacgtgggtatctaacaaaatatgactgctcctccgcagatatcaaccctattgggggtatttcaaaaactgacttgaaaagattcattgcctacgcatcaaaacaatataacatgccaatcttgaatgactttttaaacgctacaccaactgcagaattagaacctatgactaaagattacgttcaatcggatgagatagatatggggatgacgtatgaagaattgggcgtgtttggttacctaagaaaggttgaaaaatgtggtccttattctatgttcttaaaacttcttcatcaatggtccccaaagttaacacctcgtcaaatatctgaaaaggtgaaaagatttttcttcttctatgccatcaacagacacaagcaaactgttttaactcctagctatcatgctgaacagtattcaccagaagacaacagatttgacttacgtcctttcttaatcaacccaagatttccatgggcttcaagaaaaattgatgaagttgtcgagcagtgtgaagcacataaaggctcaacgcttgacattatgtctattgattag

SEQ ID NO: 76960 - DNA, 1125 bp, Saccharomyces pastorianus
atgtttgcaaacgttggatttagaactttgagggtctcgagaggtcccctttatggtatgtttattgttttattcattggtgtgctaattgctaaatttgcgggacaaatgctaatcgactcagagactaacttttctcatatcataggatcctgcagtcaaatcatcagcttttccaagaggactttttactcaagtgccaagagtgggtatcaatcgaacaacagtcatggtgatgcgtatagttcaggtagccaatcaggcccgttcacctataaaaccgcggtagctttccaaccaaaagacagagacgatctgatataccaaaaactaaaggattctattagatcacctacaggagaagacaactattttgttacatcaaacaacgttcacgatatttttgccggtgtcgcagacggtgttggaggatgggctgagcatgggtatgactccagcgccatctcaagagaattgtgtaaaaaaatggacgaaataagcactgctttagcagaaaattcatccaaagaaacgcttttaacgccaaagaaaattattggtgctgcatacgcaaaaattagggatgagaaagtggtgaaggttggtgggacaacagccattgtggctcacttcccatctaatggaaaattggaagttgccaacttgggtgattcttggtgtggagtcttcagagattctaaacttgtattccagacaaagtttcaaactgttggatttaatgctccttaccaattgtcaatcattccagaagaaatgttgaaagaggccgaaagaaggggtagcaagtatattttaaacacccccagagacgctgatgaatatagcttccaattgaaaaaaaaggatattattatattggctaccgatggtgtaaccgataatattgccacagatgatattgagctttttctgaaggataacgctgcgagaacaaacgatgagttacagctattatcccagaagtttgtggacaatgttgtcagtttaagcaaggaccccaattaccccagtgtttttgcgcaagagatttccaagctaactggcaaaaactacagcggtggtaaagaagacgatataactgttgttgtcgtgagagttgactaa

SEQ ID NO: 76961 - DNA, 1659 bp, Saccharomyces pastorianus
atggaggcacttatcgtatttatagtgctttccgtatccggagcatttgcttacaaatgctcctatgaaaggctctggtttaaagtagggtctttgtttgacattatatcaacttcctcgaagaaaaatgtcattccgttggcaagcaaaatggaagttggctcgaatgaggatgtgtctagtatgggtaatttcataaataaattctacacagagtattctttaccctcacataaggtactgcaatcactgcgagtccttttttcattagcaatgatgacgtatacagtaaccatagagattattctatggcagattaaggttgctggaatggacaaggaagttactttcataacgacttgggtgtggcctctgactgcaatcatgctatccttcatactaattttatttcagccctttttcattataatatcgttactgaataaattctacaatgacaagttcgatatcgataggttgataatagtgacatgcataatcttgtccacacttattgcgctgttaagttacataaatattggaccgttccagtacacaaaaaatattctaactagattgtccatcggaggcgtcacagtcatggcttccctatctgggttagccactgtttctagtttatactacaactttttagtcatctggcacaagtttcgtaatacaccaatgtcagaccccagttttagaaacatcaacaacagcaacaataacagtaaatctctcttatggacaacagacgcctatatagaggaaaaaatccaagattatgaacacaacattgaacaaaatgtacaaatattaagaagtttagaagaagaggtcggagaaaactcaacttttaaagcagagttgatggaaaaaatcgcctggtatcaactggagcttgggaaattggaagcattattacaacagtcccctcaggtacgcacttttaagaaagcttttgaagtcgggtttatcatatactgtcttcataaactaataataactttcctgaaaagaatcccctatatcatataccactcgctcaaatatccagatgactacgattatgaaaattttagtgaaaatgcagcatccgatcctttagccattacgatagcaaatattttggatttttcgtttttcaggttcaattaccagcacgatctcgattcgttaacaaaacagatatcgttatttttgtcaatttctctctttctttgctgtctttctgctgtcaataccaccatctcctacgttgtgacccttttgcccataaagttccagattcttgcacttttcgccatgcagaatgatgacactgctaatgtacttccagagtacaccaataactcttcctataagggaaaaaagagaaactattctcaggaacaaaaaggaatatctttgataaaaaatctggtggtgtcagagttgactggcgtctacgttttggctacaacgctaatggttaggtcccatctcccttttgaagtatcacaaagattaaaggagctattgggtggaaagtttaccgtcccaaacattgtcatagattcttggtttgatgaagtctacgcttttgcatgtgtgtttacctttatttgcataagaattgcagaacgaaagctttccaccaaaaaagtcagtgttgaataa

SEQ ID NO: 76962 - DNA, 555 bp, Saccharomyces pastorianus
atggaagatatcgaaaagataaaaccatacgttaggagtttttcaaaggcgttagacgagctgaaaccagaaatagagaaactaacgtcgaagtcactggatgaacagctgttgctattatctgatgagagggctaaattagaactaattaatcgttacgcgtatgtattgagttctctgatgtttgctaatatgaaagtcctaggcgtcaaagatatgtctcctatactcggcgaactgaaaagagtaaaatcatacatggataaggctaaacaatacgataataggataaccaaatccaacgaaaaatcgcaggcagagcaagaaaaagctaagaatatcatttccaatgttttggacggtaataaaaaccaattcgagccctctataagcaggagcaactttcaagggaagcatacgaaatttgaaaacgatgaactggcagagagtacaacgactaagattattgacagtaccgatcatataaggaaagcaagtagtaagaaaagtaaaagattggataaagttggaaaaaagaaaggagggaagaagtag

SEQ ID NO: 76963 - DNA, 2067 bp, Saccharomyces pastorianus
atgaaagtccaaataaccaatagtagaacagaggaaatcttaaaagttcaagctaataatgaaaacgatgaagtcagtaaagctactccgggcgaagttgaagaatcgctaaggttaatcgacgatctaaaattctttttagccacagcgccggtaaattggcaagaaaaccaaattataaggcgatactatctgaatagtggacaaggctttgtctcttgtgtattttggaacaatctatactatattacaggtactgatattgtcaaatgttgtctttacagaatgcaaaagtttgggagagaagtagttcaaaagaaaaaatttgaagagggtattttttcagatttaagaaatctcaaatgtggtatagatgcaactttagaacaaccaaagtccgaatttttgtcgtttctattcagaaatatgtgtctgaaaacccaaaaaaagcagaaagtatttttttggttcagtgtagcacatgataagttgtttgcggatgcgttggaaagagatttaaaaagagaaagtttgaatcagccttcaacgactaagcccgttaatgagcccgccttatctttttcatatgattcctcatctgataagcctctctacgatcagttacttcaacatttagattctagaagaccatctagtacaacaaaatcagataattcgcctccaaaattagaaagcgagaattttaaggataatgagttggtaacagtaactaatcagccgcttttaggcgttggcctcatggatgacgatgcgccagaatccccctctcaaattaatgattttattcctcagaaattgattatagaacccaatactctcgaattgaatggtctcacagaagaaacgcctcatgacttacccaagaataccgctaagggcagagacgaagaagattttcctctcgactattttcctgtatctgttgaataccctacggaggaaaatgcgtttgatccgttccctccacaggcttttacgccagctgccccttccatgcctatttcctatgataacgtgaatgaaagggattctatgcccgttaattctcttcttaatagatacccctatcagttatcagtggcacccactttcccagtgccaccatcatcatcgaggcaacattttatgacaaatcgggatttttattcatctaacaataagaaggaaaaattggtatctcctagcgaccctaccagctacatgaagtatgacgaaccagttatggattttgatgaatctcggccaaatgaaaactgtacaaatgcaaaatctcacaactctggccagcaaactaaacaacaccaattatattctaacaacttccagcaatcttacccaaacggaatggttccaggatactacccaaaaatgccgtattatcccatggggggggatcctctactcgatcaagccttttatggcgcggacgattttttctttccaccagaaggatgtgataacaatatgctgtatccacaaactgcaacttcatggaatgttttgccccctcaagctatgcaaccagctccaacctatgttgggagaccatacacaccgaattatagatcgacaccaggttccgcgatgttcccatacatgcaaagttcaaattccatgcagtggaacactgctgtttcaccttatagttcgagagcaccatctacaactgctaaaaactatcctcctagcacattttattctcaaaatataaatcaatacccacggcgaagaactgtgggaatgaagtcttcacaaggaaatgttccaacaggtaataaacaatctgtgggcaagtctgcaaaaatttcaaagcctctacatattaagacaagtgcttatcagaagcaatacaaaatcaacttggaaacgaaagccaggccaagtgctggtgacgaagattctgctcatcctgataagaacaaagaaatttcgatgcctactccggattccaatactttggtggtccagtcagaagaagatggtgctcattcacttgaggtagataccaatcgaaggtccgataaaaaccttccagatgcaacctga

SEQ ID NO: 76964 - DNA, 1005 bp, Saccharomyces pastorianus
atgacaaaatcaagaaagcagaagcaaaaaaagcaggattttttgagaaaaaatttaaaagttggtaagccaaaggaaaaagcaaggaatgctaccgatacatctttcgtttccaagactatttctattagaaatcaacatttagaccaaaatccacatgatttgacaaaacggctaacgatcttaaagcatcataacatcaatgtgagaaaggaaacattaacaacattccaaaagtcaataccgtctataataaaatctcgacttatgacaccattacttactcaaagtataccgttgatttgcgatgaatcgcagcaagtacgtcagggacttattgatctcgtagatgaaataggtagtcacgatgcggagattttaaaattgcactgcaacatttttgtcttatacattaacatggcaatgacacatattgttacacaaattcaagcagattctactaaatttctctctcatctgttgaagtattgcggagatgaagtggttaggaaatcttgggtaaaacttttgaacggtgtctttggagtgctcggttggggacaggtagggaaaaatgatagcgctagcatagtgcaaacgaagaagcgaaacgccaaatatgtcactattcatctcaatgctctgtacactcttgttgaatacggatgtcaggatgaacgcgctagaagcgacggagacacggcagagactacagaggacagcggtacgctacgaaacccatatttaatcccagattatccgcagccgtttgagcacttgaaactatttaccagagaattgaaagttcaggatgctacctccagtggagtaaatgccacactactgtcattggcaacacaggatatcgatactcgaaaagcggtatttatcgaacaattcctgcctatagtacgtaagaaaatcgaagtaattatcaaggaaggtggtgaatgtggtaaaagtgcaaacaagcttaaaacgctgcttgcaaaaatctttgattga

SEQ ID NO: 76965 - DNA, 1572 bp, Saccharomyces pastorianus
atgtcctataaacaaacaacatattatcctagcaggggtaatctggtaagaaacgactcatctccgtacactaatactatttcctcagaaaccaacaatagcagtacaagcgtattgagtcttcaaggcgcatctaacgtgagtttagggaccactggtaaccaattgtacatgggcgacttggatcctacatgggataagaataccgttaggcaaatttgggcatctctgggagaagcgaatattaatgtccggatgatgtggaataatacgcttaataatgggtcgagatcatcaatgggtccaaagaataatcaaggatattgctttgttgattttccctcatctactcatgcagcaaatgcacttttaaagaatggtatgcttatacccaattttccaaataaaaaattgaaattaaactgggctacatcctcatattcaaacagcaacaattctcttaacaacgtgaagagtggtaacaactgttctatatttgttggagacttagcaccaaatgttacagagtctcaattatttgaacttttcattaacagatatgcttctacttctcatgccaaaattgtgcacgaccaggttaccgggatgtctaagggctacggttttgtaaagtttaccaattctgatgaacaacagttagctctgtcagaaatgcaaggcgtatttttaaatggtagagccataaaagtaggacccacatctggtcagcagcagcatgtcagcggtaacaacgattacaaccgtagttcttcgtcactaaacaacgaaaatgtagactcgagatttctttccaagggtcaatcatttttaagcaatggaaataataacatgggctttaagagaaaccatatgtctcaattcatttatccagtccaacagcagccgtctttaaaccacttcactgatccgaataacaccactgtgtttatcggaggattgtcatcactggtgactgaagacgaattacgtgcttatttccaaccttttggcacgatagtctatgtcaaaattccggtaggcaaaggttgcgggtttgtccagtatgttgatcggctatcggctgaggctgccattgctgggatgcaagggttccccattgcaaattcaagagttagactgtcttggggcaggtctgctaagcaaacagcgttgcttcagcaagccatgttaagtaactctttacaggttcaacaacagcaaccaggtttacagcaacctaactacggatacattccatccagtacgtgtgaagcacctgttctgccagataataatgtttcatccacgatgcttcctggatgtcaaattctgaattattctaatccatacgctaatgcgaatggattaggctcgaacaatttcagtttctacagtaataataatgctacaaatacgcaagctactagtttactggctgacactagctctatggacctctcaggcacgggtggccaacaagttatcatgcaaggaagcgaagcggttgttaacagcactaatgcaatgttaaaccgtttggaacaaggcagtaatggttttatgtttgcttga

SEQ ID NO: 76966 - DNA, 162 bp, Saccharomyces pastorianus
atgcgtttgtctctctattcatgttgtctctgtataggggcacggcgaattcctactccgtgtctcttctcctatatctttacaccaaatttggcccattttcattcccctttacgtagtagcggttttcggcctgccggtgctacgcgtttctatagctag

SEQ ID NO: 76967 - DNA, 336 bp, Saccharomyces pastorianus
atgtctactgtaaccaaatacttttacaagggtgaaaatacagatttgattgtcttcgctgcatccgaagagcttgtagacgaatatttgaaaaatccatcaattggtaagctatctgaagttgtcgaactcttcgaagttttcactcctcaggacggtaggggtgccgagggtgagttgggcgctgcctccaaggcccaagtggaaaatgagttcggtaagggcaagaagatcgaagaagttatcgatttgatattgagaaatggtaagccaaactctaccacctctagtctcaaaaccaaagggggtaacgccggaaccaaagcctacaattga

SEQ ID NO: 76968 - DNA, 888 bp, Saccharomyces pastorianus
atggctctcggtaatgagataaacatcacaaacaagctaaagaggcaagaaatttttgctgatataaaacatgaaaaaaataaagagcgccataccatgagaagaaagagagctaaggaagagagagagaatccggagctgcgggagcagagattaaaagagaacgtaacacagacgatagagaacactagagtgtacgatgagaccattaacaaggaagtggagggagatgaagacgatttgatgagatatttcaacagcaattctaatgagccaccaaagatctttctgaccacaaatgtaaacgctaagaagagcgcttatgaatttgctaacattttaatcgaaattttaccaaacgtcacatttgtgaaaagaaaatttggctacaaattgaaggaaatatctgatatttgtataaaaaggaatttcactgacatcgtgataatcaacgaggacaagaaaaaggttactggcctaacattcatacatctgccagagggcccaactttttattttaaattatcatcatttgttgaagtgaagaaaattgtcggtcatggtagaccaactagccatattccagaattgattctaaataatttccagaccagattgggtcaaacagtaggtaggttgtttcagtccattttacctcagaatcctgatattgaaggtcgacaagttatcaccctacataatcaaagagattacattttcttcagaaggcatcggtatgtcttcaaagataatgaaagggttggtttgcaagaactgggtccacaatttaccctcaagttgaaaagattgcaaaggggtattaaggaagaaactgaatgggagcataaacctgagatggacaaagaaaagaaaaagttttatttatag

SEQ ID NO: 76969 - DNA, 618 bp, Saccharomyces pastorianus
atgagtttcagaggaggtaatagaggtggccgtggcggcttccgtggcggcttccgtggtggacgtacaggcggtgctagatcatttcaacaaggaccaccagacactgttctagaaatgggagcttttctacatccatgtgagggtgatattgtttcccgttctatcaacactaagattccatatttcaatgcgccaatatatttggaaaacaagactcaagtcggtaaagttgacgaaatattgggtccattaaacgaagtatttttcactatcaagtgtggtgacggtgtccaagcaaccagttttaaagaaggtgataaattctacattgccgctgacaaactattgcctattgaaagatttttgcctaagcctaaggtggtaggcccaccaaaaccaaaaaacaagaagaagagaagtggtgccccaggtggccgtggtggtgcttcaatgggtcgcggtggtagcagaggaggtttcagaggaggccgtggtggtagttctttcagaggaggccgtggtggcagttctttcagaggtggatctcgtggcggatcatttagaggaggatctcgtggcggatctcgtggtggtttcagaggaggtagaagataa

SEQ ID NO: 76970 - DNA, 849 bp, Saccharomyces pastorianus
atggatccaagtttagttttagagcaaacgatacaagatgtgtccaacctcccatcagaatttcgttacctcttagaggagatcggttcaaatgatttgaagctcatcgaagaaaaaaagaaatacgagcaaaaagaatcacaaatacacaaatttataagacagcaaggctcaataccgaaacatccacaggaagatgggcttgacaaagaaataaaagaatcacttttgaaatgtcagtctttgcaaagagaaaaatgcgttctggcgaacactgccttgtttctaattgctagacacttgaataagttggaaaaaaacatcgctttattggaggaagatggtgttctagcccccgtggaagaagatggagacatggatagcgctgctgaagcctctagagaaagttcagttgtgagtaacagtagcgtgaaaaagagaagagctgcatcaagctcaggatccgttccacccactttgaaaaagaaaaaaactagtcgaacatctaaactgcaaaatgaaattgacgtttcttcaagagaaaagtctgttactccagtgagcccaagcattgaaaacaagattgcaagaacaaaagaattcaaaaacagtagaaatggtaaaggccaaaacggttcccctgaaaacgaggaagaggacaaaactttatactgcttctgtcaaagagtttcgtttggagaaatggttgcatgtgatggacccaactgtaaatatgaatggtttcattatgattgtgtaaatttaaaagaacctccgaaaggaacatggtactgtcccgaatgtaaaattgagatggaaaaaaacaaactgaaaagaaaacgtaactga

SEQ ID NO: 76971 - DNA, 1932 bp, Saccharomyces pastorianus
atgttcgggatagtttatctgaagaatcgcagtttactctgcaagaaccccttttcttcttaccctcgttatggcttcatgccctcgttcgacacccagttcagcaaccaatttcgtaaattagaaattaatattggacggaaaagatacagctcaaaaaccttgaatacaaaatatactgaccaacccgaaggcccaatttatcctttggatgtactacgcctagacatctcaaaagcactgcatgatatatccggaatagaccactcgctaatactaaatgcgcttgagtcaacaaatagtatggatagaggtgatctactgctacctcttccaaagataaaagtggctgaccctgtggccgttgccaaccgatgggccattgaactaagcacgcatgggtgtattggaaaggtttgtgcaaaagggccatttcttcagttcttcctggaccagcggtatttgatacaatcaacggtaccaaatatattacttcaaaaggggaaatatggtcagaaaaaatctcgtcatcagaaaaaagttgtagtagaattttcatcaccaaatattgccaaaccattccatgcaggccatttaagatcgactataataggtggattcctttcaaacttatatgaagcaatggggtggtccgttacacgtatgaactacctaggagactggggcagacagtttggtttgttagcagtcggttttaagagatacggcgatgaaaagacgttacaaaagcagccaattcagcatttattcgacgtctacgttaaaatcaacatggaccttgccaaggaagagataaacggaaactctaagtgtgggattagcggtgaggcccgtagttttttcaaaaacttagaaaatggggatgagaatgccattaagatatggaataggtttcgctcgttatccatccaccactatatccaaacttattcacgtttgaacattaattttgatatattctccggtgaatcacaagtgtctaaagaatctatgaatgaagccttagatatatttcgcaaaaacaatcttgttaaagaaatagacggtgcccttgtcatcgatttaacccaatggtcgaaaagattgggcagagttgttgtacaaaaatcagacggaacaactttgtacttgacaagagatgtaggggcagccatagagcgtaaaaagaatctacattttgataaaatggtgtacgtgatttcctcacagcaagatttatacatgtcccagttttttatgatattaaaaaaaatgaattttgaatgggcaaaagacttgcagcatataaattttggtatggtgcagggcatgtcgaccagaaaaggaaatgtggtattcttagataccatactagacgaggcaagggataaagctctgcaaattatggaaaataacaaaatgaaaatatctcaggtggataatccacagcgtgttgcagatttaattggcgtatctgctatcattattcaagatatgaaatcaaagcgtatcaataactatgaattcaactggaacagaatgttgtctttcgaaggtgacacagggccctatttacaatacacacattccagacttagatctttagaaaggacctccagcgactttacgacggacatgctaatacgcgcagatttttcaaatttaaatgaaccacaactagttgagcttgtgaggttgctagcgcagtatccagatgtccttagacgagcattcgaaactcaagagccggccacgattgtaacatatttattcaaagtttgccatcaggtctcctcgtgctataaaaaaatatgggtttccggaaaacctgcagatattgccataccgcgactcgccgtatattcagcaagtagacaagtgttacacaatgcaatgtcgcttttgggactagtcccggttgatagaatgtaa

SEQ ID NO: 76972 - DNA, 510 bp, Saccharomyces pastorianus
atggactgtaaaatcaaagcagctggaaaaaactctggaatttttcatgaaggtggcactaaatcgtcgaagagcttcttgaccgtttttatccgaagtgtttttcctctttccccaagttttcctgcaggcgggggaatatggggccccatggaaaaaaaactgctcggggaaatatcttcttctccacagaaagagacgcaggccaggaaaaatgtggaatattatataaacattgtttttccattttgtacggattttttttggaagaaagcggataaaccgaaagaaaaaacgggaaatggttccggtttgggcattatttttcctattgggcaaaaaaaaatcccggaaccagctgactcggatatttttcttccttgtttccgctatgctgctgcaagtgactttacgaaggccaagcgtttcttggtggaaattactgcagtgtactgggtttcgttggaggcccagccttcatctgcgtcttgtttattcattctcatctga

SEQ ID NO: 76973 - DNA, 2790 bp, Saccharomyces pastorianus
atgtctcagcagaatattttggcagctagtgtttcagcgctctctcttgatgaatctactgtgcatacgggcggagcatcttccaaaaaaagtagaagacctcacagagcatatcataacttttcctcgggcactgttcctactttgggcaattcaccctacactacaccccaattgaatcagcaggatggttttcaacaacctcaagcctttacccctaagcaatttggtggcttcaacaacggttcgggttccgttttgtccacgcctgtaatggtgagtcaagagcgattcggtgcgagtgaggcctcctcgccatatggtcaatctatgcttgatatgacagcgcctcaacctacatctcacattgttccaactcaaagatttgaagatcaagctcaatatttacaacgatctttcgaaacttgtagagattctgttccgcccttgccgaccacccagttttattgtgttgaccaaggttcatgtgatccgcacttgatgagtttatccatgtacaacatccccgaaagtgaacacttgagagccgccacgaagctaccacttggattaaccatccaaccattttccactttgacaccgaatgatacagaagttcccacaattccattaccaatggatggtacgcctttgcgttgtagacgttgtcgtgcgtatgctaatcctaaatttcagttcacttatgattcaagtgttatttgtaatatttgtagagttaagatgcaagttccaggtgagcattttgcgcccatgggtcccaatgggcaacgaagtgatttgaacgaaaaatcagagttattgcacggaacagtcgatttcttggtgccaagtatttacaatgctattcaggagaaggagcctttaccactacactacgtgtttttgattgatgtttcattgttagctaatgagaacggaagttctttagccatggtggaaggtgtcaggtcatgtattgagtatatttcagatttccagccaaattgtgaggttgctataatcgtttatgataataagttgcggttctttaatttgagaccagatttagataatgcacaagagtacattgtaagtgaattggacgatgttttcttaccattttataatggattatttgttaaacccagaaactcgatgaaaatcattaatgacacattgataaaaattagtggttacatctccaccgacaagtatagtcacgtaccccaagtctgttatggttctgctttacaagccgcaaaattagcgttagacacagtaactggcgggcaaggtggtaagattatttgttctttgaacagcttgccaacgatcggcaacgggaatttatcgctaaaaagggacaatgcacacattgctcatgttaaatgcgacaatgggttctataagaaattagcatcggattttttgaaatcctacatttctttagatttatatgtgaccaatgcgggattcattgatatggccactgtgggccatcctgtagagatgacttccggtattgtgaaatattatccccactttcaacaagagacggatgccttcactttggttaacgacatggttacaaatgtctccaatattgttggttatcaagctttattgaaagttcgctgttctactgggctatctgtggaacagtactactgcgattcatctgataatacggatcatgatccaattattcctgtattgactagagataccaccttagatgtcttactaaaatatgacagtaaaataaaaacaggaaccgatgttcatttccaaactgcattgttatatactgatattgatggtgtcagaaaagttcgttctattaacacgtcaggtgcggtatctaataacattcgtgaaattttcaagtttataaatcaaaatcctgtcatgagaataatgatcaaagatgtcataaagacgctcggtgattgtgactttgtaaagatcagaagattaattgatgacaagatggtccaaatcttgacccaatatagaggattggttagcagtaactcatcaacgcaattgatactgccggattctataaagacattgcctgcttacatgttagcatttgaaaaaagcgaattaatgaagccaaacgctcaaagtacccgtggtaatgaacgaatttatgatttattgaagtacgattcattgaactcagcacaactttgctacaaactttatccacaaattgtgccattccatgtattattagaggaaactgatctgaccttttacgatgctaatgataaattattacagatcaactccagctctattaataatctatctgtaagagcctcacactctaatttcattaacggcggttgctacttgattttccaaggtgatactatctatctatggtttaatgagaacaccaatagaatgctcttgcaagacctgctgtcagtggatgaatccttgcccgtcagccaaatttcgttatttagtggaacattgcctgagacgggcactagtattaatcaaaaggcttcaaacgtcattaaaaactggcaacaagtagtcaacaagtcatcattgccgttagtcttgttgaggcctaatgttgatcaatattacagtaatgtgatgagtcaattgctttgcgaggacaagaccgtcaacagaatcgaatcatatgacaattacttggtgataatgcataaaaaaattcaagaaaagcttcaaaaagacgatttcattaaagtctcgactgccgcaactcacgaaaatatccatcaaaaatttgtgcagttttga

SEQ ID NO: 76974 - DNA, 558 bp, Saccharomyces pastorianus
atgaacatcagtggcaccttaaatacgctccggttgctttataacccatcattgtgtaaacctagtctagttgtccccacttttaacgatcttcctataccaatccacgattctataaaggccgtggtcttggataaggacaactgcatcgccttccctcatgatgacaaaatatggccagattacttgcaacactgggaaaccttaaggtcgaaatactctaacaaagcactcttgattgttagcaataccgccggttccaattctgataaggactattcgcaagcaaaacttttggaagataagacaggtatacctgttttgcggcactctacaaagaaaccaggttgtcacaacgaaatattagattatttttatagaaacaaaaccataacaaatccaaaagaggttgctgttgttggagataggctttttactgacatcttgatggcaaacctaatgggttcatacggggtgtggattcgagatggtgttaaagtttcggcaaatcctctctccaagttcgaaaaaaaattatacaactttttgggattttga

SEQ ID NO: 76975 - DNA, 984 bp, Saccharomyces pastorianus
atgtcttcactggttactcttaataacggtctgaaaatgcccctagtcggcttagggtgctggaaaattgacaaaaaagtctgtgcgaatcaaatttatgaagctatcaaattaggctaccgtttattcgatggtgcttgcgactacggcaacgaaaaggaagttggtgaaggtatcaggaaagccatctccgaaggtcttgtttctagaaaggatatatttgttgtttcaaagttatggaacaattttcaccatcctgatcatgtaaaattagctttaaagaagaccttaagcgatatgggacttgattatttagacctgtattatattcacttcccaatcgccttcaaatatgttccatttgaagagaaataccctccaggattctatacgggcgcagatgacgagaagaaaggtcacatcaccgaagcacatgtaccaatcatagatacgtaccgggctctggaagaatgtgttgatgaaggcttgattaagtctattggtgtttccaactttcagggaagcttgattcaagatttattacgtggttgtagaatcaagcccgtggctttgcaaattgaacaccatccttatttgactcaagaacacctagttgagttttgtaaattacacgatatccaagtagttgcttactcctccttcggtcctcaatcattcattgagatggacttacagttggcaaaaaccacgccaactctgttcgagaatgatgtaatcaagaaggtctcacaaaaccatccaggcagtaccacttcccaagtattgcttagatgggcaactcagagaggcattgccgtcattccaaaatcttccaagaaggaaaggttacttggcaacctagaaatcgaaaaaaagttcactttaacggagcaagaattgaaggatatttctgcactaaatgccaacatcagatttaatgatccatggacctggttggatggtaaattccccacttttgcctga

SEQ ID NO: 76976 - DNA, 645 bp, Saccharomyces pastorianus
atgagcgacaagatatcctttctacctcccgaacccatccaactacttgacgaagactccacggagcctgaactcgacattgactcacaacaagaaaatgagggacccatcagtgcgtcaaacagcaatgatagcactagccatagtaatgattgcggtgccacaattaccagaacaagacctagacgaagcagttctatcaatgcaaactttagttttcaaaaggctcatgtcagcgattgcaccatagtcaatggcgaccatggaacaaagtttgctgtctggagaattaccgtatttcttgaacccaacttgaaggcttttgcggccaagggggaaagctataaaatccaaacctataaacgatactccgatttcgtcagattacgagagaatttgctcacaagaatcaagacagcgaaacctgagaaacttaactgtttgcagattccacaccttcccccttcagtgcagtggtacagttcttggaaatatcaagaagtgaatctgaacagggactggctggcaaaaagacagagagggctcgagtacttcctcaatcacatcatccttaacagcagcctcgtagaaatgaccaaagatatactcatacagtttctagagccttcaaaacgagttgcatag

SEQ ID NO: 76977 - DNA, 1029 bp, Saccharomyces pastorianus
atgataaaacatatagtttcgccattcaggacgaattttgttggcatcagcaagtccgtgctgtcaaggatgattcatcacaaggttacaatcataggttctggccccgctgcccacaccgctgctatatacttggcaagagcagagatgaagcccacattatatgagggaatgatggccaacggaattgctgctggtggccaattgacaacaaccaccgatatcgaaaatttcccagggtttcctgaatcgttgagtggcagtgaactgatggagaggatgaggaaacaatctgccaagtttggcactaacataattaccgagactgtctctaaagtcgatttatcttcaaaaccattcagattatggaccgaatttaatgaggatgcagagcctgtgaccactgatgctataatcttggccacgggtgcttccgctaagagaatgcatttaccaggggaggaaacctactggcagcagggaatatctgcctgtgctgtatgtgatggtgcagtccctatctttagaaacaagccattggccgttattggtggtggtgactctgcgtgtgaggaagcggaatttcttacgaagtatgcgtcgaaagtatatatattagtaagaaaggatcattttcgtgcatctgtaataatgcagagacgaattgagaaaaatccaaacatcattgttttgttcaacacagttgcattagaagctaagggtgatggtaagttattgaatatgttgagaattaagaatactaaaagtaatgtggagaacgatttagaagtaaatggactattttacgcaataggtcacagccctgccacagatatagttaaaggacaagtagatgaagaagagacggggtatataaaaactgtgcctggatcgtctctgacttctgtgccaggtttttttgctgcaggtgacgttcaggactctaggtatagacaagcagttacttctgctggttccggatgcattgctgctttggatgcagaacggtacctaagtgcccaagagtaa

SEQ ID NO: 76978 - DNA, 1224 bp, Saccharomyces pastorianus
atgagtgctgccactgcgactgctgcccctgttcctcctcctgtagggatatccaatcttcccaaccagcgttataaaattgttaatgaagaaggtggtacattcaccgtgatgttatgtggtgagagcggattgggtaaaactacatttattaataccttatttcagactgtcttgaaaagggcagatggtcagcaacaccgccaagaacccatcagaaagactgtagaaatcgacatcacaagagctttgctggaagagaagcatttcgaattacgcgttaatgtcatcgacaccccaggttttggagataacgtgaataacaacaaagcctggcaaccattggtggattttattgatgatcaacacgattcttatatgcgtcaagagcagcaaccgtaccgtactaagaaatttgacttgagagttcatgccgttctgtacttcatcaggcccactggacatggtttaaagccaattgacattgagactatgaagagattgtcaaccagagccaatctgattccagttattgcgaaagctgatacattgactgcccaagaattacaacagttcaagtccagaatcaggcaagtaatagaagctcaagaaattcgtattttcacgcctccattagacgctgattctaaggaagatgccaaaagtggcagtaattcagattctgccgctgttgaacatgcaagacagttgatagaagcaatgccatttgccatagtagggtctgaaaaaaaatttgacaatgggcaaggcactcaggtagttgcaaggaagtatccttggggacttgtggaaatcgaaaacgattctcattgtgatttccgtaagctcagagccctgttactgaggacttatctattagatttgatttctaccacccaagaaatgcattacgaaacatacagaagattaagacttgaaggtcacgagaacaccggggaggggaatgaagatttcactcttccagcaattgcaccagcaaggaaattgtcacacaatcctagatacaaagaagaagaaaatgcattgaagaagtatttcactgaccaagtcaaagctgaggagcaaagatttagacaatgggagcaaaacattgttaacgaaagaatcagactgaacggtgacttggaagaaattcaaggaaaggtaaaaaaactagaagagcaggtcaaaagcttgcaagtaaaaaaatcccatttaaaatga

SEQ ID NO: 76979 - DNA, 1758 bp, Saccharomyces pastorianus
atgtcccatccgcactcacatagcatatatttgtctgagttgcccgtcaggaaacctcaagccttgggcaatcctcttttgaggaagattcaaagagcttgcagaatgtcacttgctgaaccagacttggcgttgaatcttgacattgctgactacattaatgaaaaacagggcgctgcccctagggatgctgccattgcacttgctaaactgatcaacaatagagaatcgcacgtggcaatattcgcgttatctctattagacgtgcttgtcaagaattgtggatacccattccacttgcaaatttctagaaaggaatttttgaatgaactggtcaagagatttccaggtcacccaccattacgttattctaagattcagagattgattttaactgctattgaagaatggtatcaaacaatttgtaaacactcaagctacaagaatgatatgggttatattagagacatgcaccgtttgttgaaatataagggttatgcattccccaaaatcagtgaatccgacctagcagttttgaagcctagtaatcaattgaagaccgctagtgaaattcaaaaggagcaggaaattgctcaagctgcaaaactcgaagaattgatcaggtgtggtaaacctgaagatttgagggaagctaacaaattaatgaaaatcatggcagggttcaaagaagacaatgccgttcaagctaaacaggctatttccagtgaattaaacaaattgaagcgtaaagccgatttgctaaatgaaatgctggaatcacctgactcacaaaactgggataacgaaactacacaagaacttcacagtgcattaaaggtagctcaaccaaaatttcaaaagatcattgaggaagaacaggaagacgatgcgttagtgcaggatctattgaagtttaatgatacagttaatcaactattggaaaaattcaacttattgaaaaacggtgactccaacgctgcttcgcagatacacccaagtcatgtttctgctccgttacaacaatcttctggtgctttaacgaatgaaatcaacttaattgatttcaatgatttggacgaagcgccctctcaaggcaacaacaataccaacggcacgggtacaccagcagcagcggaaacatctgtcaatgacttattgggcgatttgaccgatttatctatttcgaacccttcaaccgctaaccaagcatcctttggtctgggaggcgatatcgtgttggggtcctctcaacccgcaccaccagttactactactaacaactcgaacaacactttagatcttttgggactttcaactcctcaatcgccaaccaattcccaagcagtaaacagtagtgggttcgatcttttgatgggatttaatccaacaacaggtactactactgcgcccgcaagaaccctagtcaatcagtctcctaacttgaagattgagttcgaaatatctagggagtcaaactcagttataaggataaaatcgttctttacaaacttaagttcgtcaccgatctccaacttagtgttcttattagcagtccctaagtcaatgtctttgaaattgcaaccccaatcgagtaactttatgattggcaacgctaaagatggtatctctcaagaaggtacaattgaaaatgcgccagctaacccttcaaaggctttgaaagtcaagtggaaggtcaactattctgtcaactccacccaagctgaagaaactgctgtttttacgttacctaatgtataa

SEQ ID NO: 76980 - DNA, 1758 bp, Saccharomyces pastorianus
atggaggaagtgttccgtttttactcgaactctagaaatatcttcattcataaaagcctttcattaaaaccatccaccattgatgaccccaaaagtggatatggccttttcgtagaaccttcgaagttcaagaatgatgcattgaaaagtgaaactatccaattgctccgaatccctaagcgctgcacgtttaatataaacacacttctggctctcttgggagatgaggacgaattttcttcaaaggaagaatttcaaagaactaatgacaaaattaagattgctcttcgtgaaataatggctcatccgaatttcagtgcgttcctgacagaaacaaatttactcataatttatttcatgatatttcaaactattcgtagtcgttatgagattcccgaaaatatccaatattatttagaaaatgttttaatgagcattgaagtagaaacagccatggattctattgaaaacttagctactgattatggacattatccacagatttttggccttcgagagacgctaaatttatttaaagaactgtttcacgacgtcttgaatttaagtgatatcaaacatctttattctgcaataatttcacgttgtttagagataccagaaagggccgataccaaaagtgaagaattcacggtccattctactttagtccctattgtagattttgccaaccatgaaggcacccaaaaaaatgcttattttgacatcgacccttcaaataatgacgttttacttctattggatacaaaagcggtccaaagtgaactcacaaaacctattgaagttttcattagttactcaccaacagaggatttattttccatgcttgtaacatatggattcaccccagattttagagggaattcccaattttggactgtatcctttgacaggtgcttcttaagaaactatgatggaccagataaaactacaaatttaagattgttttacaaatggatgcacataaatccagtggtaccactagttaaatacgagcacaacggaaagactcgctggtttctcaatgacaccacgcctgaatttgatatgcttttgctcccattcattccatcgatagatgatggcaaaattgctcggtgggcgtacgattccacatgtcatttgatgttcacgaaaatccattgtctgataaatcccgaggccaacgaacatgcgttaatgattgcagaaaactaccgctctctcattaaagagaaagagtcaaatggtgacgatttcataaatttaccgccactagcttggtcattgcgttacaaagatacagaaaacgattgtgtacggcaaagacatatgtgcagtgaagatgcggtcgctgtacttaaacaagaagaaatgcaagactcaactaaaaccaaatcccagtttaccagtttctttcgtaaatttttagagtttcgcagatccaaaattattaggcctaccagtgattcaaaagttgcaagcatattataccagcaggaactggaaataattgctgacttagcaaaagctatcgatagcagctctaccatttttttcagcgatctgaatgttacattggacaccgaaccagaacggctcccccctctaaggtttttagatgattacatagagatctctgcggataagcaggagccaagcccaatttgtgaggatctttcttattatacacccagcaggtttactgatttttttcaagaagaggtaagccaatatgcggctttctttcaggatgactag

SEQ ID NO: 76981 - DNA, 639 bp, Saccharomyces pastorianus
atgaaatataatatagtgcatggaatttgcctattatttgctattacccaagctgtaggggctgtccatttttatgcgaagtccggggaaaccaaatgcttctatgaacacttatcccggggaaacctactgattggggatttagacctatatgtagaaaaggatggtctgtttgaagaggaccctgaatccagtctgacaataactgtcgatgaaacattcgataacgaccatcgtgtcctaaatcaaaaaaactcacacacaggtgatgttacttttacagctttagacacaggtgaacatagattttgcttcactccattctacagcaagaaatcagccacactaagagtattcatcgaactagaaattggcaatgttgaagcgcttgacagcaagaaaaaagaagatatgaattcacttaaggggagggtaggccagttgactcaaaggctatcttctattcgtaaggagcaagacgctatcagagaaaaagaggcagaattcagaaatcaaagtgaatcagctaacagcaagataatgacgtggtctgtgttccaacttctcatattgctgggcacctgtgccttccagctacgctatctcaagaatttctttgtcaaacagaaggtagtataa

SEQ ID NO: 76982 - DNA, 1323 bp, Saccharomyces pastorianus
atgaatgactaccatctcgaggataccacgtctgaacttgaagcattaagattggagaatgcacaattaagagagcagcttgccaagagagaagacagcagccgcgactacccattatctttggaagaataccaacgttacggaagacaaatgattgttgaagaaacaggtggtgtagcaggtcaagtcaagttgaaaaatacaaaagttttggtagttggtgctggaggtttgggatgtcccgccttgccctacttagcgggcgctggcgtgggccaaataggcatagtagataacgatgtggtggagacttccaatttgcataggcaggttcttcatgattctagcagagttggaatgttgaaatgtgagtcggccaggcaatatatcacgaaactgaacccacacattaacgtcgttacctatcccgttagattgaactccagtaatgcttttgacattttcaaaggttacaattatatattagactgcacagattctccattaacgagatacctggtgtctgatgttgcagttaatctgggaataacagtagtgtctgcatccggtttgggaacagagggccagctaactatattgaattttaacaatatagggccatgctacagatgcttttatccaacacctccgccaccaaatgccgtgacctcttgccaagaaggcggtgtgataggaccttgcattggactagttggaacaatgatggctgtagaaactttgaagcttatcctaggaatctacaccaatgaaaattttagtccctttttgatgttatattcaggtttcccacagcagagcctgcgcactttcaaaatgagaggcagacaagaaaagtgtctatgctgtggtaagaatcgaacgataacaaaagaagccatcgaaaaaggtgagatcaattacgaactgttttgtggcgcacgaaactataatgtatgcgagcctgatgagagaatcagtgtggacgcatttcagcgtatctacaaggatgatgaatttctagcaaaacatatatttcttgatgttaggccatcccatcattacgagatatctcatttccctgaagcagttaatattccaatcaaaaatctaagagatatgaacggtgatcttaagaaactgcaagaaaaacttcccagtgtagaaaaagacagtaatatagtgattctttgccgctacggtaacgactctcagctagctacaagattattgaaggataaatttgggttttctaatgtacgagacgtgagaggaggatacttcaaatacatagacgatattgatcaaaccattcctaaatattag

SEQ ID NO: 76983 - DNA, 1137 bp, Saccharomyces pastorianus
atggtggacttgtcaacagctttgattcatggcgatgataaagataacagggttactgacgtggcgcccccaattaatgtctctacaaccttccgttacgacgatgacgacctaattccatggacagagcgtgaaaacttggactttatggagaagaagcccgtatattcacggctagcgcatccaaatagcaccagattagagagtatcttctcagagatcctcgatggttatgctgtcatttattcttcagggttagctgcgttctatgcggcaatggtacattacaaccctaagaagatctttatcggacagagctaccatggtgttcgagcaattgctaacatattgacccgtaattacggtattgagcaacaccccttggaagatattgaaaaatgtgcttctgaaggtgacattgtccatctggaatctcctgtaaacccatatggtacctcttctgatatcgagagtttggcccgcagagctcatgcaaaaggcgccctgcttatagtggattccacattcgcatctcctccattgcaatacgcatggaatttcggagccgatattgtcctatactctgctactaagtactttggtggtcattctgacttgttaagtggcgtccttgtagtcaaagaggaagcaacttcccgacaactaaaagacgacagaatctacttgggtacaaacgtggcaaatttggaaagtttcatgttgttgcgatccctgagaacctacgaaatgagaataaccaaacaatcagaaaatgctacgaaattagttagatttttgtcagaacaccaatctgaatttgacaaagtattgaagacgatttaccactcttctttacaaacagaagagttcgttaaaaagcaactggtaggagggtatggtcccgtttttgctatcactttgtacaccaaagagcagtgtaaacaattacccctcaagctgaaatatttccatcatgcgacctcactgggtggaattgaatcccttgtggaatggagagcaatgactgacccatatatcgaccaaactttaataagagtatctgtgggctgtgaatccgctaatgatttgattaaggatttggcttcggccttgaaagaattgcaggatgcagcctga

SEQ ID NO: 76984 - DNA, 1902 bp, Saccharomyces pastorianus
atgagtgcagatttatcgattggtaatgaaattaaagattcatttaaggaaacccataaatgggtccaaaataacttaaaatggttgaaggacattgagcaattttatcgggaaagggctaagttagaaaaagactacagcgagagattatctcgcttatcagcagagtactttaataagaagtcttcgacctcagttcctatctcggtaggtgacacacctactaccacgccagggtccattgaagctgcaggtgtggttgcatggaatgaaattctatctcagactgatatgatttccaaggatcataatcagttatcaaccgactttgaaaatcatgtagcaaatcaattgagtggattattcactaaacttgatatgactttgagcaagataaatggatttaacaatgacatggttaataaaaaggataacatttaccacgaactggaaaaagcgaagaaggactatgatgaagcctgttccactatggaaatggcaagaaataggtataccaaggcatctaatgatagaaataaaaagaagttggatgaaaaagaaatggagatgaacaagtgtaaaaatgaatatttaatcaagatcaaccaggcaaatagaactaaggataaatactattttcaagatgttcctgaagtgctagatcttctacaagacgtaaatgaggcaaagacccttttcttaaatgatctgtggttgaaggcggcttctgtcgagaacgatctgggtgcaaatgtcagcaaaagactccaggcggcaaattctgttgtcaagcagaataaaccctctttaaacacggccatctttatcaagcacaatctaaagaattggaaagaaccacaagactttgtctataagccatctccagtatggcatgatgatgaaaaatttgctgttccctcgtcgttggaagttgaaaacttgagaataaaactggcaaaagcagaaaatgattacaattcattgcaagataaaactcaaaatgagttatccaaactgtctactttgaacaagataaagcacgaaatgaaaactaatgaagataatatcaatgccactaagttttatgatacactaaaggaatacttaaatgtcgtttcaccctttacctcacacgaaacattaaaattgcaagccgaagttcaaatcgaaagtattcagaataatgttcctgaagaatacgatttatccacagacaatattgatctttccaaaacaaagaagaaatccgggatattcagtaagttcaaacacaacatcttgaacgtcgactcgaagccttcgagtggagggagcactggtaatggcaacggaggacccttgcatataacaagtctcttcaacacatcaagaagaactaggctaggctctgcccctaacaacgctggtgaagattcagataataattctatacgcaccactagtaccaacaatacaaaaaagaccacacaaaattccagtgatgacggcaagaataaagtgttgtatgcatacgtacaacaggatgatgacgaaatcaccattacgccaggagacaaaatctctttggttgcacgcgatacgggttctggatggactaagataaataacgacaccactggggaaaccggccttgtacccaccacatatattcgcatatctagcgcggctacagttaaagcaaatgatagaggccctgcaccagaagtaccaccaccaagaaggagtacactacctgttaggacgatggaggccatatatgcctacgaagcacagggagatgatgagatttcaattgatccgggggacataattactgttatcagaggcgatgacggtagcgggtggacatatggtgaatgtgacggattgaaaggtctatttcctacaagttactgtaaatga

SEQ ID NO: 76985 - DNA, 1251 bp, Saccharomyces pastorianus
atgtctactaatactgttccctcatctcccccaaaccagacgccacctgctgcttctggcgtcgctacctctcacgatcacaccaagttcaacaatcccatcagactaccgatatccatctctctcaccattaacgatacgcctaacaataacagcaataataatagcgttagcaatggtttaggtattttgccctcgcgtacggctacttctttagtcgttgcaaataacggtagcgcaaacggcaatgttggtgctactgctgctgctgctgccactgtggagacgaatacagcccccgcggtgaacactacaaagagtatccgccatttcatatatcctccaaaccaagtcaatcagacggagttttcacttgatatacatctcccaccaaatacctcgctaccggaacggatagaccaatctactttgaaacgcagaatggacaagcacgggcttttcagcattaggctaaccccgtttatagatacttcatccacgtctgtggctaaccagggtcttttctttgaccccattatcaggactgcgggcgcaggctcgcaaattatcatcggaagatacaccgaaagagtaagagaggcaatttccaaaattccagatcagtatcatcccgtagtgttcaaatcaaaagtgatatccaggacccatgggtgtttcaaagttgatgaccaaggaaactggtttttgaaagatgtcaagtcttccagtgggacctttttgaaccaccagcgtctatcttctgcgtctaccacttctaaggactaccttttacatgacggagatatcatacagctgggtatggactttcgcggcgggacggaagagatatatcgttgtgttaagatgaaaatagaattgaacaagtcttggaaattaaaggccaatgcatttaataaagaagccttgagccgaataaaaaatctacagaaactaactactggtttagaacaagaagactgttccatttgtctaaacaaaataaaaccttgccaagccatttttatatcaccatgtgcccatagttggcattttcattgtgtaagaagattggttattatgaattatcctcaattcatgtgtccgaactgtaggacaaactgtgatttggagactaccttggaatccgaatctgaatccgaattcgaaaacgaggacgaagatgaaccagacattgaaatggatatagacatggaaataaataacaatttaggtgttcgcctagtagattga

SEQ ID NO: 76986 - DNA, 456 bp, Saccharomyces pastorianus
atggagaagcccagccccaccaggcggcaaactagtagtctctccactatctccaacggtatgaccatgaccaacgataatagggataccacaaataccaacagtggctctacaagcagcaacaattcacaaccatcttcgtcttccacgccaccagcggccagtggacccgtaacggacagaaccaaagtcaactatgtaccaaagagcgacgatccgtcgtcatttcaatactacccagacgacccggagaacccggtcaataagtataaattcgcgttaaaggctgacagtcagtactatgatccttgtgaggagtcctccaagctcagttttcagtgcctcgagcgcaacgattacgaccgatccaagtgccaagaatattttgacgcataccgcgaatgcaagaaacaatggctgacagccaggaggaaaaacagacagcagtgggaatga

SEQ ID NO: 76987 - DNA, 1308 bp, Saccharomyces pastorianus
atgtctatgcaacaagtccaacattgtgtcgcagaagtacttcgactagatccacaagaaaaaccggactggtcgagcggatatttgaagaagttgactaatgcgacatcgattttatataatacttcactgaacaaggtaatgctgaaacaagatgaagaggttgctagatgtcacatatgtgcatacatagcggcacagaaaatgaatgaaaaacacatgcctgacctttgctattatatagacagtattcccttggagccgaaaaaagccaagcatttaatgaaccttttcagacaaagtttatctaattcttcacctatgaaacaatttgcttggacaccgagccccaaaaagaacaaacgcagtccagtaaagaacggtgggaggtttacttcttctgatccgaaagagttgaggaatcaactgtttggtacaccaactaaagttaggaaaagccaaaataatgattcgttcgtaataccagaactaccccccatgcaaaccaatgaatcgccgtctattactaggagaaagttagcatttgaagaggatgaggatgaggatgaagaggaaccaggaaaggacggtttgtctttaaaaagccatagtaataagagcattactggaaccagaaatgtagattctgatgagtatgaaaaccatgaaagtgaccctacaagtgaggaagagccattaggtgtgcaaaaaagcagaagcgggagaacgaaacaaaataaggcagttggaaaaccgcaatcagaattgaagacggcaaaagccctgaggaaaaggggcagaataccaaattctttgttagtaaagaagtattgcaaaatgactactgaagaaataatacggctttgcaacgattttgaattaccaagagaagtagcatataaaattgtggatgagtacaacataaacgcgtcaagattggtttgcccatggcaattagtgtgtgggttagtattaaattgtacattcattgtatttaatgaaagaagacgcaaggatccaagaattgaccattttatagtcagtaagatgtgcagcttgatgttgacgtcaaaagtggatgatgttattgaatgtgtaaaattagtgaaggaattaattatcggtgaaaaatggttcagagatttgcaaattaggtatgatgactttgatggcatcagatacgatgaaattatatttaggaaactgggatcgatgttacaaaccaccaatattttggtcacagacgaccagtacaatatttggaagaaaagaattgaaatggatttggcattaacagaacctttataa

SEQ ID NO: 76988 - DNA, 3243 bp, Saccharomyces pastorianus
atgtcaaattactatagaagagcacacgcgtcttctggttcatacagacaaccccaggaacagcctcaatattcgcgttctggtcactatcagtattcaaacggccattctcaccaacaatattctagtcaatataatcaacgtcgacgttataaccataatgatggtacaaggcgacgctataatgacgatcgcccacatagttcaaacaatgcaagtacgcgacagtactatgctactaacaacagccaaagcggcccatatgtaaataagaaatctgacatcagtagtcggaggggcatgtctcaatcacggtattcaaatagcaatgttcacaatacattagcgtcttcgagtggatctcttcccacagaatctgctctgcttttgcaacaaagaccaccttcagttttgagatacaacacagataatttgaagtctaagtttcattattttgatcccataaaaggcgagttcttcaataaggataagatgctttcgtggaaggctacagataaagaattttctgaaacaggttattacgtagtcaaagagttacaagatggacagtttaagttcaaaataaaacacagacatccggagataaaagcatccgacccacgtaatgaaaacggtatcatgactagcggaaaagtggcaacccacagaaaatgcaggaactcactaattctattgcctcgcatatcttatgacaggtactccttagggcctcccccttcatgtgaaatagttgtctatccagcgcaagattcaacaacaaccaatatccaagacatatcaataaaaaactattttaaaaagtatggagaaatttctcattttgaagcatttaatgatcctaatagcgctttacctttgcatgtttatcttataaagtatgccagttctgatggaaaaattaatgatgcagcaaaagcagcctttagtgccgttagaaagcacgaatcttcgggttgctttatcatgggcttcaagttcgaaatgattttaaacaagcattccattttgaataatatcatttctaaatttgttgaaataaatgtcaaaaagctacagaagttacaagagaacctgaagaaggctaaagagaaagaagcagaaaacgaaaaagcaaaggaattacagggcaaagatattaccttgcccaaggaacctaaggtagacacattatctcattcgtccggaagtgaaaaaagaattccatatgatctcttgggggtagttaataacagacctgttttacatgtctccaaaatatttgttgccaaacataggttctgcgttgaggactttaaatacaagttaaggggatacagatgtgcgaaatttattgatcatccaactggtatctatattatttttaatgacattgcccatgcgcaaacatgttcgaatgcagagtcaggaaatttaacaataatgtctcggagcagaagaattcctattctaataaagtttcatctcattctccctaggttccaaaacagaactagattcaataaatctagctcatcttcaaattctacaaatgtacctataaaatacgagtccaaagaggagttcattgaagctacagcaaaacaaatattaaaagatttggaaaagactttacatgttgatattaagaagagattgattggtcctacggtatttgatgttttggaccatgcaaattttcctgaattgttagctaaaagagaactaaaggagaaagagaagagacaacagattgcatctaaaattgctgaagatgaattgaaacgtaaagaagaagccaaaagagattttgatttgtttggtttatatggtggctatgcaaaatctaataaaagaaatttaaaaaggcataattcactcgcgttggatcatacttctttaaagaggaaaaagctatccaatggtatcaaaccaatggcacatttactgaacgaagaaaccgattccaaagaaactaccccattgaacgatgaagggatcactcgcgtatcaaaagaacatgatgaagaagacgaaaatatgacatcttcatcttctgaagaagaggaagaagaagctcccgataagaaattcaagagtgagtctgagccaaccacccccgaatctgatcaccttcatggtattaagccgttagtacccgatcaaaatgggtcttctgacgtactggatgcttcttcgatgtataaacctactgctaccgaaattcccgaacctgtatatccacctgaggaatatgacttgaaatatagtcagactttatcttctatggatttgcagaatgctatcaaagatgaggaagatatgctaattttaaagcagttattgagcacatatactcctaccgtcacaacagaaacaagcgcagctctggaatataaaatttggcaatctcgccgaaaagttcttgaagaagagaaggcttccgattggcaaatagagcttaatggaactttatttgatagtgaactacaaccaggtagctcttttaaagctgaagggttcaggaaaattgcggataaattaaaaattaattacctaccccatcgtcgcagagttcaccaacctttaaatacggtgaatattcacaatgaaaggaatgagtacacacctgaactttgtcaaagagaagaatcctcgaataaagaaccttcagactcagttcctcaagaagtttcatcctctagagataatagggcatcaaatagaagatttcagcaggacatagaggcacagaaagccgcaattggtacggaatctgagctgctatcactaaatcaattaaataaaagaaaaaagccagttatgttcgctcgttcagcaattcacaactggggtttatatgctctagactctatcgcagcaaaggaaatgattatcgagtacgttggtgaaaggatcaggcaacctgtagcagaaatgagagagaaaagatatctgaaaaatgggattggatccagttacctttttagggttgatgaaaacacggttattgatgccaccaagaaaggtggtatagcccgtttcattaatcattgttgtgatccaaattgtacggcaaagattataaaggttggcgggagaaggagaattgttatctatgcactgcgtgatatcgcggcaagcgaagagttgacatatgattacaaatttgagagagaaaaggatgacgaggaaagacttccttgtttatgtggagcacctaattgtaaaggtttcttgaactga

SEQ ID NO: 76989 - DNA, 564 bp, Saccharomyces pastorianus
atgagtgtcagccttgagcaaacgctcggattcagaataaaagttacgaacgtgttggatgtagttactgaaggaagattgtattcgttcaattcatccaacaacactcttactatccaaacaacaaagaagaatcaatctccacaaaatttcaaggtgataaaatgtacattcatcaagcatttggaagtcattggtgataagccctcgtttaactcattcaaaaagcaacaaatcaaaccctcatatgtcaacgtggaaagagttgagaagcttttgaaagaaagtgtaatagcatctaaaaagaaagaactcttaaggggcaagggtgtgagtgcagagggtcagttcattttcgatcaaatcttcaagaccataggagatactaagtgggtggctaaggacatcattattcttgatgacgttaaggtgcaatctccatacaaggtcgaagatatcaaagtgctacatgagggaagtaaccaatccattacattaattcaaagaatagtggaaagaagctgggagcagctagaacaagacgatggtaggaaaggtggatag

SEQ ID NO: 76990 - DNA, 696 bp, Saccharomyces pastorianus
atgtctgagtttttgaatgaaaatcctgacattttagaggagaaccaacttcccactagaaaagaagatagtaccaaggaccttctgttaggcgggttcagcaacgaagctacgctggaaaggagaagccttttgctgaaaatagaccattctttaaagtctcaggtattgcaagatatagaggtcttagacaagcttctttccattcgaattccaccagaactgacttccgatgaggatagtttgccagcagaaagcgaggatgaatccgtagcgggtggaggaaaggaggaggaagagcctgatctcattgatgctcaagaaatatatgatttgatagctcatatttccgaccctgagcacccgttaagtctgggacaactctctgttgtaaatttggaagatattgaggttcatgattcaggaaaccagaacgaaatggctgaagtcgtgatcaaaataacaccaacaattacccattgttctctggcaacgttgatcggtctggggatacgggtcaggttagaaaggtctcttcccccaagatttagaattactattttgttgaagaaaggtactcatgatagtgagaaccaggtaaataaacaactaaatgataaggaacgtgtagcagctgcatgtgagaatgaacaactgttgggtgtagtctctaagatgttagtgacttgtaagtaa

SEQ ID NO: 76991 - DNA, 1884 bp, Saccharomyces pastorianus
atgaatgaaatggaaaacacagatccagtattacaggatgatctcgtatccaaatatgagagggaattaagcacagaacaggaagaggatacgcctgttatccttacgcagttgaatgaggatggcaccacttcgaattatttcgacaaaaggaaactaaaaattgcccctagatcaacactacagttcaaagtgggacctccatttgaattagtgagagattattgtccagtcgttgagtctcataccggaagaacactagatttacgaattattccaagaattgacagagggttcgaccatattgatgaagagtgggtaggttataaaagaaattattttaccttagtatcaacgtttgaaacggcaaattgtgatttggatacttttttaaagagcagttttgatcttctcgttgaagactcttcagtagaaagcagattaagagtgcaatatttcgctatcaaaataaaagctaagaatgatgacgacgacacggaaatcaatctcgtccagcatacagcgaaacgcgacaaaggtcctcaattttgtccttcagtatgtccgttggtgccttcccctttgccaaaacatcaaatcataagagaagcttcaaatgttcgaaatatcactaaaatgaaaaaatacgattccactttttatttgcacagagaccacgttaattatgaagaatatggagtggactctttattgttttcctatccagaagattctattcagaaagttgcccgttatgaaagagttcaatttgcttcatcaattagcgtgaagaaaccatcccaacaaaataaacactttagcttgcatgtaattttaggtgcagtggtagatccagatacctttcatggggagaatcccggaattccttatgatgaactggctttaaaaaatggatcaaaagggatgtttgtgtatttgcaagaaatgaaaacgcctcctcttattattagaggaagatcaccttctaactatgcgtcatctcagcgaataactgtgagaacaccgtcgagtgtcaattcctcacaaaacagcacaaaaagaaaaatgccatcaatggcgcagccgttaaatgaaagttgcttaaatgcaagaccttcgaaaaggcgatccaaagtggcactaggtgcaccgaactctggggcctccatctcgcctatcaaatctcgtcaatccacaccaatggaagcttcgaaggaaaatgaggatccgttcttcaggccaaataaaagggtggagactcttgaacatatccagaacaaactgggtgctttgaaaaatcaatgtccagattcctctctgaaatatccgagttcatcttcaagaggtatggaagggtgtttagaaaaggaggatttagtttattcaagtagtttttctgttaatatgaagcaaatcgaactgaaaccggcacgctcttttgaacatgagaatgttttcaaagtaggctcattagcattcaaaaaaatcaatgaattacctcatgaaaattatgatataacaatagagaagaaatcaatggaacagaattatctaagaccagagataggctcacgttctgaatgcaaaacaagctatggtaacgaactctccctttcaaatatttctttctctatactacctaattcagcagaaaattttcacttggaaactgcacttttcccagctacggaagaggatgtgccaaggacattttcaagaatattagaaacaggttcgtttcaaaattattatcaaaaaatggatgcagaaaatgcagatagggtatattcgaaaggggtcaagttgattgcaagcggtactctaccatctggtatatttaatagggaagaattgtttgaggaagatagtttctataagtattaa

SEQ ID NO: 76992 - DNA, 306 bp, Saccharomyces pastorianus
atgatcaatgtaataatgattggtagttgccaaacatttgatactatcctctgtaatatttctatgaataattatcacagcaacgttcaattatcttcaattcggcttcagtactgcatgaaatactcgctaatattttctttattctataatagcacagtgacacttaaacgtcaaacgtggcgcacattaatatacgatgtatgcatttggcttgacactgctgtaataaggaacatcatcatccatcaactagtagtcacattagtagtgtattatcacatggtgtgtaagaacattacataa

SEQ ID NO: 76993 - DNA, 732 bp, Saccharomyces pastorianus
atggctagaaatagaacaacctccaagaaaaatgttcaaagtaaacgcttaatagacagagtggttcccatggacaagattaaaaaagttggcgtagcgaaaaaaaaaaccgtagaacacactaaagaaggatttagcgttgtcaacggtaagctagtaagcagcaatgacgtcggtgtactgttaagagaagcacagggtgctatcgataaaagaactaatgtttcccaaagaaataggaaaaagggaataaagaataataggccccacaaagacataaacagcagtcctgactggggcaatgcccacagaggaaccgattggcagagcgaaaaagcaaacggcatgaacagggccaagaactctcagaattttaccactaatattaaattgcagcgacaacattttggcgaagaaatacaaggtggcagccagcttgtgatatctacaaattcagatgcttcagataaattgttaatgctattcaacctaactttgggagtaaaccaagaaaacttgaaaaatgttctggaaaacatttctcaggtgcagatagctcaaatcagggttagagacctgccttcaggatctgccaccgctaaggtccgtctggcatatcctacaacacagtctttggagaaggtaagaaaactgtttcatggcgctctagttgatggaaggcgcatccaagtggtgattgcatctgatgaatcgtcccacttgtcgtattag

SEQ ID NO: 76994 - DNA, 756 bp, Saccharomyces pastorianus
atgaacccgttattctttttggcttctccattcttgtaccttacatatcttatatattatccaaacaaagggtctttcgttagcaaacctagaaatctgcaaaaaatgtcttcggaaccatttaagaacgtctacttgctacctcaaacaaaccaattgctgggtttgtacaccatcatcagaaataagaatacaactagacctgatttcattttctactccgatagaatcatcagattgttggttgaagaaggtttgaaccatctacctgtgcaaaagcaaattgtggaaactgacaccaacgaaaacttcgaaggtgtctcattcatgggtaaaatctgtggtgtttccattgtcagagctggtgaatcgatggagcaaggattaagagactgttgtaggtctgtgcgtatcggtaaaattttaattcaaagggacgaggagactgctttaccaaagttattctacgaaaaattaccagaggatatatctgaaaggtatgtcttcctattagacccaatgctggccaccggtggtagtgctatcatggctacagaagtcttgattaagagaggtgttaagccagagagaatttacttcttaaacctaatctgtagtaaggaagggattgaaaaataccatgccgccttcccagaggtcagaattgttactggtgccctcgacagaggtctagatgaaaacaagtatctagttccagggttgggtgactttggtgacagatactactgtgtttaa

SEQ ID NO: 76995 - DNA, 1155 bp, Saccharomyces pastorianus
atggaccagctaagtgacagctatgctttgtacaatcaaccggtagtgatcgacaatggttctgggatcataaaagcaggatttagtggtgaggaaaggcctaaagctctggaatattgtctcgtaggaaataccaaatatgataaagttatgctcgaaggtctgcaaggagatacatttattggaaacaatgcccaaaaactgcgtggattattaaaattacgataccccataaagcacggcgtggtggaagattgggattctatggaactaatatggtcatatgtgttaaatgaagtcctacagttgcaaaatataggtgagcatcctttattaattacggaagcccccatgaatcctttgaagaatagagagcagatggctcaagtattgttcgagacctttgacgtatcggctttgtacgtttcaaaccctgctgttctgtcattatatgctagcgggagaactacaggttgtgtagttgactgtggtgaaggatactgtagcactgttcccatatatgatggttttgcattacctgcgtctatgatgaggatggatattggaggagcagatatcacagagcagttacaatttcaactacggaaatcagctggtgtttcgttgttttccagcagtgaacgagagattgttcgcacgatgaaagagaaagtttgttatttggccaagaatattaaaaaggaagaggagaaatacttacaaggtactcaagatttaatctcgacattcaaattgcccgacgggaggtgtatagaggtggggaatgatcgatatcgtgctccagaaatattattttcacctcaaatcatcggcttagggtacgatggattatctgatatgtgcatgcaatctatttggaaagtcgatctggatttaaggaaacctttactgtcatcgataatcctaagtggcggaactacaacgcttaaaggctttggagaccgaatgctatgggatttggaggcattaaccaaagggacatccaagataaagattatagccccttcagaaagaaaatatactacatggattggtggttctattttaacggggttatctacctttcaaagactttggaccaaaaagtcagattggctagaggacagtacccgtgtttattcgaacctaatgtaa

SEQ ID NO: 76996 - DNA, 336 bp, Saccharomyces pastorianus
atgactaaaagtatatatattatcatcggatatatgctacatgatgaggagtttttctatttcttttttatttcattctatacactttggattgtgttttttcttttgcacttaagtttcttttcaacattatcattcggtatatttcacgattttgacaccgatgtttacataaaagtgggtaattatattttgcattttctcgaattgagtaaaaatagtaaccttttaaagaattcttcagaaatgttaaagcatttccgattggcatcattgatgtatatgtacgtatatactcagatgatttgcccctcgttacttggcatgaggaattag

SEQ ID NO: 76997 - DNA, 1293 bp, Saccharomyces pastorianus
atgttgcacatgaattcgttgtggggttgttttcttttcgttttactagccgtgacaggtgctgtgcagggtctccaagaggattacagtgaatacgctgtttacaggtttacttcagacaactattctaccctggtaagagatgtgatcgcaccgctgacagatgattatgatgtatggacgagaagcaataatttcattgatattaagttgcctaaagaaataggtgagcagataaatgatgggcaggtgatcatagataatatgaatgaattgatacaaaatacattgcctacaagtcagatgatggctcgtgagcaggctgtttttgaaaatgattacgatttcttctttaacgaatacagggacctggatactatttatatgtggttggatcttctagaaagaagctttcccagtttggttgcagtggaacacttgggcaggacatttgaaggcagagagctaaaagctctgcatatatccggaaacaagccagaatcaaacccggaaaagaagactattgttatcacaggtggtatacatgccagagagtggatcagtgtcagtaccgtctgttgggcactttatcagttgttaaatcgatatggttcgtctaagaaggaaaccaaatacctggacgatttggactttttagtcatacctgtgttcaatccagacggatacgcatatacgtggtcgcatgacagactatggcgtaagaatcgtcaaaggactcatgttcctcaatgtcttggtatcgacattgatcattcctttggtttccagtgggaaaaggcacacacccacgcttgcagcgaagagtatagtggggaaacgcccttcgaagcttgggaagcatctgcttggtacaagtatattaatgaaaccaagggcgattacaaaatttatggctacattgacatgcattcgtattcacaggagattttatatccctacgcatactcgtgtgatgccttgcccagagacttagaaaatttgttggagttatcatatggcttatccaaggccatccgttcaaaatcaggtagaaactacgacgtaatctccgcatgtaaggaccgtggttccgacatattccccggcctcggtgcaggttctgcgttggacttcatgtaccaccacagagcacattgggcattccagttgaaattacgggatacagggaaccatggatttttattgcctccagaaaacatcaagccagttggaaaggaaacttatgctgctttaaagtacttttgtgacttcctactagacccagagatataa

SEQ ID NO: 76998 - DNA, 396 bp, Saccharomyces pastorianus
atgtcagaggatctttcacctacaagcagcagggtggatttgagcaatcctcatgggtttaccaaagagggagtggatttatcgaagctgtcaccacaagaactaaaattgtataaaatgtatgggaagcttccatccaaaaaagatctgttaagacataagatgcaggatcgtcaatattttgacagcggagattatgcattgaaaaaggccggagtcattaagtcggatgacgttatcgtgaataattctagtaataatctaccagtgaccaatcctagcggtttaagagagtctattattagaagacgtatgagtagtagtagttgtggcgattctatctcgagacaaggaagtatctcaagtggacctccaccaagatctccaaataaatga

SEQ ID NO: 76999 - DNA, 876 bp, Saccharomyces pastorianus
atgggcaagaagaagagtaagaaccaattaaacactggaggtgttcctaatggtgtccataataccaagaaagaggcagctttgccacctttgggaaataagctgggaagcgcaagttttacagctataaatacgctgactaagcccgctttgttttcattttatgatgacgatattaccaagaatgaaggtaatgtttatgacaaggctttattgtctaacgcctctcaattggaaatggttccgccatccgcgactgcgagacacgaaaggtcattgtatgcgaaaataatcaatactattgctgcattttttattctattcatagcaggaatactcttccccatgatatcagaatgtttgtttgataatgaccaattggcaaagggagatatcgtatcctttttaaagcatggtatagaaattaagaacaagatcgtcgcggaacgtgacatggtgcctgattgggctgtatttggtactgaaggtgttatctttggttccatagtaccattcattgactctttcgttcgttatcaacaccagccaaaaaccaggtcatcagtttacaaaaacaccctaggatcatttataagatgttccaatactcttttgggcttaatatttggtattaggaaacttgaatggtcctcctctttgcaggcagctggtgcatggagcttattaaacattgttctgtggttgttctttgatggcactttaaccgtttttttcccaggtctagtaattggtgcccttagtgcgttcacttgctcacaatgtttctcgcagttgtcactggcgttgtattttatagatttctatttttttgggtttttgatgttcagcaagttgggcagatatttattcaattaa

SEQ ID NO: 77000 - DNA, 447 bp, Saccharomyces pastorianus
atgggcacatatacgccattaatatacaatatatataacgttcatatatgggtatttacagagagccaggggcaaattggacagatgtctccacgcggcaaaatggaaacagcagtttcacaaggacaacacaaacaacttaaagatggtcaccagcataagggaagaaaactctccgaggagatcgcttctctattgaggctcaaagagtgcaggaggctcaatcctgctagttactatactccacgtagaacatcgcagtcacaatctctcagtggatcaacttttaaagagtataacgagtacattaatgagaaagattcaagtagagcgcagcgtcaaaacgctgccgccgttttaagcaagctcgcccatgacttttgggagaacgactgtgtcattgacgaagacatattcgaagattcgtctgacgaagaacaatcatga

SEQ ID NO: 77001 - DNA, 1542 bp, Saccharomyces pastorianus
atgactgctggttctgccccccctgttgattacacttccttaaagaagaacttccaaccgtttctctccagaagagtagaaaatagatctctgaaaagcttttgggatgcttctgatatctcagatgacgtcattgagctagctggtggaatgccaaacgagagattttttcctatcgaatctatggatttgaaaatatcaaaagttccttttaatgataacccaaaatggcataattcgtttaccacggcgcatttggacttgggatcccccagtgagctacccattgcacgttctttccaatacgcagaaaccaagggtttaccccctctcttacattttgttaaagattttgtgtccagaattaatcgcccagccttttccgatgagacggagtctaactgggatgtcatcctttctggcgggtccaacgattcaatgtttaaggtttttgaaacaatttgcgacgaatcgaccactgtgatgattgaagagtttactttcaccccggctatgtccaatgtggaggctacaggagcaaaagtcatccccatcaagatgaacctgaccttcgacagagagtcccagggtattgatgtcgaatatctaacgcagttgctcgataattggtcaactggaccatacaaagacttaaacaagccaagggtcctatataccattgcaacgggccaaaatcctaccgggatgtctgtcccccagtggaaaagagagaaaatttaccagttggcccaaagacacgatttcctcattgttgaagatgatccctacggttatctgtactttccttcctataatccgcaagagccattagaaaacccttaccattctagcgacctgactactgaacggtacttgaatgattttttaatgaaatcattcttgactttggatacagatgcccgtgtcatccgtttggagactttttctaaaatttttgctcctggattaaggttatccttcatcgttgctaataaattccttttgcaaaaaatcttggatttggccgacattactacaagggcccccagtggtacctcacaagctattgtttattctacaataaaggcaatggctgagtccaacttatcgtcctctctttctatgaaagaagcaatgtttgagggttggataagatggataatgcagattgcttctaaatacaatcataggaaaaatcttactttgaaagccttatacgaaacagaatcttaccaagctggtcagtttaccgttatggaaccctccgcgggtatgttcatcattattaaaatcaattgggggaatttcgatagacctgacgatttgccgcaacagatggatattttagataagttcttgctgaagaatggtgttaaactagtgcttggttataaaatggctgtttgcccaaattattcaaagcagaattcagattttctaagactcaccatcgcctatgcaagggatgatgatcagttgattgaagcttccaaaaggatcggtagtggcataaaagaattttttgacaactataaaagttga

SEQ ID NO: 77002 - DNA, 651 bp, Saccharomyces pastorianus
atggtatataggacccttggcttgtttaagtctttgtatggtccagttgaccaattatcgagcaactgcgttagatattcgacatcaataccctgggactctctgtcgaaggtcaggttcatcttgatggggatgacttttgctcctgtagcctccacattggacatagccggggtgaaagtaaactcttcaatcatcacagtggtcgattcgtcgcaaattgtttcaaaaaccttaaacattgaatcgttggacccgccagaaaggatgacatcccagttagactccgtctcatcggaaaaggctgggcgattaattctggacacaaaatctttaacaaaatgtaagagagggggtaaacccttggtttctgcgtattggaaagaacgtgcaatgggtagctcactgggggatcccaagtccaaatgcgccgtggtaaacgaattatgccattttgggttatcattaaaaggaacttttgatattttcaaatccatagattcgataggaaaaaatctctcgtttggcattccaccagctagctcaatgacgtcatctgagatatcagaagcatcccaaaagcttttcagagatctattttctactcttctggagagaaacggttggaagttcttctttaaggaagtgtaa

SEQ ID NO: 77003 - DNA, 345 bp, Saccharomyces pastorianus
atgaaggccagttacttagttttgattttcattagcatattctccatggcacaggcatcttccttatcatcatacatcgtaactttccccaagacggataatatggctacggaccagaatagcattattgaagatgtcaaaaaatatgtggtggacatagggggtaaaataacacacgaatatagcttgataaagggctttacagtggacttacctgatagcgaccaaattttggacggtctgaaagaacgtttgagctatattgaaagcgagtacggtgctaaatgcaatttggaaaacgattcagaagttcatgctctaaaccgtgaccatttagttgcttag

SEQ ID NO: 77004 - DNA, 981 bp, Saccharomyces pastorianus
atgaaattcacatcagtgctagcattttttcttgcaactttaacagcttctgcaacaccactttacaagaggcagaacgttacttctggcggcggtacggtccccgtgatcatcacgggtggacctgctgtatctggtagccagtcaaacgttactaccacaacgctattcaactctacttccaccttaaacatcactcaactttaccaaattgctactcaagttaatcagactttacaaagcgaatcgtcttccggcattataatcgtcacaaactggcgttccattgaaactttgagtttcttctgctcaatcgtttttaatacatcaaagaccattgtcattactgagaatttcttatggggtgtaccaatattgagtagttcggacgcggaaggtagaggcactttggttgccggtagagataatgttgtgtattctggtgttttccctccttacactgttcctgtgggcgttttgtctggtcagaagaatgttcaatggttctttgatgcctgtgagccaactctgattgccagcaactccacaatcagaactcaatactcgaattttacgagcgcacaaatatcttctaatgcctcctccgggaccaatacatcctcatcatcctccagtccattggttccaattatatacgaagaaggatattctcaaagcttaattcaatcactaagttctagtatccaaggtttggttgttgtcagctctggtacaagtcacaacagtaccgtggcatcatggacatcggtcgacttccctgtcgtttatgcaagtgatggatccagtggtcatgatggttcaggaattgggttcataagtaacacaagtattccacaaggtgcaatttctgctgggtacttgtcaccaatccaagcgcaaactttgttgtctattgctatccataatcaagtcacaagtagtagcgagttacaacaaatcttccctgttagtcaacaataa

SEQ ID NO: 77005 - DNA, 312 bp, Saccharomyces pastorianus
atgcgaagcgcagacttctctaatccgcggatcttgtcaaatttaatgagcaagtctgaaaaggaaaagagagcgatcattatttttaattgtcgcttaaacaaaggattatatgtcacttctgcatgcgtttcacgctctgtttttagatgctgcaaacaggaacctcttatagaatttgtatccccaaaaatgatagcatttgttcaaatagatggacgctatttgacaaaaatgttaacatgtgacattcacgtcagaaaagaggccaaagaaggaagagggtaccagcaaatacataaactttcctaa

SEQ ID NO: 77006 - DNA, 720 bp, Saccharomyces pastorianus
atgatgtcttgtctggtaccaacacgttttactttgacccttaacaccgcgtgtcttttgacgagcacctgggggtttgttagggccacatctgtagtcttgcctccaagtttgagtaaaggaggccataaacagtttctaaccattatatctattattgcaacaatcattaataacgtggttaacatttctaattattatatccaaagaaacaataagatgaatctagaaaccaagaaaaaatcagactttattagtagacatgtcactttgccagtttctttagtattagaatctattgttgctaccgtttattggccgcttagattgttttttgtcaacttaataatgcatggagttgaatctactgcaaagacaccttttcctatgacagtggatatggcaatccacttatatcctattttatatttactagccgatcactacttatcgggatctggcacgaaattcaaattatcgaataagcatgcatggctcattgtaaccagtttagcattttcatattttcaatatttagcattcctgatagatgcggggcaaggccaagcctatccatacccgtttctagacgtgaacgagccgtacaagtctattatatttgttgttgttgctactattacgtgggcttattatgtattttatcaaaagtttccgccaaaatacatcaagaagtcggcaaagaaaggtgataagaattag

SEQ ID NO: 77007 - DNA, 951 bp, Saccharomyces pastorianus
atggcatttagtgattttgctgccatatgctcaaagaccccgttgccattatgttcggtaataaagtctaaaacccatctaatactttcgaactcaactattatacatgattttgatcctttaaatttgaatgtcggtgtactgccacgctgttatgctcggtcgattgatcttgccaatacagtcatctttgatgtcgggaacgcattcataaatattggtgctctaggtgtcattttaatcatactttataacataagacagaagtatactgctattggcaggtccgaatatctctactttttccaattaacattgctattgataatatttaccttggtggtagactgtggtgtatctccccccggctctgggtcatatccatacttcgtggctatacaaataggactggcgggtgcatgctgctgggccttattgataatcgggtttttaggtttcaatttatgggaagatgggactacaaagtccatgctgttggtccgtggaacgtccatgctaggattcatagccaattttttagcctctattttaaccttcaaagcatggatcaccgaccataaagtagcaacaatgaacgcttcagggatgattgtcgtcgtttacataataaacgccattttcttattcgttttcgttatttgtcaattactggtatccctattggtagttcgaaacttatgggtcacaggagctatctttttggggctatttttctttgtagcaggccaggtattggtttatgccttctctacacaaatctgtgaagggttcaagcactacttagatggcctcttttttggaagcatctgtaatgtgttcacattaatgatggtttacaagacttgggatatgactaccgacgacgacttggaatttggtgtaagtgttagcaaggacggtgacgtggtgtatgataatggatttatgtga

SEQ ID NO: 77008 - DNA, 1020 bp, Saccharomyces pastorianus
atgaaatttaatttttctacaattttcaatatcttattctttttattcaccttaattgaagccaacagcaatggggaaacagtcaaacttattacttctgatggtattgtctacagttatgctgtctacacaaagactcttgcgccggcaagggttgtggttaaaacgatttcatatactactacaagggtatatccgattactttagctaattccgtcgtttcttccactactgaaaagataacagaggtttcaacggtgtcagcttcagaacaagttagtgctactcaaacaaactcattggtttctacttctactgtttccactatcagtccaacgatttcatctggttcttcaacatcctctagctctacatacgatatcgaatcatctcaaagtatcgaatcgtcaggtacatcttccgctacagccgaaccatctgcgtcttcaggttttcgtttgacttctagttctgcttttgtttcatctattgcacctttctcttcccaactttcttcatcttcatcttctgaaacatcatcctcatcattctcaacatcatcctcatcattctcaacatcatcctcatcatcctcatcattctcaacatcatcatcatctgcccctctttccttaacttcttcttcttcttctttcgccactattattaccttggcaccatcgagctcaaaaagcggaaactctcaactaactttggcgtcatcgtcttccacttccgcagttgagtcatcccaaacagggtccactatagcaagaactacctctacactggtaccctcttctagcgtagatacaacgtctagagcaacgacatccatgccattagaatcgtcttctacgcaatcgatatccgtctccagctcggatggcacttgttacgttttttatgatgatgatgactactatagtactgtctacttaactaacccgtctcaatccgttgatgccgccaccactataactagtacaaacacaatttatgctacggttaccatttag

SEQ ID NO: 77009 - DNA, 213 bp, Saccharomyces pastorianus
atgtctcgcgaagggttccagattccaacaaatttagacgccgcagctgcaggtacttctcaagctagaacggcaactttgaagtatatttgtgctgaatgttctagtaaattatctttatccagaactgatgcagtccgttgtaaggactgtggtcatagaatcctgttgaaggctaggactaagagattggttcaatttgaagccagatga

SEQ ID NO: 77010 - DNA, 939 bp, Saccharomyces pastorianus
atgatagttggtgtaagtggtacgaaattttgtggatgcgaagatgttattaacatgttggttgatcattttcattttgaatcactcaatcacctagataatccagatgagatattagattatgctacgaaaaattacacaaaaaattcagttatattcctagaaaaattatcattactggagaaactggaaaagagaccattttttgttcatctttctatcgacgctcctgtcactacaagggtagcattatacaggaaaacgactcaagcagaaagcttatcattagaacaaataatacaagccattgatcaacatgactttcagcctgaaggcatcaaattaagggagaaatcccatttgagatttaaaatagttaatgaggaccgcagaggaaggagacagagcttgattaataacattaccacacaattaaagattctcgatgacaaagaaaaacaaatggctccattaatgaggcctagttgggatagctattttatgaagttagcgacactagcagcatctcgttccaattgcatgaaacgtagagttggttgcgtgattgtgagagaatgcagagtgattgctactggttataatgggactcctcgacatttaacgaattgtttcaatggcggttgcccacgttgcaatgacggtgattctagaaatctgcacacttgcttatgcttacatgcagaagagaatgcactactggaagctggcagggatcgtgtaggtcaaaatgcgaccttatactgtgatacttgcccttgcttaacatgttctgtaaagattgttcaaacaggcatcagtgaagtagtttatagccaaagttatagaatggacgaggaaagtttcaaggtcttgaagaacgcgggaataaccgtccggcaattcagctttacggaggaaccaagaattgtaatgatttaa

SEQ ID NO: 77011 - DNA, 645 bp, Saccharomyces pastorianus
atgtcatttattcagaggaggttattgtcgcaaacactttttctgcgctctcaagtggggtctttaccactttatatatctcctgaagttcaggtttccataaatgcattatccatgcccaggattatcagaaaaggtagaacttcaatgaatatatcacagaatatcacagtaaagggacccaagggtgaattgtccgtggaggtccccgattttttgcacttggacaaggatgaaaagcacggtaaaataaatgttacagttcaaaattcagaagataaacatcaacgttcgatgtggggtacagtaagatcacttataaataatcacattataggtgttactgaggggcatcttgctgtccttagatttgtagggacaggttatagagctcaattagaaaatgatggtaaatttgtcaacgttaaggtgggtgcatctatcaaacaaggattggacgttcctgaaggtattgttgtcaaaacacctgctcccacgtctctgattattgaagggtgcaataagcagcaggtccttctttttgctgccaaattgagaaaattccatccaccagagccgtataaaggcaaaggaatatacgttaacggtgaaacaataaagctaaaggacaagaaaatcaaataa

SEQ ID NO: 77012 - DNA, 552 bp, Saccharomyces pastorianus
atggttagaaaactaaagcatcatgagcaaaagttattgaaaaaagtagacttccttgaatggaagcaggaccaaggccaccgggacactcaggtcatgagaacatatcatattcagaatcgtgaagattatcataaatacaataggatatgcggtgatattcgtcgtcttgccaataaattatcattattacctcccaccgatccatttcgtcgcaaacatgagcaattattactggacaagctatacgctatgggtgtcctgacaactaaatcaaagatttctgatctggaaaataaagttactgttagtgccatctgtaggaggcgattacctgtaataatgcatagattaaaaatggcggaaactatacaagatgcagtcaagttcattgaacaagggcatgttcgcgtgggtccaaatttgatcaacgatccagcctacctcgtaacgagaaatatggaggactacgttacttgggtggacaactctaagatcaagaaaaccttgttgagatacagaaaccaaatcgacgattttgatttttcataa

SEQ ID NO: 77013 - DNA, 2202 bp, Saccharomyces pastorianus
atgtaccacacccatatgcatgaaagttcaatatctgtgacttcaacggtaagtgtttctgatgcgtcttatgcttatgcaaggctcactagaagagacgatagcgattcatcttcttcctcagcatccagcacgaaaaatagcaaatctgctgaatgtacaggctctaaacagcaatgtcaattgcccacagattcgagtcacagcaccagtgtaactgttggtgtggctgttgcagtaccagtaggtgtcattatcattgttctggctgtgatactttgcattgtgtataggagaagcaaaaaggaagctgaggaagataatgatccagatttcgaaggagattctgaatttttaccgacaatgaaggaatattcacctggaataaatcatttgtactctagcgactcgcagcaagacttcatggaaaagaccttgcaacagccgccttcagatccctttgttggtagcatgcatagtagtaaatataatgtgagaagcgctaccccacctgcaattggtcggtcatggtacgtagacccgtttcagcttccacaggaatcgaacgactctaacagtttgagagattttgccatgagagtacaagaagatggactaggtggctataaagttgcggccgagtctagaaatgccagtcaaacgtccttgcatcctgataacttttcgaattgtacaccaataagagcgtcttcaagatttcaagagagtgaaagctttcgatctcacggtagcccaatccataataaccagctttcccgtggttctgccacagaaggtgccaacaagcagtttacatttcctaatgaagacaatgattcgtcctcagttagtgaagaggctgaggttttgaatgagtcaaatgagtctgcaagcaatgacgcgttcgaattcgaacttgataatagttcagaaaagacacatgaaaggaatctgcgttttggtaaggatgatgataattatgaacttcaagacatcagagaagctgaacatatgaatgatcgtagtagcagtaaaagtcaagatgatgattattatgtatcacgcttatcccctaatgaagaagaagatattaagagaatgaaaagtatttatcaagtttatttggatagagctaaaacaatgaaaaaggaagaggataaagcagataatgcaaatgatatatcgcaggaggagaatagagtggatgatatagtccagaatccactgccttctatcaaaattaataataacgacaatatcgacaataatgaggtaccggaagcaaaacacctggtgaaagaagcacttcctctaaacaatactaacttggcagaatatggtccagaaattgcccaaagccagaaacaatatccagtgcaggacacactcaccgtgaacgatacggaagcagcggcttccaatagaattgcttcctcaatttattccgaagcaattcagccgttgaattatcaggatcaatatcaacaggaacgatcaccagtatataatggccacacacagtattctggcaatggatatagcggaaatcctcagcaacaggggtatactgcgcaattcgtgcaaaatccacaatggtacggtgtaccaactcctcaacaacagcaacataatcatcctcagaccctggaaactattggagaattaccaactcccgcatatttagctcaatcagcttcttcgcattcattgacctcttttaaaagaccaaacaagcaacaacttcttcaattacagactgccagactaaacggaactgcgttaaatccggtcgatcatccggaaatgttttattcaccgacaaacgatgcctattatgctccacagcagcaaggccaatatatgaagtttaacgaaaatggggcggttccttcaccttatcaacttagacaaagtgtggtaatgaccaacccttcggatttgacggcaaaaccatcttataagccagcaggttctttcagaagtgtaagcgcaaccaattcaagaaataacagtctgaccacacaaaataatatctatctgcaacagcagcagcagcaactgtataattctcgtgttagtgggatattagaagagacagatgttgtacagccaccaagtgttggtggaattttgccacatagtggttcacaggacgatttaagaaaacaattaggctcttcacataattataccgtcaactga

SEQ ID NO: 77014 - DNA, 1740 bp, Saccharomyces pastorianus
atgagtgagaccagctcaagtcgcaggagcgcgagtaaagacgctgtcaaatcttacttcgcaggcaaatacaataaagtgttggattctatactggaggcagaagcagcaatatcaaaatcgccaactgtagcagaagatctatcaggaagctcctccagcggaaattctgagatgagccatccttcgctaaccgcctcctccgcaacaagccaaggcattagcaaaaaggaactactccaacaaattgctggttcattattcagtacgtccattgagcgcctgaagactgcccactcatcagaagtattaagtactccggaatattcagtaaatgattcgtatggagagcaagagtgcagggagtgcgatggtgttttcaagtgttcagcgcactttgagggcgcgcccgaatattatgacgatgaaaccgaatcagggccagctctagaacctatgacttccaatagtgaaaaagatccttttatcgatgtatttttggataaactaatatcgaggttggtccctgaaaagctgccagaaagagagcattttagtagcaaaaccaccattgagcatgatctagacacaggaaggattcccgtgttttcagcaactacattgggtagtaatttcaaaaaattgtctaagaaaatgggctcaatatttgaactccaggactccatagttcgactgctgacttggagaaaccctaccgggatggtgacgtcgttaatattattcactttgatatgttttaatccaatgtacttggtaattttgcctatattccgttttgtctatggtattgtagttcctggctatgtgcgtaaacatcctttacaaaggagtatatatcctctgaaacggaatcacggatcatcattgttatatgatgtgtgctatgagggaaaaaatgagtacagctacggtcaacagtttttctccaaatcttttatggacactttggaatcaagaaatcaagaaatagacgaaatatcagatttagataaaagaaccgaaaacacaggggaattgaaacaaggaatgaaagtactaattaatttacgcgatatgcaaaacatgacctctggtacccttcatgttattgaggcaatcaatagttttcttcgtaagtcttctagttttcaaaacgaagagtgctccactaaacgtttttttacaggatttcttttgattgctttcttaaaaatattatcaccatttgtgaattggagctatgtatgtagcatattcgcctggtgcttactgatatatatgcatccaagagctcatccaaaaataataagttttttcaaaacaggaacaatgggaaaagaatacaaaaacttgaaaaaaagagaacatcaggcgcttaacatgatattcgatgaacaaccggaaactaaattcatcgagatttttgaaatatataaaaaggccttactgccgaacgactggaagtttttccgatattcaaatagaattttcgatcctcaagatccgtatagaagagcacagcaattcccaccgggagtagattctttggctgatgttattccccccacaggctggtcatttgatcctaattttgagtggaaaattgacaatgatgtggataggtgggtggtagaacgtgggttgaatctgccaattaccggcgaattcttatttgatccaatgttcaagaggaggagactgatacatcgtgttattaagaatgcaacaccagtaacataa

SEQ ID NO: 77015 - DNA, 1581 bp, Saccharomyces pastorianus
atgtggatactcatatacctatttatcatatggtcctcactgcgaacgtgggttactgctgttgactctactacgacagttggcgatgatctgaatgagaccgtttcagcatctgtctggccgacgatgtcccctcaaatgacggtggcctttaggtcccaaagagatgtcatgggaaacttaactatagaccagctgccgtatgtaggtttgaatctacgacgggttctattgaacaatgagactagcatggtaaatgaaggtaataatacaagattactgactttgttcaaatctatgctatcctccgaagcaaatgcttttgtcctcgacttggaacaatataataatgatttgagagtggtagatacgacattgttatttagcgacgttctaattgctttagagtcattcatcttcagcacacaaaacaacctctatgcgaatatcattgtactgttgctgaatatatcagctcctgaactggattccacagaataccgccaccaaaaccaaactttgaacactacttatatactggacaaaaatttaggaaatagtttcatttacaagcctacggatttacaaagtgatagagcaaagaataatacctggaacatctacggaaaatcgtccattgacggttggcccactctgggctctgtgctatatgaacaaaagaagagactggttataggtgagctgaccgatttttttaatgaaactactgctccatatatttttcctcatgacgtctttcattatgagcaggggaactccacattagattgcccctctactgtagagggtctgactgatttatcatctatccattggagattcttagattcgctgttcaattccgtggacatcaaagagtatatttcgtgtggtttatcaccaataataagcaattcagcgtacgtcaataatgtgacgcagttagcggatataattcatgaaggcagcgtttggtcatgggatagcgaccaaccttcagttactcagtcaacttctaaatctggcagctcatccgggaccttagaggcttacaattgcgttctcttgtactactttgctaacaatgagacagtaacatggcgagtaggtaactgttacaattctaatattgggctctgtagatatgaaaatatggcattccgatggttggtgagatcaaataaggctacgtactttgattttgatagttaccagggatctaaatgtcccgatcagtattcatttaatattccaagaagcccattggaccagagatcgtttattgcatatatgaggaattcctccttctctgacacacaaatatggatagatttgaactctatatcagtaagcaattgttgggtcagtggtggtccttatgctagttgcccatatgaaaaagtcatttctaggagaaattttgtaacaatgatggtccccgcgtcagtctgttcctttgccctactgtgtattgtcgtttacttgagtgtattgagggtccccatttatgataatagaaaaaattggagaagggttatcaataaaatctctaaatccgagctagaaggtgtcccttcttaa

SEQ ID NO: 77016 - DNA, 522 bp, Saccharomyces pastorianus
atgtccaacaaggcaagtgaccaatcagcacgcacggcttccatcctcaagactgatattaccagagaaaacacaatcaccagaagcagcagcagcaacaacgacaactaccatcaccacaataacatcaataattacaatgaatcggcgaagacaggagaggacgccaataaagagaatatacctaatttagaggaggagattgcggcctttcgaatttttaggaaaaaaagcacttcaaacttgaagtcgtcacacaccactagcaatttggtaaaaaagacaatgttcaaaagggatcttttaaaacaggatccgaagaggaaactccaactacaacaaagatttgcatcaccgactgacaggctggtatcaccatgctcattgaaattgaatgagcacaaagttaagatgttcggaaagaaaaagaaagtcaatcctatgaaactgaactttaaaggcaaccttgctgccgattcagaggatgtagaaatcgatgaagatgaggagtatttctactaa

SEQ ID NO: 77017 - DNA, 597 bp, Saccharomyces pastorianus
atgtctgaattcttttgggatgtacaaaaaatacaagagatttctaatgtcgaagaacattctgtggttaagtgtgttactgtgaatacgagcaggttaatttcgcagcttaacgaggagctacaagacgaagaaagtggcgtcaattttattgttacacagctgcaattactgataaataatgtctatgagaaaatacagaaaggccctggagttcccgcacatcgttctctgatgataaatttgaatttcacgcgcttgaaattctcaatagcttattgggatatcttattggagaggtcactagatctaataaatggaccatcgaaaacgggtgcccgctactttattacagaggttacaccagtagacagaagtcgatatgttgaaaacaatcaatattttctagcttttaaagctaaccagcgtttgacacggaacagcgtggatatggacgagtttattgattttgaaattctaatcaagcaaataattttcgacctcttcaaaaaaaacggaattccagatcaagattttgaagccattttatcaaggtttcataatttggaaagtttggtggttgcttttaatgaataa

SEQ ID NO: 77018 - DNA, 3213 bp, Saccharomyces pastorianus
atgagcacatcacttctgttcgagaagctaaattttttaattttagtggcagcagatgctgagcttcccatcgctcactctactagaaagcttttgatggataattcatgcaataactgtcaaatatacgagctttataacgaaaatttcaaagatgtcaagacggataaagattggttcatgaaaaaattcggcccgcaaacagtacattttgtcattagtaatacaatcaactttcctttttataaggtagtttatttcgatcttttgatcccggtcgtatcacacacttgggtccaggattcggtcaagacgaagagacatttgaggacaaatatgtattcacctaacccatttcatttgctccgagactgtcaagtatatatttccaaaagctcgtttaataagtgtgaatacatattatactctgatttgcttcatttattaggaggcactttagtcaattacatctcaaatagaacgacgcatgtgattgttcaaagtccccaggacccgatcatagcaacggtcagtaaattgacatttggctctttttcctcttcatcgaccaacaagcacaccgaaaagcctttgagagagtggaaatttgtctatccaatatggatattatatcatttcaaaatggcgaagcccttgaagggcgagcttgctactttgtgtgagcttgatatgcaggacaccagtgaggaacagttattcgcaaaatgggaagaggttattggcgataagcagacatcatcatcgcagcttactcttcatccaaacaaaactttattcaaaaatcaccactttgctatctcaccagatttaaactttttcacacctttgtattggtttttgaaaggatttatcgaggatttggacggcaaagtaactccgttgagtttttctgacgatctgaagtctgtttaccaagcttttcctgatattgactgttatatcggccactctgctaactcaccgatactagaaaaaaccaaaagcattaaaccggaaattcatgttgggaacgtaagttggttgttttatatgtttgcgctgcaaaaatttacacctgtatcgcaatgtaaacttattcaccaaccatttcatgcgaaattatttacttctaaggaattaacagtcgcgtacactaattatttcggctcccaaaggttttatattcagaggttagtagaaatattaggaggacttagcacacctgaactaacaagaaaaaacacacacttgatcacgaagagtacaattggcaaaaaattcaaagtcgcaaaaaaatggtcactggacccgcaaaatgccattattgtgacaaatcatatgtggttagagcaatgttatatgaataattccaagttaaaccccaaagacagtagatttcaaaattttaaattggatgataacatgggatggaatatcggccaaataggaatggatcattcatctctcccaactccaaaaaacctatcgatggtgacttacgacacgcaatccatatcagagaagccgcctcccacaaatgatcaaatggatcaaattaacgataacaccaatgtattatcaaagaaagatggtacgcccattagtagttttgagaactcaattgatgaaaagattgacaaattacaaaaaatatcaggagaggtggctgtaacccattctggagatttagaacggagttttgtttccagaccttcaagggcaagttttccagtagttgacagtaaaaaatctaatttacaaaagaaagactcaaactcagatattagtatggaaacagaggttttctgtgaaggacatgaaaaaagagaagaaaaggagtttacgaaacctattacggagtatgatgcacctaagaaacaagaaataagggaacagtcacgcaagaagaatgacatagattataaaaaagaagaggaagaaacggagctgcaagttcagctaggacaacgaactaaacgagagatcaaaacttcgaagaaaaatgaaaaggagaaagaaaccaatgaatgtcacattgaagtagatcaaatgacgaatgaaaagcaaggggaggaaagtacaggaaaactgatttctacggaagacgtcacttctaaaaaagatacagataaattctcgcatttgtttgaaggattatctgataatgatgatcacattaatgacgaaaaaccggcagttaattccaaatataccacacccaagacgtctcaaaatattacgagtggcgttgatactccaaccaccgcgcaaacgcaagtttttatgccatcaagtggcaattcaaggttagcaaagacacaagctgcgaagagattgcatacagatattgaatcattaaatgaatttcagaaaaactttaaaaggaagagaattgatagcgaggagatttcattgtcccaagatgttgaaaggtcaaataataacaaagaactggctactaaagcggaaaagatattagctagatttaatgaactaccaaattatgacctaaaagcggtttgcaccggttgtttccatgatggatttaatgaggttgacatcgaaatattgaaccaactaggtataaaaaattttgacaatattaaagaaacggataaattgaattgtatttttgctccaaagattttgagaaccgagaaatttttaaaaagcttaagttttgaaccgttaaaattcgcattgaaacctgaatttattattgatttactgaaacaaattcattctaaaaaagataaactttctcaaataaatataaacttgtttgattatgagataaatggaattaatgagagtataatatcaaaaaccaaactacctactaaggtgttcgaaagagcgaatattagatgcattaacttagtcaatgatataccgggtggtgtagatacaataggctctgttctaaaggcacatggtatcgaaaaaatcaacgttttacgtagtaagaaatgcacatttgaagacataatcccaaatgacgtttctaagcaggaaaacggaggcatttttaaatacgtacttatcgtcaccaaagcttcacaggttaaaaaatttaccaaactgattaatgatcgtgataaaaacgaaacaattttgattgttgaatggaattggtgtgttgaatcaatttttcatctcaatgttgattttacatcaaagaaaaatgttttgtatcaaaagaaaaataactaa

SEQ ID NO: 77019 - DNA, 549 bp, Saccharomyces pastorianus
atgtccatcgaggaggaagatacaaataagatcacatgtacgcaagactttcttcaccaatactttgtaactgaaagggttagcattcaatttgggttaaataacaagaccgtaaaaaggataaataaagatgaatttgataaggcagtaaattgtatcatgtcatggacaaactatcctaagcctgggttaaaacgaacagcttcaacgtacctcttaagcaattcctttaagaaatctgcaacagtatctcttccgtttatcttagacgacccagtatgcatgccgaagagggtggaaagcaataataatgatacctgtcttctgtatagcgacacattatatgacgatcctttaatacagaggaatgatcaagcaggagatgaaatagaggatgaatttagttttacattgctacgaagtgaagtaaatgaaatcagacccatatcttcgtccagcaccgtccaaatactgcaatcggactattctgcgctgatgtatgagagacaggcttcaaatgggagcatatttcagtttagtagtccctga

SEQ ID NO: 77020 - DNA, 3495 bp, Saccharomyces pastorianus
atggctggattcagcttcgccaagaaattcactcacaagaaacatggaaagacgccttctgatgcttctatctctgaccaatctagagaagcttcactgtcaactcctccaaatgaaaaattttttacaaaacaagaaacgcctcagaaagggcgtcaattttcacaaggttaccattctaatgttaataaaactagttcaccacctatgtttgccagaaaacaggtatccgaatcaaggattcaaccgagcgcagtaccaccgcaacagcgaaatgtctcaggaccgtccactactctccataagcagctttcaaaacagagagaatataccgtatggaatagaatcaagttacagaattctccttttccacgttatagacatgttgcttcagcatatgttacagacaagaaccagatatatgttattgggggacttcatgaccaatctgtgtacggcgatacatggatattaacggccttcgataatgccaccagattttccactacaacgatagacataagtgaagctacaccaccaccaagggtaggccacgctgctgtattatgcgggaatgcctttgttgtatttggcggtgacacacacaaagtcaataaggaaggtttgatggacgatgacatataccttttgaatattaattcctataaatggacagtcccggcacccgtgggaccacgtccattgggaaggtacggtcataaaatttcgattatcgccacaactcaaatgaaaacaaaactgtacgtgtttggtggtcaatttgatgacacctacttcaacgacttggctgtttacgacttatcttcttttagaagaccggactctcattgggaatttttgaaaccaaggacctttacaccaccacctattaccaattttactatgatatcatacgattctaaactatgggtatttggtggcgataccttacaaggtttagtaaatgatgtgtttatgtacgaccctgcaataaatgattggtttatcattgataccacgggtgaaaagcctcctccagttcaagaacatgctactgtagtctacaacgatctgatgtgtgttgtaggcgggaaagatgagcatgatgcttatttgaactccgtgtatttcctaaacttgaaatcgcgtaaatggtttaaattacctgtatttacggctggaattccgcaaggccgttctgggcattctttaacattattaaaaaatgataaaattttgattatgggaggagataaatttgattacgctagagtcgaggagtacgacttgcatacctctgatattgatatgcaaagaggtacaattgtttatacgctagacttggcccgcataaaggacctttgtccaggcgtaatggatgttccaactgatacgccaactccgagaaatggtaatcttgacctggcgacgcccgttaccccaacctctcatcaaactaaaaatatgaacgtaccaatttcagcagctcctctagcttccgctccatcacctgcaccaaaagatttttcagatgctgatcgcctcaacagggaggtacacaatcgaaatgtgtcaacagaacaccaaaatcagagccacccagtaaattctgaatctcacttgattgctgagcctaacattttgactccatatgttccatctgaaagctcacaaacgccggttatgaaaataacttccaacaaaccatttgatacgcctactatccagaaagaacctgatctttctgaaactatggatccaacagttggaaatcagcgcatcccatcttcaatctatggagataacctcacccctgcaaaccaaataaagaataactccccaatattagagacgcttccaagtaatgaggtaaaaacgccccaaaatggtaatatagaggaaataaaacatcttcctgacgctgatgaaaaaatagattccacgacgaccttcgaccaagagataaacggggacaaactaggcacatcttcgatgtccaaggttgaagaggacggcaatgttgctgacgaagacgacgaaatcggtgtggctcaaatggcgagctccccatccaaagatcagttcaaaataaagcattataatgaatcttcagaattatcacagaataatacggagatcgacaaactgaccgagcctgtggatattacaataaagaaaagcgacaccgcgggccatgatagtgctaaccatgttattgatgcaagtgatgaaaaaaacgtgtccccaatgggagacgttccaactgatacgaaaaatgaagaagctagcattcctataaatagagatgctactaccgaagtcgtagatagggcactatttgagaaattaagatcggaattgcaaagtttgaaagaattgacgcacgaaaaggcgcttgaagccggagctcacataaaggaattagagacggagctatggcagttaaaatcccagaagatttctgggacaacgaaagaaatagatgaattggattccgtcagactgcaatcaaaatgtgaaatactagaggcagataatcattccttggaagataaagttaatgagctagaagagttggtgaatagcaaattcttagacatagagaatctaaatgaagttatacaatttcagaacgaaaaaattaaatccttagaactagagcctaattacaaagaaaaacttgaagaactacagatagaacatgagaatttgagtagagaaaatgaaaggttgaaaaatgaaagcaaacaacataacgaagatataatcaataatgttgcgaattactcgtcacagttaggctcattgatcagtcattggaaagaaaacagagccaactctttgtttcttgaatcttcttcttctttgatatctgtatcggatgaaaatggcgagaaaactgtcggtgaaccctatggtgatcaaagtcgtcaccaccgtgtagtaattaacaaactaacgaatagattggacgatttgctggagagaagtcaagagctaacaatatctaaagaaaaactatcttctgaataccatgctttaaagatggaacacagctcattaagtcaagatgtattagtaaaagagaatgaaatcaaaaaaatacagaatgattacaaagaaagtatcagttctatggacagtgcaagtaaggcactaatggtttcacaaagagagctagagaagtacaagagtttgaataaaaagttaatcgacgagttagatgaattgaagttcaaaaatggcgtctgcagtgaaaatttcgaaaatggtctcagaagcaccgaggagagttccaataatgtaaaaaatagcaacagcataagagaaaatcaattcaacatcaaaataaatgatctgaaagcggaactcttcatcactaatcaagaaagagatgacttgaaaagtgaagtgttagagttgaaaaagagattattgaatttggaaaataacaccaaacaagttaatgaagatgatgacagcgatctactataa

SEQ ID NO: 77021 - DNA, 1515 bp, Saccharomyces pastorianus
atgaataaatttgacgagtttatagagtctaatgagaaggatttggatgtggacaccagtacccgaaatagtataatttcgatgtcacctgtgaggaaaactggacgaaagattcgttctgctagttccaatggatataggctagaacaccatcgtacgtccagtgcgggaagcatgcattcgcaaagactaatgacgcctaccagattaaatgaccaggaccatcccttacaagccaagccagatgctaggagggtggtaactcgtcattcttctgtctcatttccaaatgcaatgagcaagagaagatcacttattcaacccatggttgttcccactacaccagaatctcaaaacaacttaccttcagtaagtcattctgagggatcctatggaatcccattagagtcaaccactgtactttctagtgagcaagcgatggccagcggacttcgacggtctagaaatgggagttcgcagtcggttaatagtatgatagcgaccaccataccaacaaatggggtcgatgtaagtgcgcttctacaatctctcgctacaaaagagttagaacttctggaatgcaaacaaaagattgaagatttgaaaaagcaaacccagcatgaagagcaaaactatactcgtcgggcacgtgaactgcatgaactcaaggagcaagtgagtaaacatttggatccctctctaaatacacctgttaaaaaccgggctttttcaccggtttaccagaatatacctttggaatcacgaactgaaaatgctggtaacagcagccttcctagttctgtcagtaaaccaaagaacatgggtcatcaaagtactaatcagtcaagatctgtgtctccgcaagatattcaagaaaggcgccaaagggacgactcgtcagattcatccaaacagtcactttggagcaaaccattagctctgtttaatcagtttgataaaatcattcagcatgaaattgaaagaactctgaattgggatgactctctttcaggtacgcctgaggtacaggaagggacaccgactagtaatagcgagtcgtccgcgcaacagtacgataatgaagcacctggagctcgccaaaaatctccttcgcaaggatcagtctccaggtcgctttggagctttgttagcgatgtcaaggccggattactcggtatagaagaagaaaacgataatgatgttattactgataacagatgtgatcctgtatataaaagcgatagacagcatgaacagaaaaaaagtacacataaaattacgaaccgggggcaagcagaagatagtggcgacgattctagtttaaacatgaggaaatttaaaacgacaactaagttccagaaagacaatgctgggaataatagtctcacaaatgaaagtggacatcgaacacgagaaaaaaaaagtaaaagaagtagtaacaagctaagttttattggagaacccgataatgataattcctccgtcaaaaactcagttgaaatgacagacttctaa

SEQ ID NO: 77022 - DNA, 852 bp, Saccharomyces pastorianus
atgaatagtaaccgatgccaaacgaatgaggtgaataaatttattagtagtacagaaaaggggccttttacgggcagggacaatacgctctcttttaacaaaatcgggagcagactgaattcaccaccgattctgaaggataaaattgagctgaaatttctacaacactcagaagatttgaatcaatcacggtcctacgtaaatattcgtcctagaaccttagaggatcaaagttacaaatttgaagcgccaaatctaaatgacaatgaaacttcttgggccaaggattttagatataacttccctaagaatgttgaaccgcccatcgcaaatcaaatcgcgaatcttaatataaacaacgggctacggacatctcagacagattttcccttaggcttttattcacagaaaaactttaacattgcttccttccctgtggttgaccatcagatattcaagacaacaggtttagaacatcctatcaacagccacattgattctttaattaatgctgaattttcggaactggaagccagtagtttggaagaagatgtccatacagaagaggaaaattcaggtacgagtctggaagatgaagaaactgccatgaaaggtttggcttccgatataattgagttttgcgataataatagtgccaataaagatgtaaaagaaagactaaacagttcaaagtttatggggctgatgggcagcattagtgacggttctatagttttaaagaaggataacggtacagaaagaaaacttcaaaaacacgtaggtttttgttttcagaattcaggaaactgggctggtcttgagttccatgatgttgaagacagaattgcttaa

SEQ ID NO: 77023 - DNA, 1899 bp, Saccharomyces pastorianus
atgacaacatatttcaagttggtaaaaggtgctaccaagatcaagtcagccccgcccaaacagaagtatctggatccgatactgttggggaccagcaatgaagaggatttctatgagatcgtgaagggtttggattcccgaattaatgacacggcgtggactattgtgtataaatcgctgttggtggttcatttgatgataagggagggttccaaagatgttgcattgcggtactactctaggaacctggagttttttgacattgaaaacatacgtggctccaatggcagtgcgtctggagacatgagggcacttgatagatacgataattatctgaaggtgagatgcagggagtttggtaaaatcaaaaaggactatgtgagagacggctatcgaacactgaagctgaacagtggcaattacggaagctccagaaacaagcaacactctatcaatatagcactagatcatgtggagtccctagaggtacaaatacaagccctgattaaaaacaagtatacacaatatgatttgagtaacgaattgatcatatttggtttcaagctgcttattcaagacctgctagcgctatataatgctctcaacgaaggtatcataactctgctggagtcttttttcgaactatctcatcataatgcagagagaactctagacctgtacaagacgtttgttgatttgaccgagcacgttgtcaggtacttgaagagcgggaagactgcgggcttgaaaatacccgtcatcaagcatatcactaccaaactggtcagatcgctagaagaacatctgatagaggatgataagacgcacaacacttttgtgcccgttgacagttctcaaggaagtgctggggccgtagtagccaaatctactgcacaggaaaggttggagcaaatccgggaacaaaaaaggatactggaggcacaattgaaaaacgaacaagtagcgatttcccctgctctaactactgtcacggcggctcaatcttacaacccgtttggaacagactcttctatgcatactaacattccaatggctgtggctaatcaaacgcaacagatcgcaaataacccatttgtatctcaaactcagccacaggtgatgaatacaccaaccgctcatacagagcccgcaaatttaaacgttcctgaatatgcagcggtccaacacacagtgaacttcaaccctgtacaagatgctggcgtaagtgcccaacaaacggggtactattcgattaacaaccatttaacacccacatttacaggtgcagggtttggaggatactccgtttcacaggatacaactgccgcttctaatcaacaagtctctcattcacaaactggttctaacaacccgttcacattgcacaacgccgcgacgatcgcaacagggaatcctgcacacgaaaatgtcttaaataacccattttcacgaccaaactttgatgaacaaaataccaatatgccgctacaacaacagataataagtaacccttttcaaaaccaaacgtacaatcaacaacaatttcaacaacaaaaaatgcctttgagctcgatcaatagcgttatgacaacccctactagcatgcagggatcgatgaatattcctcagcgttttgataaaatggaatttcaggctcactacactcagaatcatctccaacaacagcaacaacagcaacagcaacaacagcaaccacaacagggttattatgtgcctgcaactgcaggagccaaccctgttacaaatataactgggacagttcaacctcaaaatttccctttctatccacaacagcaaccacaaccggaacagtctcaaacacagcaaccagttttaggaaaccaatatgctaacaacctcaatttaattgatatgtaa

SEQ ID NO: 77024 - DNA, 390 bp, Saccharomyces pastorianus
atgtctacatcatccgtacgttttgcatttaggcggttctggcaaagtgagacaggccccaagacggtgcatttctgggctcctactttgaaatggggtctggttttcgctggattcagcgatatgaagagaccggtggaaaaaatttctggtgctcaaaatttgtcgctgctatctactgcgctgatttggactcgttggtcctttgtcatcaagccaagaaacatcttgttggcttctgtcaactcgtttctttgtctgaccgctggctatcaattgggtagaattgccaactacaggatacggaatggcgactctatatcgcaattgtgtagctatattctcagcggcgccgacgaaagcaaaaaggaaattactacgggcagataa

SEQ ID NO: 77025 - DNA, 786 bp, Saccharomyces pastorianus
atgacaaaggaagaaggtcgtacgtattttgaatctctctgcgaggaggaacaaagtttgcaggaaagccaaacccacttattaaatattttagatatattatcagtattggcagaccctagatcatctgatgatctgcttactgaatccctcaagaagttgcctgatttacacagggagctgataaatagttccatccgcctgcgatacgataaatatcaaacaagagaagcacagcttttggaggatacaaaaactggaagggacgttgcagctggagtacagaatcctaagagtattagcgaatactattctactttcgaacatttgaatagggatactttaaggtacataaatttactgaagcggctttctgttgatttggcaaagcaggtggaagtgtctgatccatcagtgacagtgtttgaaatggataaatgggttccatctgagaaacttcagggtattctcgagcagtactgtgcgcctgatactgatatacgtggtgtagacgctcaaatcaagaactatctagatcagatcaaaatggcacgtgccaaatttggtttagagaataagtattccttaaaggaaagactctccactttgacaaaggaactaaaccattggcgaaaagaatgggacgatatagaaatgcttatgttcggtgatgatgcacattctatgaaaaaaatgatccagaagatagattcattaaagtctgaaataaatgctccatcggaaagctatcctgtagataaagaaggtgacatagttttagaataa

SEQ ID NO: 77026 - DNA, 1557 bp, Saccharomyces pastorianus
atgggattcacacctatagatccgcaccagcaccaaaatgctgctactcttctatgttgtaactgtggtaccccaatcgatgggtccactgggctggttatgtgttatgactgtatcaaactgactgtggacattactcaaggtattccaagagaagcgaacatttcattttgcagaaactgtgaaagatttttgcaaccacctggacaatggatcagagcagaattagaatctagagaattactggccatttgtttgcgtcgtttgaagggcctaacaaaagtcagattagtggatgcttcattcatttggacagaaccccattctagacgtattagaattaaacttaccgtgcagggagaagccatgacaaatactattattcagcaaactttcgaagtagaatacattgttattgcgatgcaatgtccagactgtgccagatcctacactacaaatacttggagggctactgtccaaattagacaaaaagtgcctcacaagagaacatttttgtttttggaacaactgattttgaagcataatgctcatgtggataccatttccattagtgaagctaaggacgggttggatttcttctatgcgcaaaaaaaccacgcagttaagatgattgattttttgaacgctgttgttccgattaaacataaaaagtctgaagaacttatttctcaagatacacatactggtgcatctacttataaattttcatattctgtcgagattgttcctatctgtaaagatgacttggtcgttttaccaaaaaaactggccaaatctatgggtaacatttctcaatttgttctatgttctaagatttctaacactgtccagtttatggatccgactactttgcaaaccgcggatctgtcaccatctgtgtactggagggctccattcaacgccctggctgatgtgacccagttggtggagttcattgttctggacgtggattctacaggtataagcaggggaaatcgtgtcttagctgacattactgttgctagaacatctgacttgggtgttaatgaccaagtctactacgtcaggtctcatctcggtggtatttgtcatgcaggtgatagtgttatgggttatttcattgcaaactcgaattacaactcagatctttttgatgggttaaatatcgattatgtgcctgatgtagttcttgtgaagaaattgtatcaaagaaagagcaaaaagagcagacactggaagttaaagagaatggctaaggaacacaaagatatcgatgcatccttagattacaattcaagagctcaaaagcaagaaatggaacgtgcagaaaaggactacgaactattcttacaagaattagaagaggatgctgaattaagacaaagtgttaacctatacaaaaaccgcgaagcaaatgtacctcctgaagagcatgaaatggatgaagacgaggatgaagacgctccacaaatcaatattgatgaattattggacgagttagatgaaatgacattagaagatggagtcgagaacacacccgttgaatctcagcagtaa

SEQ ID NO: 77027 - DNA, 570 bp, Saccharomyces pastorianus
atggatgataagaaaacatggagtacagtcactttgagaaccttcaatcagctggtaacgtctacgttaattggatactcaaaaaagatggatagcatgaatcacaagatggaaggaaatgcgggccacgaccacagtgatatgcatatgggagatggagatgatacctgttcgatgaatatgctattttcgtggtcatacaagaatacgtgtgtcgtctttgaatggtggcatatcaagaccctgcctggactgattttaagttgtttagcaatttttggtctagcctacctctatgagtacttaaagtactgtgtccataagagacaattatcccagagagtattgttaccaaatagatctctgaccaagatcaaccaagccgacaaagtgtccaatagtattctatatggtttgcaagtgggattctcattcatgctcatgcttgtattcatgacttataatggttggttaatgttagctgtcgtgtgtggggcaatatggggtaattacagctggcgtacttcgtatagtcctgagatagatgacagctccctcgcctgccattaa

SEQ ID NO: 77028 - DNA, 150 bp, Saccharomyces pastorianus
atgataaactacgttaacattacatgtataatatttagcactcgtacgttactagtctttgacacaagtttatatatccccccctttatgttatcgtttattggctacagcctcagtaatcaaaatagtccactatttctatatcattaa

SEQ ID NO: 77029 - DNA, 474 bp, Saccharomyces pastorianus
atgtggccaagcttcttcagaaccacctggcatcaaagatggaccgtaacgggcaccttcctcgccaccggagacaccagaaccaacgaaaagaatacccttcttcttcaattcttcgtaacgtctattagaatctgggaagtgagagttaccaccatcgatgataatatcacccttttccaaaagtgggacgatttggttgatcaaagcgtcaactggagcaccagctttaaccaaaagcataacctttctaggtctcttcaatttggagatgaaatcttcaatggaagtagcaccgatgatagatttgcccttagcttcattggccaagaaatggtcgaccttggattgagttctgttgtaagcacaaacagtgaaaccgtggtcagcagcgttcaagatcaaattttgacccatgacggccaaaccaatcaaaccgaaatcagcagacattttattgtagtttttgtatag

SEQ ID NO: 77030 - DNA, 1470 bp, Saccharomyces pastorianus
atgtctgctgatttcggtttgattggtttggccgtcatgggtcaaaatttgatcttgaacgctgctgaccacggtttcactgtttgtgcttacaacagaactcaatccaaggtcgaccatttcttggccaatgaagctaagggcaaatctatcatcggtgctacttccattgaagatttcatctccaaattgaagagacctagaaaggttatgcttttggttaaagctggtgctccagttgacgctttgatcaaccaaatcgtcccacttttggaaaagggtgatattatcatcgatggtggtaactctcacttcccagattctaatagacgttacgaagaattgaagaagaagggtattcttttcgttggttctggtgtctccggtggcgaggaaggtgcccgttacggtccatctttgatgccaggtggttctgaagaagcttggccacatattaagaacatcttccaatccatttctgctaaatccgacggtgaaccatgttgcgaatgggttggcccagccggtgctggtcactacgtcaagatggttcacaacggtattgaatacggtgatatgcaattgatttgtgaagcttatgacatcatgaagagattgggtgggtttaccgataaggaaatcagtgacgtttttgccaaatggaacaatggtgtcttggattccttcttggtcgaaattaccagagatattttgaaattcgacgacgtcgacggtaagccattagttgaaaaaatcatggatactgctggtcaaaagggtactggtaagtggactgccatcaacgccttggatttgggtatgccagttactttgattggtgaagctgtctttgcccgttgtctatctgctttgaagaacgagagaattagagcctccaaggtcttaccaggcccagaagttccaaaagacgccgtcaaggacagagaacaatttgtcgatgatttggaacaagctttgtatgcttccaagattatttcttacgctcaaggtttcatgttgatccgtgaagctgctgctacttatggctggaaactaaacaaccctgccatcgctttgatgtggagaggtggttgtatcattagatctgttttcttgggtcaaatcacaaaggcctacagagaagaaccagatttggaaaacttgttgttcaacaagttcttcgctgatgccgtcaccaaggctcaatctggttggagaaagtcaattgcgttggctaccacctacggtatcccaacaccagccttttccaccgctttgtctttctacgatgggtacagatctgaaagattgccagccaacttactacaagctcaacgtgactactttggtgctcacactttcagagtgtcgccagaatgtgcttctgacaacttgccagtagacaaggatatccatatcaactggactggccacggtggtaatgtttcttcctctacataccaagcttaa

SEQ ID NO: 77031 - DNA, 930 bp, Saccharomyces pastorianus
atggccagttcgtcacataaccctgtcattcttttgaaaagaatcttatcgctcacagaaagctcccctttcattttgtgcttagattctattgcccagacctcatacaagctcatccaagaattcgtccaccagagcaagagtaaaggaaatgagtatccaattgtgtacatttcgttcgaaacagtgaataaaccatcgtactgtactcaatttattgacgctacgcagatggattttgtacatttagtgaaacaaattatatcatatctaccggctgctactgccacacaggcaaaaaagcacatggtcattatcgattcattgaactatatttctacagaacacataacaaggtttttgtctgagatcgcctctcctcactgcacgatggttgcgacttatcataaagacatcaaagatgagaaccgtacggtaatacctgattggaataacaattatcctgataagttgactttactgcagtttatggccactacaatagtagatattgatgtggtattaacaggcactctcgatactgaggaggtgagtgaattgttaaacgaatttagaattcctcgcgggttaaataacgatatatttcaattacgacttgttaataaaagaaagtccggcaggtcattggaatacgacttcatagtaaattcaaacacccacgaatatgaattattatcaaccactaagcaagaagaggagagcagtagtaacggactggagacacccgaaatgttgcaaggattaacaacattcaacctaggaacatccaacaaacagaagctggccaaagatcaagtcgcattgccttttctggaggcacaaagctttggacaagggggtgctattgtttatgagtacgaaaaggatgacgattatgatgaagaggatccatatgaggatcccttttaa

SEQ ID NO: 77032 - DNA, 573 bp, Saccharomyces pastorianus
atgtccggtaaatggagactagtgctgaccgggataggcaatccagagcctcagtacgctggtacccgtcacaatgtagggctatatatgctggagctgctacgaaagcggcttggtctgcaggggagaacttattcccctgtgcctaatacgggcggcaaagtgcattatatagaagacgaacattgtacgatactaagatcggatggccagtacatgaatctaagtggagaacaggtgtgcaaggtctgggcccggtacgccaagtaccaagcccgacacgttgttattcatgacgagttaagtgtggcgtgtggaaaagtgcagctcagagcccccagcaccagtattagaggtcataatgggctgcgaagcctgctaaaatgcagtggaggccgtgtaccctttgccaaattggctattggaatcggcagagaacctgggtcccgctctagagaccctgcgagcgtgtcccggtgggttctgggagctctaactccgcaggaactacaaaccttgcttacacagagtgaacctgctgcctggcgtgctctgactcagtacatttcatag

SEQ ID NO: 77033 - DNA, 1335 bp, Saccharomyces pastorianus
atgggaaagctattacaattggcattgcatccggtcgagatgaaggcagctttgaagctgaagttttgcagaacaccgctattctccatctatgatcagtccacgtctccatatctcttgcactgtttcgaactgttgaacttgacctccagatcgtttgctgctgtgatcagagagctgcatccagaattgagaaactgtgttactctcttttatttgattttaagggctttggataccatcgaagacgatatgtccatcgaacacgatttgaaaattgacttgttgcgtcacttccacgagaaattgttgttaactaaatggagtttcgacggaaatgcccccgatgtgaaggacagagccgttttgacagatttcgaatcgattcttattgaattccacaaattgaaaccagaatatcaagaagtcatcaaggagatcaccgagaaaatgggtaatggtatggccgactacatcttagatgaaaattacaacttgaatgggttgcaaaccgtccacgactacgacgtgtactgtcactacgtagctggtttggtcggtgatggtttgacccgtttgattgtcattgccaagtttgccaacgaatctttgtattctaatgagcaattgtatgaaagcatgggtcttttcctacaaaaaaccaacatcatcagagactacaatgaagatttggtcgatggtagatccttctggcccaaggaaatctggtcacaatacgctcctcagttgaaggacttcatgaaacctgaaaacgaacaactggggttggactgtataaaccacctcgtcttaaacgcattgagtcatgttatcgatgtgttgacttatttggccagtatccacgagcaatccactttccaattttgtgccattccccaagttatggccattgcaaccttggctttggtattcaacaaccgtgaagtgctacatggcaatgtaaagattcgtaagggtactacctgctatttaattttgaaatcaaggactttgcgtggctgtgtcgagatttttgactattacttacgtgatatcaaatctaaattggctgtgcaagatccaaatttcttaaaattgaacattcaaatctccaagatcgaacagtttatggaagaaatgtaccaggataaattacctcctaacgtgaagccaaatgaaactccaattttcttgaaagttaaagaaagatccagatacgatgatgaattggttccaacccaacaagaagaagagtacaagttcaatatggttttatctatcatcttgtccgttcttcttgggttttattatatatacactttacacagagcgtga

SEQ ID NO: 77034 - DNA, 402 bp, Saccharomyces pastorianus
atgcctagtgtagatatagatgctagtcaatggcagaagttgacacagtcaagagaaaagcagaccacggtgataacaccgcttgggatgatgatgctggagattcaaggtgaactagagttgcctaaggactttgcgtcgctggcgaggagagattctccaaatgagggaaggttcagtgaacaggacggcgaaactttaatacgatttgggtcgttacagattgacggagagagggccacattgtttgtcggcaagaaacagcgtttactggggaaggtgacaaagctagacgtaccgatgggtataatgcatttcaattcgaaagataataaggtcgaattagttgatgtaatgaaatataaggttatctttaaggataggcctctacctattatgtaa

SEQ ID NO: 77035 - DNA, 837 bp, Saccharomyces pastorianus
atgtttagtgcattaggtaaatgggtccgaggctctcgcaatgataaggactttgtgacgaagtataccgcagatttatcacaaataacttcacagatccatcaattagatgtcgcgttaaagaaaagccaatccatcttgagtcaatggcaatcaaatctgaccttttatggtattgcgtttacggtattggccctgagctacacatattgggagtaccatggttatcgaccataccttgtggtgactgcgctactatgcataggctcgctaatcttgttcaaatgggcattaatcaaactctatgcattttataacaacaataggttacgcaagttggcaaaactccgtgcaattcatcaaaagaaactggaaaagttaaaggaagagacccactataatgctacaagctcaatcatccaacggttttcttccggtgaagatcaaaacgacgatgccatggtacttctagatgatgaattgaatgctaaataccaagaattaaacaatctaaagacagagctagaaaaatttaagaaggaaagccatgtaaagggcctaaagaaggaagacagcgatgcatggttcgacaaaatcatcagcgtactggcaggcggtaatgaattggactcaacaagttcgctctctcccttcaaaaaaatcatatgtccacagtgtcattggaaatccaattgctacagattggccagtaagccaatcatctttatctgtcctcactgtaaccacaaaatagacgaagtaaaggaaagagaagacgccattgaaacaaaacaaccggcacagccttcgcagtcggagaaggaaaaaactaaatga

SEQ ID NO: 77036 - DNA, 966 bp, Saccharomyces pastorianus
atgactcgtcccccattggttcgtggaatcttttcgttaggtctttctgtagccgttttgaaaggtgttgaaaaaacagttcgtaagcatttggaaagacagggatggatagagccccagaaagtggactatgagttaattttcactatagataggttgaaaaacttggtagataataagcgtgaggctttaactgcggaacaacccgacgctggtgaactgagctggcgtaaagtatttaatttcatttccagacaatccagcgaattggacacacgaatatacgttcttatactacacctatcctttctactacctatcgcgtggactgtactggacggtgatcgcgagaccacgctagaagataaggataacgattgtaatgtagatcttattgaaaacgaaaggaggctgaagcattacaacgatggtgaaagagcagtattgcaatttggtaaaaatagatccgaacctattatattaagctataaggacatgaacgttttggaaggggaacatgagtttacctccaaagaggaacacagtaacagccatttgacaagcaagagcgaaaatgcactaaaccaagtagggagtgaacatttgttaggttgtcacctggaaaagcaattggaagaagacaaaaatgaaccgaatggagaagcagacggtgaggatgataataaccgggaaaaggattgcagctccagttcagaagttgagtcgcagagtaaatgccgaaaggaaagtactgcagagcctgactctctctcacgggataccagaacaacctcttcccttaaatcaagtacatcattccccatatcattcaagggctcgatagaccttaagtcgttaaaccagccttcatcattgttgcatatacaagtatctcccacaaaatctagtaatctagatgcacaagtgaacactgaacaagcatactctcaaccatttagatactaa

SEQ ID NO: 77037 - DNA, 1728 bp, Saccharomyces pastorianus
atgggctcctctttggatttggtggcgagcttctcgcatgattccactcgttttgcattccaagcaagcgtcgcacaaaagaacaatgtggatatttatccattaaatgaaactaaggattatgtggtcaatagttcattagtgagtcatattgactatgagacaaacgatatgaaggtttcagatgtaatcttctttgggtggtgtagtgatttgatagatacgcagtcatccaatatcaaaagaaaattagatgaagatgaaggaactggtgaatcaagtgagcaaagatgtgaaaactttttcgttaacggatttcctgacggaagaattgttgtttactcttctaatggtaaggatatagttaatatcatcaagaataaaaaagagattttgggagcagacacagacgagtctgatatatggattttggatagtgataaagtcgttaagaaattacagtataacaattcgaaacctctaaagacttttacgctagttgatggtaaagatgacgaaatagttcatttccaaattctgcaccaaaatggcactttattggtatgcattattactaaacagatggtttatattgttgatccatcaaagagaagaccctctactaagtatagttttgaaatatcagacgctgtagcatgtgaattttcttcagacggtaagtatctgttaattgccaacaacgaagaattaatagcttacgacttgaaggaagattcaaagctgatccaatcatggcctgtccaagtgaagacattgaaaactttagatgatttgataatggctttgactactgatggtaaaattaataattataagattggcgaagccgacaaagtttgttctatagttgtaaatgaagatttggaaattatagatttcacgccaataaacagcaagcaacaggttctaatttcatggctaaatgtcaatgaacccaactttgaatctatttctttaaaagaaattgaaactcaggggtatattacaataaacaaaaatgaaaaaaataatgctgatgaagcggaccaaaagaaattagaagagaaagaagaagaagctcagcctgaagttcaacatgagaagaaggagactgaaactaagataaacaagaaagttagtaaatcagatcaagttgaaattgctaatattctctcatcgcatttagaagctaattcaacagaaatattagatgatctgatgtctggaagttggacagaaccagagattaaaaaattcatcttaaccaagatcaatacagtagatcatctaagtaagatatttttgactatatcaaagtcaataacacaaaatccatggaatgaagaaaatttacttccgttgtggcttaagtggttgctgactttgaaaagtggggagttaaattctataaaggataaacatacaaagaaaaattgcaagcatttaaaatctgcattaagatcttcagaggagatcttgcctgttctactcggtatacaaggtagattagaaatgttgaggaggcaagcaaaattgagagaggatcttgcacaactatctatgcaagagggtgaagatgatgaaatagaagttatagagcattcaaatgtaattagtaatcctttgcaggatcaagcatcgcctgttgaaaagcttgaaccagattcaattgtttatgcaaatggagaaagtgacgaatttgtcgacgcatcggaatacaaagattga

SEQ ID NO: 77038 - DNA, 966 bp, Saccharomyces pastorianus
atggacagaggaaggtgcgccaatatgctaaaatcactccagcgaacactagctaaatgtcagaaatctccatcaaccaaccattggcaatgtttcaaaagaaattttactagtatacgagccactaaataccctgggcgttctaattcgacgttccactattggccctggtttgcggcgtcaacattgctcgctacttcgttatactaccgtgatcgtccggtacaaaatgacgataaaactgatgcttttccttctcatactgaatcgatacaggtagactctagcgtatcagatttcccactaacgattactgctttaaatttccctgtctctacaacttttaaattactgggatatggtcaaaggcacgtcacgtttttgaggttcaaggtctatgccttgggtctttatctagctgaaaatgacgaaaaccttgtttcagacactctaaatgaaacttatttacataaatatttccttgatgtggatgattctaagactcctaaggagaatctagctagattattgaaacgtgatgactcaaaatccgttatgatgattgatgacttactggattctggaatgagaatgctagccaagataactcccgtaaggaatacagattttaagcatcttaaggagggcctggtcaaaactatttctaaacatcccgatgtggccaataataaagacacactggcgaagggcctaagtgagttaaatgatgccttttcacgtaagggatccgtcaggaaaaatgacgatttgatcatcgaattattagccaacggcgctttacaattttcatatcatgacagtaaaaacaacgaatttgaggtcatgggagtagttaataatcaactcgtcggaaaattcttatttagccaatatttatgtggcgaaaaatctccttctccacaagccaaaaaaacagctatcgacaaattgatcacactcctctaa

SEQ ID NO: 77039 - DNA, 933 bp, Saccharomyces pastorianus
atgcgtttaatcagtaaagttttggtgaaaacaaattgcctagaggtaggtatgaggagggccccacaatggtattctcactactctactacagcgggcaatgctcgtgtgaacaagaagggcagcaaagtagtgcctgtgttaacagggttagcactggcatccatattcgcgaagaaatggtatgacgattcccagatcaaaaaggcggatgccaccagcgttgcagtggacgcatccatctctgcgttccctaagaagatgggccccccacagtggcccttctccacgcaatatgagctgattggtaagggtgtacgttgtgtctcatcgatcactttcaaagcatatggtctgggcatatatgtggccgctgaagacaaacatctggtctctgaagtgctggactcaaagttcctgtctcaggcgttcatcgacactgcggcacccccatcaccggaaaactcacatcaggataatttgcgtgcggctttgaacgatcctgctaaggcccccatcctgattaataacctcttagacagcggaatcagactaatgtccaagaatactccgataaaagcaggttccttcaagttattgatggacggcaccaaaaagagcgtcctaaagaacccagattctcagtctcaagacaaagaccggctggaagctggattccaagaattgcatgactgtttcaggagcgtaaaaggacttgtggctcgagatgatgattttttcattgagctaaataaggactgctctatgaatttgtcttactacgcaagaaagaaggatgaatttgtgatattgggcacagtgaaggaaccccttattggaaagctcttatttgcccactacctagctgctgtggatcctccttctccggaggctaggaaggaagtaatcgatgcactcgtctctctatcttag

SEQ ID NO: 77040 - DNA, 1194 bp, Saccharomyces pastorianus
atgtcgcctttgagaaagacggttcctgaatttttggcacacttaaaatcactgccaatttcaaaaattgcaagcaacgatgtgttaacaatatgtgttggtaacgagtcagcagatatggactcaattgctagtgcaatcacttattcgtactgccaatacatatataatgaaggtacttactcggaggagaaaaagaaaggaagctttattgtcccaattatcgacattcctagagaagacctcagtttaagaagagacgtaatgtatgtcctagaaaaactgaaaattaaggaggaggaattattcttcattgaagatttaaagagcttgaagcaaaatgtctcccagggtactgaattaaactcttacttggtagataataacgatacaccaaagaatttgaaaaattatatagataacgtcgttggcattatagaccaccattttgacttgcaaaaacatttggatgctgaacctcggattgtaaaagtgtccggcagttgctcatcgctggtttttaactactggtatgaaaaattgcaaggtgaccgtgaagtggtgatgaacattgcaccacttttgatgggggccatcttaatagacacttcaaatatgaggcgcaaagtcgaggaaagtgataaattagctatcgagagatgccaagctgttcttagtggtgcggttaatgaagtgtctgcgcaaggtttagaggacagcagtgagttttataaagagataaaatcaagaaagaacgatattaaaggattttcggtaagcgatattctaaagaaggactacaaacaattcaatttccaaggaaagggacacaaagggttagagattggtctttcatcaatagtaaaaagaatgtcttggctattcaatgaacacggtggtgaagcagatttcgtcaaccaatgcagaagatttcaggcggagagggggctcgatgtattggttctgttgacttcatggaggaaagctggtgattcacacagagaattggtcatattgggagactctaacgtggtacgtgaactcattgaaagggttagcgacaagctccaacttcaattatttgggggcaatcttgatggaggtgtggcgatgtttaagcaactgaacgtcgaggccaccagaaagcaagtcgtcccctatttagaggaagcgtactcaaaactggaagagtga

SEQ ID NO: 77041 - DNA, 1809 bp, Saccharomyces pastorianus
atgatactaaagcttgtacactgtttagttgctcttacaggattaatctttgcaaagccatatcaacaacaacaggcagttttagcgccgtcgcaggatgtaccattaagagatatccatataggggatataaattttatccatacaaccgatactcatggctggttggggtcccatctatcacaaaacgactatgatgctgactggggagatttcgttgcatttgtagatatacttagagaaaaaattttacaacagtccagagacgtaatagtcatcgacactggcgacaaacgagacggtaatggtttgagtgatgctacttggccccccggcctacgaagctcggagatattcaaaatgatggattacgatcttttaacgttaggtaatcatgagctatatacagctgaaagtgccatactagagtatagaggaacttctcagtcctcaaaattcaaagacaaatatgtttgcagcaacgtagaatttattgaagatgacggaacaagggttcctttcgggaataaatacattacattcgagactcccataatgaaacaaagagtcctggcattatcatttttgtttagttttcaaagagcaaataacagagccatcgtaacaccaccattggaagaaataactcaaaaaagctggttccaaaatatggttgagacaaacagagaggaggaaatcgacctaattattgtctttggtcatttgcctgccactgaccctacagagcgtgaaatgcacaaaattcatgctctaataaggaaatactacccaaatactgttatacaatattttggagggcacactcatatcagggattttgtacagctggactcaaaatctacttgtttacaaagtggtagatttgcggaaactgtgggattcttgtcaattaatatgactgaccctgtggacgccgaaagtcctattttctcaagaaggtatattgactttaacaaggaagctttcaaataccatttgagcaaactagggcatgactcgaatgttccagtctcaacgaaaaagggtaaaactatttctcgtttggtgaatgatctgcgccatgaactaaatttgaacgagaaactggggtacattcctcaaacttactatgtttcaacaaggccattaaactccgaagagaatctttatcatttgatcacgcataagattttacccaatttaattcctcccaaaaactatgaaccttcgatgagtcgtttcattttgattaacactggctctgtcaggtacgatctttacaaaggcccatttacaaaggatactgagtatatagtgatgccattcaataatgattggcgcttcatcacagttccattggtcgttgcctccagggtggaaacctatttgaacaagggccctgtcattgcctcattaggaataccatcatcgtctcatcacaaacagcattttggcggttttcagaagtgtcccttcatcaataatccaaatttaagcgaaggctacaccacagaagacgatttcgggtgtcatggtgatgacacacctcacaattcacaaagagaatacgatatccccaatgtagtgcaatgtaaagaggtgaagaaaatgcaagaagaggaagctgatccgtcgaagatggttcatgttatcttctattcctttatggaactcgatatattaaacgccgtaaattctatcataaatgatttaggattacgtatggagaacttgaccaccaatgactgctcccattatggtggtgattcaaccaaaaagttattacgggattacttttctcaattttag

SEQ ID NO: 77042 - DNA, 2391 bp, Saccharomyces pastorianus
atggtttgctgcttatgggtgcttctagcattgttgcttcatctcgatcatgtagcatgcgaagacgatgcgtactcattcacttctaaagaacttaaggcttacaagcaggaagtgaaggagctgttttatttcggcttcgacaattatttagagcatgggtatccatatgatgaggtaaaacccatttcatgcgttcctaagaagagaaactttgaagatcctactgatcaaggcaccaacgatatattgggcaattttacaatcactttaatagattctttaaccactattgctatactggaagaccggccgcagtttttgaaagctgctcgacttgttgaaaggacatttcctgatggcaatttcgatattgattccacaatacaagtttttgaaattactatacgtgttatcggatcactactatcatcacatctttatgctacggatcccacaaaggcagtgtatttaggggacgattatgatggctcactgttacgtctcgcccagaatatggcagataggctcttacctgcatatttaacgtctaccggattacctatgccacggagaaacatcaaacgaaaatgggatgtctctgaatttccagattttttggagacagagaataatgtggccgctatggcgtctcccatgttcgaattcactgttttatcttacttgacaggcgatcccaagtatgagaaagttaccagatacgcatttgataaaacatggtctcttagaactggtttggatttgctacccatgtcctttcaccccgaaaaactaacaccatatacgcccatgactggaatcggcgcctccatcgactcccttttcgaatacgctttgaaaggtgctattttatttgatgattcagaattaatggaagtttggaacgtagcatacgaggcattaaagactaactgtaaaaacgattggttttttgctaatgtaatggctgacacagggcatttgtttgttccctggattgattctttgagtgcttttttctccggtttacaggtgcttgctggtgatttggatgatgccatagcgaaccatttaatgtttttaaaaatgtggaacacctttggcggtattcctgaaaggtggaactttagccctccggagtttcccccactatctccattagagcgatcgggagctgttgctttggataatatcctccccttagaatggtacccattaagaccggaattttttgagtcaacctatttcttatatagagctacaaaagacccgttttacttaaatattggggtacatctgctaaaagacctcaagcaacgatttaagtctaactgcggatttgcaggtttccaaaatgtaatcacgggcgaactgcaagatagaatggaaacatttgtgttgagtgaaactttgaaatacctgtatttattatttgatgaagagaacgaattacataacagcgctagtgacgtaattttcagtacagaagcccatccaatgtggttgccccaagaagtgaggtccaactataaacgtaacgctaagtttaacaactctgtctactcgtcgcacttggaaatttgccagaaaaaggacagggaacaagctggagagaacacattgagccaaagaattgtggggttcgccaaatcgatctttcataaaggtctaccagacgaagaggctactgatccaattatagactataccattgatactgaacttcccggtacatgctctataaagcctcatcatgtaattggtgacgaattttggtattctccaatgttgagcaattttgacagattattcgagattgactcccggttcgctgccacgctaattaaaccttcacacatgcataactataatgcaattgaactagaacctggattttataacaggtggtccaatccgcaatttagcacgtgcctgatcccacccaccaccgaaattttcgaactactattcgaccttcctggatatcatcagttgaatccattaatgttagaaaacaaaactattacatttgaaacctttggaggtaggtcgaggttgaagatcgaaaaattgcaaatctaccaaattgattactatggagacttaatcactgcatcgacattccaagacgtctcccgcaaggatattttctcgaatgcatgcgatgcagtggcaagcttgtattctcccacttatctttacagagtagtagccatcaacggacgcatattgcctcgccatggaagtgtacaaatcaagaaacatagtcctgtgctcacttccaatggcacaagagaggaagacgaattcaaaatggatggcatcggaattaatgaccattcccaactcatgttagaatgcacgcccatcatcaacttatttattgtatga

SEQ ID NO: 77043 - DNA, 1869 bp, Saccharomyces pastorianus
atgagcttttccactataaatagcaacgtcaataaaaccaccggcgatagcaataataacaccaccgagaacagttcgactgcagaccttttaggaatggacttgttgcagagcgggcctcgactgatgaacacgatgcagccaaacaactcttctgacatgctgcacattaacaacaagactaataacgttcaacaaccagctggaaacacaaatatcagcagtgctaatgcgggagcaaaggctccagcaaatgagttcgtaagaaaactgttcaggatactggaaaacaacgaatatcccgacattgtaacttggactgagaacggcaaaagtttcgtcgttttggacacaggaaagttcactacgcatatattgcctaatcacttcaaacattcaaattttgcatcttttgtaaggcaactaaacaagtatgactttcacaaggttaagagaagtcccgaggaaagacagagatgtaaatatggcgaacaaagttgggagtttcagcatccagaatttagagtccattacgaaaaaggtctcgataacatcaaaaggaaaattccggcgcaaaggaaagtgcttttggatgaatctcaaaaggctcttttgcatttcaatagtgaaggcactaaccccaacaatccttctgggtctcttttgaatgaatccaccacagagctgttgttaagcaataccgtaagtaaagatgcatttggaaatctaagaaggcgagtagacaaactacaaaaggagttggatatgtccaaaatggagagttatgctactaaagtagaactacaaaagttgaactcgaaatacaatacggttatcgaaagtttgataacattcaagaccataaatgaaaatttactcaacaacttcaacactctgtgttccactttggcaaataatggtattgaagtgccaatatttggcgacaatggaagccgtaacccaactggtaataccaacccagcaacaacaacagctatccaaagcaacaacaacaccaacaatgcttctccggcaacatctacagtttccttacaactacctaatttacccgatcagaatagcctaacaccaaatgctcaaaataacacagtcacgctacgaaaaggtttccatgtactgttggtggaagatgacgcagtgtctatacagttgtgttcaaaatttttacggaaatatggctgtactgtccaagttgtcagcgacggtctttcagctatctcaacactagagaagtataggtatgatttggttttaatggacattgttatgccaaacctagatggtgccacagcgacatccattgtcagaagttttgataatgagactcccatcattgccatgacaggtaacattatgaatcaagacttgatcacatacttacaacatggaatgaatgatatcttggccaaaccattcacgagggatgatttacactcaattttaatacgttatctaaaggaccgtattcctttatgcgaacagcaattaccacctcgcaactcttcgccacaaactcattccaacaccaatactgctaattcgaatcctaatacgattaatgaacagtcgttagccatgttaccacaagataatccgtcaactactacccctgttaccccaggtgcctctatatcttctgcacagcatgttcaacaaggtcaacaagaacagcagcatcaaattttccatgctcagcagcagcagcagcatcacaacgccattgctaatgctaggtcagacgtagccataccgaatttggaacatgaaatcaacactgtaccacattcctcaatgggttccactccgcaattaccacaatctacacttcaagaaaacctgctatcataa

SEQ ID NO: 77044 - DNA, 708 bp, Saccharomyces pastorianus
atggataccaagctatctgtaacaggagctaaaaaatttcagagaaaagcttctggtttgggaaacgaaggaactccaatcgggaatgaggagagcacaaataaagctaaaaatggaaataaaaagcggaataaaaatcgaaacagaaataagaagacagagacaaaggaacaaaatgaacctaaacctgtgactggaggggaagaagtgagagtcgagaaatctcaagcgaaaaacagaaggcggaaaaacaataatggagctaataaaaagaataccctacactactcaaaggaaattaatgtagaagagcgaaaacaaatcgcaaaaaggcaagaagaaatcgaacaatgcattcacaccttatccgattttaaactgtttaaaaagggtaagcacgttacctcatatggctatcgaatctcccccatgacagactccggtaagatttctttgaaaattttattcaacatacctttggattatccaaaggccccaataaaactaacgatgaaaagtaatgaagaagattcctcttacatggacaccgtgatagcgaatttcaactggaaagcccgtcaattggttaaggaggactggaggatattatctcaaataaactatttggttagtgagttagaaatattgaaaatggaaaattataaacaaattgataaactacgtaatagcttttacaaaaccatataa

SEQ ID NO: 77045 - DNA, 1254 bp, Saccharomyces pastorianus
atgtcacaaagactacaaagtatcaaggaccatttggtggagagcgccatgggtaagggtgaatcgaagaggaagaactcgttgctggagaaaagacccgaagatgtagttattgtggctgctaacaggtctgccatcggtaaaggttttaaaggtgccttcaaagatgtaaacacagactacttattatacaactttctcaatgagttcatcgggaggttcccggaacctttgagggctgatttgaacttaatcgaagaagttgcctgtggaaatgttctcaatgtcggagccggtgctacagaacacagggctgcatgcttggcaagtgggattccctactcgacgccatttgtcgctttaaacagacaatgttcttcaggtttaacggcggtgaacgatattgccaacaagattaaggttgggcaaattgatattggtttggcgctgggagtggaatcaatgaccaataactacaaaaacgtcaatcctttgggcatgatctcctctgaagagttgcaaaaaaaccgagaagcgaagaaatgtctaataccaatgggcattactaatgagaatgttgccgctaatttcaagatcagtagaaaggatcaagacgagttcgctgcgaattcatatcaaaaagcttacaaggcgaaaaatgaggggcttttcgaagatgaaattttacctataaaattaccagatggctcaatttgccagtcggacgaagggccacgccctaacgtcactgcggagtcgctttcaagcatcaggcctgcctttatcaaagacagaggaaccacaactgcgggcaatgcatcccaggtctccgatggtgtggcaggtgtcttgttagcccgcaggtccgtagccaaccagttaaatctgcctgtgctaggtcgctacatcgattttcaaacagtgggggttcctcctgaaatcatgggtgtgggccctgcatacgccataccaaaagtcctggaagctactggcttgcaagtccaagatatcgatatttttgaaataaatgaagcattcgcggcccaagcattatactgcatccataaactgggcatcgatttgaataaagtaaatccaagaggtggtgcaatcgcgttaggccatcccttgggttgtactagcgcaaggcaagtagctaccatactaagagaactgaaaaaggatcaaatcggggttgttagtatgtgtatcggtactggtatgggtgccgccgccatctttattaaagaatag

SEQ ID NO: 77046 - DNA, 4119 bp, Saccharomyces pastorianus
atggactcttccccgaacaagaagacgtaccgctaccctcgcagatcgctgtcacttcacgcgcgtgatagggccagcgaggcccgtaaattggaagaattgaatttgaacgatgggctggttgccgctggcttgcagttggtcggtgtagcgttagagaaacaaggtacaggatcacatatatacatgaaacagaagaatttctcagctaatgacgtttcttcgtcaccaatggtttccgaagaagtgaacggatcggaaatggattttaatccgaagtgcatgcctcaggacgcatcactcgtcgaaagaatgtttgatgagcttttaaaagatggaacttttttttggggggctgcttataagaatttacaaaacatctctctacgaaggaaatggttattgatatgtaaaatccgtagttccaatcattgggggaaaaagaaagtgacttcgagcacgacatactctacacatttggccactaatgaactagctgaaaacgcacactttttggatggcctagttagaaacctttcagcaggtggcatgaagttatcgaaggctctatataaactagaaaaattcctgcgaaagcaaagctttttgcaactttttctcaaggatgaaatttacttgacgacattgatcgaaaagactttgccactcatatccaaggaattacaatttgtttatcttcggtgctttaaaatactgatgaacaacccactggcgagaataagagcactacattctgagcctttaattcgctggttcaccgagcttctgacggatcaaaattctaatttgaaatgtcagttactttctatggagttacttttattattaacgtacgttgagggttccacgggttgtgagttgatatgggaccagctttccatattattcaccgattggctagaatggtttgacaaaatccttgcggatgatattgcaattcattcatccctttatttgaactggaaccaattaaaaatagactattcgacaactttcctactgctaataaactccattctgcaaggtttcaacaacaagactgcactagaaattttgaattttttgaaaaagaataatatacataacactatcacatttttagaactggcctataaagatgatcctaatagtgtcgtgatcatggaacaaataaaacaattcaaatccaaagaatctgcgatatttgactcgatgataaaaactaccaacgatacgaattcgcttcacccaacaaaagatatcgcaagaatagaaagcgagcctctatgtcttgaaaattgcctgttattgaaggcaaaagatagtcccgtagaggcaccaataaacgagattattcaatcgctgtggaaaatcttagactctcaaaaaccatactcagaatctattaaactattaaaattgataaattctttgctgttttatctcatagattcctttcaagtgtcaacgaatccttcttttgatgaaaccttagagtccgcagaaaatgtggattatgtttttcaagattctgttaataaattgttggattctctacaatctgatgaaattgctagaagagcggtcacagaaattgatgatcttaatgctaagatttctcatttgaatgaaaaattaaatttagtagaaaatcatgataaagatcatctaatagcaaaactagatgaaagtgaatctttgatatctctgaaaaccaaggaaattgaaaatctgaaactgcagttgaaggcaaccaagaaaagactagaccaaattaccacgcatcaaaggttatatgaccagccaccttcattggcaagtagcaacttgagtattgccggctcgataataaaaaataatagtcatggaaatatcattttccaaaatttagcaaaaaagcaacagcagcagcaaaaaatttctctgccaaagcgttcaactagtctactaaaaagtaaaagagttacgtccctttcatcatatttaactgatgcaaataacgaaaatgagtcccaaaatgaatccgaagataaatcaaaagactcattatttcaaagatctacgtcaaccattaattttaatatcccttctatgaaaaatattactaatatgcaaaatgtctctctaaattcgatactttcagagttggaattttcaaatagcctaggaacacaacctaattaccaatcgtctcccgtgttgtcttcggtttcttcttcaccaaaacttttccctcgactttcctcagatagtcttgataatggaatccaactagtacctgaagttgttaaactacctcaacttccgccgccccctcctccacctccccctcctccacttccacagtctcttttgactgaagcagaagctaaaccggatggtgtttcctgtattgcagcacctgctccgccaccccttccagatctatttaaaactaaaacttgtggcgccgttccaccaccaccgcctttacccgagtccttgtcgatgaacaaagacccctccaatcacgatttagttactcctccagctccacctttaccaaatggtcttctttcttcctcctcagtgtctatcaatccaacgacaaccgatttaaaaccacctccaactgaaaagcgattgaagcaaatccactgggataaggtggaggatatcaaagacacactttgggaagacacgtttcaacgccaagaaacaatcaaagaattacaaactgatggtatattctctcagattgaagatatttttaagatgaaaagtccgactaagattgtaaataaaaggaacgcagaatcttcaattgccttgtcttcaaacaatggcaagtcttccaatgaactgaagaaaatttcattcttatcaagagatttggctcagcaatttggtattaatttacacatgttttcccaattatctgatatggaatttgttatgaaagtattgaactgtgataacgacattgttcaaaatgttaacatactgaaatttttttgtaaagaagagttagtaaatataccaaaaagtatgcttaataagtacgagccatattcacagggtaaggatggtaaagcagtaagtgacttacaaagagctgacagaatatttttggagttgtgtatcaatttaagattttattggaatgtaagatcaaagagtctgctgacattatcaacatacgagagagattattacgatttgattttcaagttacaaaaaattgatgatgcaatttcacacttaaatcgttcacctaaatttaaaagtttgatgtttattattacagaaataggcaatcatatgaataaaagaattgttaagggtatcaaattgaagtcattgactaaacttgcctttgtcagatccagtgttgatcaaaatgtatcatttttgcattttattgaaaaagtcataagaataaaataccctgatatatacggttttgtggatgatttgaagaacattgaagatttaggtaaaatctcactagaacacgttgaatcagagtgtcatgaatttcataaaaaaattgaagatttagttactcagtttcaagtaggaaagctatccaaagaggagaacttagaccccagagatcaaattattaaaaaggtcaagtttaagattaatcgggccaaaacaaaaagtgaattattgattggtcaatgtaaattaactttaatagatttgaataaattgatgaaatattacggtgaagatcccaacgataaagagagtaaaaacgaatttttccaaccctttattgaatttttagccatgtttaagaaatgtgccaaggaaaacattgaaaaggaggaaatggaaagagtgtacgaacaaaggaagagcttgttagagatgaggacaagcaataataagaaaagcaatggaagtgatgaaaacgatggtgaagaagtaaacagggatgctgttgatctactcatatctaaattacgcgaagtaaagaaggacccagaacctctaagaagaagaaagagtacaaaactcaatgaaatagccattaatgtacatgaaggagatgtaaaaacgagaaaggatgaagatcacgttttactagagagaacgcatgctatgctgaacgatattcaaaatatatag

SEQ ID NO: 77047 - DNA, 594 bp, Saccharomyces pastorianus
atgatgttaagactagtaactaaagggttgccgaaagtgacaccttctgtagctaaggctgtgctagtgcgtggttccttgctgcactcattctctaccagcgctagattcaataatagtgtcgctgaagatgaggccaagatcgttttgaaagacaagaacaggccattgagaattgacagagaattgcctgacccaaccacggagaggagaaagcgaatagctggatttttgttgttttctgtggccattgggtccgcactatctttgatcttcaactatgaaaagacggagtcccccattatctccaacacgctgtattatataagacggtctccagcaactaaaaacatactgggtgagagcatagaatttgatggtatcatcccttgggtttacggtgaactgaactctgtgaagggtaggattaacattacgttttatatcaagggggacaaaaacgttactggaaccgttagactggttgcagatagaaacactcacgacgaagagtttttgattcatgaatggagcgtcactgccgctggccaaaagattgatttgctagctgaaaataccaagacaccaatttaa

SEQ ID NO: 77048 - DNA, 402 bp, Saccharomyces pastorianus
atggccacagaaaacaacaaaaatccagctattcgctttctcctctccgtggttgggtcaggcaattctctgtcaattctcaatggcctgttcttgtctttcaaaacgatcttggcctcatcttcagcgacactattattgaatctagcgctggtagagaatgagtgcagcaaggaaccacgcactagcacagccttagctacagaaggtgtcactttcggcaaccctttagttactagtcttaacatcatgtatagtctgttttatcttttacttttatgtcgtggactggtacggagagaaagatcgaactgttttaaaactgggattaaaatgacaagaaggcgctttctttctctccacaatgatcaaaacaagaacaagcaaaacgcaaagagatga

SEQ ID NO: 77049 - DNA, 3225 bp, Saccharomyces pastorianus
atgctagacgatgataagggcacggccatgcatccacatataacgccgttcacgcctgagtactcaaatgaattactgcgaagggtccaggacctgtaccacgaagatatcaagcactactatccgcagctaaaactggagaagctgctggaccttctggagcatacagagtacctattcgagttatatctagattcaatccatcacgataggcccaacgatgcactgacagcgtttatcattggatgctactacgtgttcttaattattccacaatctttgcagttccaaacacgaaacaagtcctacagcatctatacagatctaaaaaagatgtatgagaatgaaatgaacatgaccaatgttgtgcttatggtgaagaaagaaatcggtgtggtcctagatgaatcggttaaacacggggccggtattgagcacagaatcaccaagaagagggcattttcagttccagctgacgatctttcaggtcaggtagcttcactatcacttgacaccgcggcaccgcaagatcatggcctcaaaggcacgtttactgaagacgacgcagaacaatcttcacctgtttggacagcaccaaacttagagcccaacgaccaattgaaactggctttattgcccgaagtgataccaacaccagcttttcgtgagcctgaaagaaagacaagtgttccagtgagaccatctgttttattggaagatgtgccctccatataccacgaggatgacactagtttcgcatctttgaacccaccatttcgagaaatcactgcagatagatcagtaactcatcgaaaggattcttaccattctgtttatatggtggatagcggcaacctcaaggaagacaatgatgatctgttcaacgttgagaatgatggcttcatccagagtttggatattttacaaaagcagagtataatcacagcaccagaattgtttagtattttatcgaatcgcgttgaacgtgaaaaggttttactcatcgacttgagaataccacaaagatctgcaataaatcacattgtggctccaaacttagtgaatgtggatccaaacttgttgtgggacaagcagacgaacacacctatctacaaggatgacatattggaacatttactgaaggagaatgagaattttataaaccgtaataaatttgattacattgcttactatactgatgtgaagaccttcatgactataaattttgattatgcatttatttttttttatttgatgctgacttctcagaagactcctttaacaactgtacctactaccctcttaggcgggtacgaaaaatggaagaaaactctgcattcgtatgcccaggagtatcatatctctattgaagattacttgtacagaccttactcacagaaggcgcgcttacaacaggagcagcagcagcaacagcagcaacagcaacagccggattctcaggactcttcttccgctaaggaatcatctacaaaagttcctgagcctccctcctggaagccccctgacctgcctataaggttaaggaaacgtcctccaccgccaccgcctgtatcaatgcccacaaccccagaaattccacctcctctgccccctaagataatggttcattcacaagtcagttctatctctcgaaagccgccaataccagcaaagcagcatgtcaaaaaggaacaacttaactccaatgaaattattcaaagaaaaagacagcaccagcatcagcattacgaccagcaaatattacaaccgcaaagggcgtacaatattccaactattgaacgcagtccaaacgtatacgtttcgttgtccatcacgggactaagaaatttgggcaatacatgttacattaatagtatgatacaatgtctattcgctgcgaaaacattccggacactcttcatttcatccaaatataagagctatctgcaaccaataaggagcaacggatctcattattctcctaaactttcgaattcactaagtatgctcttcaacaagatgtatctaaatggtggttgctcagttgtcccaacaggatttctcaaagttatcaatcaattgcgtcccgatttgaaaattcctgatgaccaacaggatacccaagagttcctaatgatacttttagacaggttacacgatgaactttccgaccaacagcatgtagcgaacgattatccgaatttattattgtataatgcagatgccctaaaggtttcaaacaacgaatataagcactggtttgacaaaaatgtcattggtaatggtatatctcctattgatgacatatttcaagggcaaatggagaacagcttacaatgtaaaaggtgcggttacactactttcaactatagcacattttatgttttatcactggctataccaagacgttccatgaagttgagtaaacttggtaggtctactgagaaaagagttaagttagaggattgtattaatatgtttacaagcgatgaggtactctctggtgaaaatgcatgggattgcccacgctgtggccccacggcgtctgtgtctacatctgtgtctgcattagagaatgagccatccattgttaagagtaaaaagaaaaaaagtcggttttttacattacatacaggaaccaagcgtcgtcatctcgacttttttggagacggtattactgagggccataatagcaataataataatacgacaatctttgaacgagaaaggtccagatcacccttcaggatgttgggtggtagtgggaagaggtccagttccagtacaccgttcagtactggtggtaatgatagtaacaactcgagtgattacaagaacaaaaaattgacaacagtgaaaacgataaattttgtaactttaccaaaaatcttagtcatccatttatcgagattttattacgatttgaccaagaaaaataacaccgtcgtaacatatccattgatactaaacattatattgaaaaacaatgacactatgaaatataagctatttggagtggttaaccatacaggcacattaatcagtggccattacacgtcactggtaaataaagaccttgaacacaatgtgaatattgggcgttctaaatggtactatttcgacgatgaggttgtcaaggcagatgggaaacatggatctgataaaaacttgaaaatttcaagtagcgatgtctacgtattgttttatgaaagggtttatgactag

SEQ ID NO: 77050 - DNA, 1950 bp, Saccharomyces pastorianus
atgttttcggtaacgagaagaagagctgccggtgcagctgctgccatggccacagccacggggacgctgtactggatgactagccaaggtgataggccgttagtgcacaatgacccgagctacatggtgcaattgcccaccgccgctccaccgcaggtctctagacgagacctgctggaccgtctggccaagacgcatcaattcgacgtgttgatcatcggtgggggggccacggggacaggatgtgccctagatgctgcgaccaggggactcaatgtggcccttgttgaaaagggggattttgcctcgggaacgtcgtccaaatctaccaagatgattcacggtggggtgcggtacttagagaaggccttctgggagttctccaaggcacaactagatctggtcatcgaggcactcaacgagcgtaaacatcttatcaacactgcccctcacctgtgcacggtgctaccgattctgatccccatctacagcacctggcaggtcccgtacatctatatgggctgtaaattctacgatttctttgccggttcccaaaacttgaaaaaatcatacctactgtccaaatccgccaccgtggagaaggcccccatgcttacgacagacaatttaaaggcctcgcttgtgtaccatgatgggtcctttaacgactcgcgtttgaacgccactttagccatcacggctgtggagaacggcgctaccgtcttgaactatgtcgaggtacaaaaattgatcaaagacccaacttctggtaaggttatcggtgccgaggcccgggacgttgagactaatgagcttgtcagaatcaacgctaaatgtgtggtcaatgccacgggcccatacagtgacgccattttgcaaatggaccgcaacccatccggtctgccggactccccgctaaacgacaactccaagatcaagtcgactttcaatcaaatcgccgtcatggacccgaaaatggtcatcccatctattggcgttcacatcgtattgccctctttttactgcccgaaggatatgggtttgttggacgtcagaacctctgatggcagagtgatgttctttttaccttggcagggcaaagtccttgccggcaccacagacatcccactaaagcaagtcccagaaaaccctatgcctacagaggctgatattcaagatatcttgaaagaactacagcactatatcgaattccccgtgaaaagagaagacgtgctaagtgcatgggctggtgtcagacctttggtcagagatccacgtacaatccccgcagacgggaagaagggctctgccactcagggcgtggtaagatcccacttcttgttcacttcggataatggcctaattactattgcaggtggtaaatggactacttacagacaaatggctgaggaaacagtcgacaaagttgtcgaagttggcggattccataacctgaaaccttgtcacacaagagatattaagcttgctggtgcagaagaatggacgcaaaactatgtggctttattggctcaaaactaccatttatcatcaaaaatgtccaactacttggttcaaaactacggaacccgttcctctatcatttgcgaatttttcaaagaatccatggaaaataaactgcctttgtccttagccgacaaggaaaataacgtaatctactctagcgaggagaacaacttggtcaattttgatactttcagatatccattcacaatcggtgagttaaagtattccatgcagtacgaatattgtagaactcccttggacttccttttaagaagaacaagattcgccttcttggacgccaaggaagctttgaatgccgtgcatgccaccgtcaaagttatgggtgatgagttcaattggtcggagaaaaagaggcagtgggaacttgaaaaaactgtgaacttcatcaagacgtttggtgtctaa

SEQ ID NO: 77051 - DNA, 1182 bp, Saccharomyces pastorianus
atgtctctggatcgtgtagattggccgcacgccaccttctctacgccggtgaaacgtatcttcgatacgcagacaacgctggacttccaatcgtcactagccattcacagaatcaagtatcatcttcacaagtacactacgttgatatcgcactgttctgaccccgacccgcacgctactgcgtcgtcgatcgccatggttaacgggctgatgggagtgttggacaagcttgcacacctgatcgacgagacaccgcctcttcctggtcctagaaggtatggtaacctagcatgccgcgagtggcatcacaagctggatgaacgtttgcctcagtggctgcaggaaatgcttccctcggaataccatgaggtggtgcctgaattgcagtattacctgggcaacagctttggttcgtcgacaagattggactacggcacgggccacgaactttcgttcatggccacgatcacagcactggacctgctggggatgtttccgcacatgaggggggcagacgtctttctgctgttcaacaagtactacacgatcatgaggaggttgatcctgacgtatacgctggagcccgctgggtcacatggcgtgtgggggcttgatgaccatttccacttggtgtacatcctgggctcgtctcaatggcagctgcttgatgcgcaagcacccttgcaaccaagagaaatactggataagtctctggtgcgcgagtataaggacaccaacttctactgccaaggcataaactttattaatgaggtgaaaatggggccctttgaagagcattcccccatcctatacgatattgccgtcaccgtaccacgctggtccaaagtgtgtaaggggcttctaaaaatgtattctgtagaggttctgaagaagttccccgtggtgcaacatttctggttcggcacaggcttctttccctgggtcaacattcaaaacggcactgatcttccagtctttgaagaaaaggaggaagagagtatagaacaggctaacgcaggatcgcccggtcgagaacagacttcaacacgattcccaacgtccacgtcaatgcctcccccaggcgttccgccgtcaggtaacaatatcaactatttactaagccatcaaaaccagtcgcaccggaaccagacttctttttcaagagatagactacgtagataa

SEQ ID NO: 77052 - DNA, 711 bp, Saccharomyces pastorianus
atgagtcacaagagaaggggcctggtaatatatcaggatcagaagcagcaacaacaacaccccccggggcagtccctaagctctatatcctggtctccaaccaggcgacctcatcaccctttaaaacaacaaagcaccaacagtttctcagaaatactatcgaaatcaagtgtgcaaccgaacgtgcaacatgacggtaatcatatgcccatttcattgctagttctgaaacaagaacatcataagcagcagcagcagcagcagcagcagcgccagaatatccgatcacaaaactctacgcctcccctgcgacagttggttcaggagtcgcagtggacgagctccgcaagtaatagttctctaaagaaacaggaaaagcagccgcaaacattctacaacactgactctaaacttgtttctcaactgcatagctccgtgaaggacctggatgccataatccagacgcataaaccaaagtttgacacaattattcgcgatttctctcaagcaaccatactgtcttcaaacgagttactcatcaaacttccgaaggatcaaacaataatattgcatagcagagcgccaaaaattaacgcagaatggctacagaataaggttaatgaccctagtgcctcgttagtgatcgattcaagatcttttctaaccttgtgtaacaatataaaatggtacctgcattggaaatttatatga

SEQ ID NO: 77053 - DNA, 3357 bp, Saccharomyces pastorianus
atggttgacctaatggtgccggcgaatgatgaccctagtaatgaaactgattattctagatccaacaacaaccacactcatattgtgagcgatatgcgcccgacctccgccgcatttcttcatcaaaagcgacatagttcttcgtcgcacaatgatacaccagagtcgtcgttcgctaaaagaagggtgcctggaattgtagatcccgtagggaaaggatttatagatggaataactaatagccagatctctgcacaaaacacaccctccaaaactgatgatgcatctagaagaccgagcatctctcgcaaagttatggaatcgacaccacaagttaagaccagttctattccaacaatggatgttcctaaatctccatattatgtgaatagaactatgcttgctcgaaatatggaggttgtttctagagacacttatgaagataacgcaaatccacaaatgagagctgacgagccattagtcgcttcaaatggtatttatagcaattcgcaaccccaaagccaagtaactttatccgatattagaagagctcctgtagttgctgcttcacccccgccgatgataaggcaacttccttcggcgcagccaaatcagacgtttattaaaaaactgcaggaaatttataaaatcatagtggtgcaggaaaccgagttacaacaaagatgcctttatttaaccacctctcaaaccacggaactaaaaagtttgtgggcaatatacagactgaacacagaactgatcaaaaattacatcaatttcatcatcactgcattattaactacacaacctataaacgacttgattatgggccaagaaattttggatatttacagaatagaaaaaagattgtgggtttatggtataataaccttcttggatgtactaaagaacttttcgaactttatggacccagaggtatgttgtcagtttattatatacgctttcatctctgtctcaaatatgcttgaggatataccgttgaaatattctattttgtggagacaaagattgggtgatttgtctagaatggcaatttcgctgtacccatcaggattcatagattggaggctaagcgccgaatattggtataccgaatcaatgaaatacatatatgggtgcggcaaactatattatcatattgccacagttcaacagaacagtttagaagcgttcgtaaacttgggaaaaagtgttttttgtcaggatcccttcactccgtctcagcaaacgttacagttattgattgaaaatatctatcaatctgcattcatagatagaagttctggtagtgcgaacaataatgaaattgcccatagaaattctcaattaattgattatttgaagcatactgaagtaatgctattacctagtttcctggagaatatggatttacagcatgttgtgcttatgtacttcaaagacaagtttggtaaagattttaacggaaatgacgttttcgatacaaaagacatgttttgccaaaatccagaatcattgcgttattattttaggcatgcccctgcatttgctgaatctcagcttttacagctaatcggatttggcaatcctaaaaacccatttgcattattgtttcagttgcctaagtatttgaaattaaagaaggataaaagagaaaaaaagagatccgaagcaacagaaacatcttcctatacagatccattcgatgttcaaataagttcagaaagctacttccagaatatcgatgctttaaattcaagtttcaatgatatcccaaccaatctcaatatttggctggattctttgaatcatatcaacatgacgtcaatacaatgcagtatacatgtattaacaaaatttcttcatgcaccattagtggttgccttaccgcactttttgacgtggttacattttatagttgctattttgaaaaaattagaaatggtaaattcaaagcaagtagtagcattctggatacattttttaagaaggacaatgccttggaattcaatagtgaccttaggtaatgtattagtttgttacatgctggataatttacacccttttttgaaaaaagaattggaaaagttttattcattggaactggatgatttgatcgaatattataacgaaaatgaaaatcttccggagatttggaaatgttggggaacattgtggtttgatgccatcaagaagtgcgatgtaatggaaattcctggcgttcaagaccatctttttttcgattctccccttgatggcatagtctttgatgaaaaagatgaagttggtgaaaaattctggatgcgcagtgtaagagcagttttacttttgaaaggtattgccaagaaatttcccgatttggggttgaaagtaagctttcaagcttctgtgttttgtcgtcgaaatgacatacctccagattatttcctaaagaatttcacctttaagctagatgcatatgacgaagataattataacgacaacaacgaattagatgatctatatgacacaattgaaataaatgaagaaatcgaggctgttaacatggacccacaagccacaccaaatttgagcgtcgtttctggtgaaagtattttcgaatatactggttatacgagattggcaccagattatcattgttttgataaaaacggcgggttcaacagtgcatttatctacagccaatggtccaatgttggtaatggtgtaacactggatgtaagcggcgaatctatatacgatgttgccaacaacaacttgagcctgcattgggagaaaatattcttcgataaaattgccgccgcgtctaaaggcagtgacgaaaactacaattgtacgctttattttgtcatcgatgctacctcatggttaagacactttgcacatattttcaaactagccaaaaacaatactcttaaatttgcgatttgtctgaccacatttcaagaactacgttatctaagaggatcgaaagacgatactgtcgtcgaagcagcaacaaggtcggtaatcactattcgccagttgtacgatgaaaagaaaattattcctatgagattcacggggaatattgcaacacatgttgaagaaaatctggagttcgaagagcaaattacttggaagacgcacgtcgatgaatttgttattgatgctatcgccaaactgaaccaaaggtttcaagctgaaagattgactgatgaaaacaagaacaaaggcaaggagtttgcagtgctggtaacggatgatgataatatgaaccaaaaagcgaaggacagaatgataaaaacgtgcaatacaaagtatttattttcgttaggtagcaagcttggtattaatagtggattatgtaccaactaa

SEQ ID NO: 77054 - DNA, 1716 bp, Saccharomyces pastorianus
atgaatgatcctcgtgaaattttagcggttgatccgtacaataatattacttctgatgaagaggatgagcaagccatcgcgagagaacttgaatttatggaacgaaagaggcaggccttagtggaacgattaaaaagaaagcaagaatttaagaaaccccaggatcctaattttgaagccatcgaggtacctcaatctcctaccaaaaaccgtgtgaaagtggggtctcataatgctacacaacaaggcacaaaattcgaaggttcgaatattaatgaagtaaggttatcccaattacagcagcaaccaaaaccaccagctagtacaaccacatactttatggagaaatttcaaaacgcaaagaagaacgaagataaacaaattgccaagtttgaaagcatgatgaatgcaagagtacatacgttcagtaccgatgagaagaaatatgtgccgataatcacaaacgaattagaaagcttttcaaatctttgggttaaaaagaggtacatacctgaagatgacttaaaacgggctttgcatgagatcaaaatccttcggttgggcaaactttttgctaaaattcgcccacctaaatttcaagagcctgaatacgccaactgggccaccgtaggcctcattagccacaaatcggacatcaaatttacatcatcggaaaagccagtcaaattcttcatgttcaccataacggactttcagcatacactagatgtttatatcttcgggaaaaagggtgtagaaagatattataatcttcgcctgggtgatgtgatagcaatattaaacccagaagtactaccatggagaccctcagggcgaggaaattttatcaaatccttcaaccttcgaattagtcatgacttcaaatgtatcctggagataggttcaagtagagatttaggttggtgtcccatagtgaataaaaagactcacaaaaaatgtggctctcccattaacatatctcttcataagtgttgcgattaccatagagaagtgcaatttcgtggaacaagtgctaaaagaattgaattaaatggtgggtacgccttgggcgcgcctacgaaagtggactctcaaccaagcctatataaggccaaaggggaaaacgggtttaatataatcaaaggtactcgtaagcgcctgtcagaagaggaggaaagacttaaaaagagctctcacaattttacgaatagtaattctgccaaagcatttttcgacgagaaatttcagaatccagatatgcttgcaaacttagacaataaaagaaggaaaataatagaaactaagaaatcgacagcactgagccgcgaactaggcaaaattatgagaaggagggaatccagcggattagaagataagagcgtcggagagcgacagaaaatgaaacaaaccacagaaagtgccctccagacagggcttatccaacgcctaggatttgatcccactcatggaaaaatttcccaagtactcaagtcttctgtatcagggagcgaacctaagaacaacttactcggtaaaaaaaaaactgttataaacgatctcttgcattacaagaaggaaaaagtcattctcgcaccttcaaagaacgaatggttcaagaaaagaagccatcgcgaagaagtttggcaaaaacatttcggatccaaggaaactaaagaaacttctgacggtagtgccagcgatcttgagataatataa

SEQ ID NO: 77055 - DNA, 5040 bp, Saccharomyces pastorianus
atggaggacaaaatatctgagtttttaaatgttccattcgaatcacttcaaggtgttacctatcctgtcttaagaaagttatacaagaaaatagccaagtttgaacgttctgaagaagaagtgacaaaactcaatgttttggtcgatgagatcaaatcgcagtactattcaaggatttcaaaacttaagcagctactagatgaatcttctgagcagaagaacacagctaaagaagaattgaatggcttgaaagatcagctgaatgaagaacgttccaaatataggcgggaaatagatgcactaaaaaaacaattgcatgtgagccatgaagctatgagagaagtaaatgacgaaaaacgagttaaagaagaatatgacatttggcagagtagtgatcaggggaatgattctttaaatgatgatttgaacaaagaaaataagcttcttcgaagaaagctgatggaaatggaaaatatactacaaaggtgcaagtccaatgctatatcattacagttaaagtacgatacctcagtacaggaaaaagaattaatgttacaaagtaaaaaattaattgaagaaaaattatcatcttttagcaaaaaaacgctagcggaagaagtcacaaaatcatcgcacgtagagaacctcgaagaaaaactataccaaatgcaaaccgattatgaatctgtctttacgtacaataagtttttactaaatcaaaataaacaattatcccagtcggtggaggagaaagtactggaaatgaaaaatttgaaagataccgcaagtgtggaaaaagcagaattctccaaagaaatgactttacaaaaaaatatgaacgatttactgcgctcacaactaacatcattggaaaaagattgttccttgagagcaatagagaaaaatgatgataattcctgcaggaaccctgaacatactaatgtgatagacgaacttatagacacaaaattaagactcgaaaaatcaaaaaatgagtgtcaaaggttacagaatatagttatggattgtaccaaggaagaagaagctacaatgactacgagtgcagtttctcccacagtaggtaaactattttctgatatcaaagtgctgaaaagacaactgataaaggaaaggaatcaaaaatttcaattacagaatcaaatggaggattttatactagaattagagcataaaacccctgaactgatctcttttaaggaaagaacaaaatcattggaacatgaactaaaacgttccaccgaactactagaaactgtttctttgactaagcgtaagcaagaaagagaaataacttcactgagacagaagataaatggctgtgaagcaaatattcattctctggtgaaacaacgtttggatttggcctgtcaagttaaactacttcttttaaatacatctgcgatacaggaaacggcatcgccgttatcgcaagatgaactgatatcattaagaaaaatactggagtcgagcaatatcgtaaatgaaaatgattcccaagccatcattacggaaagactggttgaattcagtaatgtgaatgagctacaagaaaaaaatgttgaactcttgaattgcattcggattttggctgataaattagaaaattatgaaggaaaacaagacaagaccttacaaaaggtagaaaaccagaccattaaagaagcaaaagatgcaataattgaactggagaacatcaatgcgaagatggaaacccggataaatatcctattaagagagcgggattcttacaaattgctggcatcaactgaagaaaacaaggccaacacaaattctgtcacttctatggaagcagcccgtgaaaagaagattagagaacttgaggcagaactttcatctacaaaagtcgaaaactctgctattattcagaatttaagaaaagagttgttaatttataagaaatcacaatgcgataaaaaaacaactttagaggattttgaaaatttcaagggtttggcaaaggaaaaagaacgtatgttagaggaagcaatagaccacctaaaagctgaactcgagaaacaaaaatcatgggttccatcatacatacatgttgagaaagaaagagcctcaactgaactgtcacagtctaggatcaaaatcaaatctttggagtacgagatttccaaactgaaaaaggaaactgccagctttatacccacgaaagaatctttaactagagatttcgaacaatgctgcaaagaaaaaaaagaattgcagatgagactaaaggagtctgaaatcagtcataatgaaaataaaatggattttagttcgaaagagggccaatacaaagccaaaatcaaagaattggaaatcagtttggaaagattacgttccgacttacaatcaaagatacaagaaatagaatcgatacgctcatgcaaggattcgcaactcaaatgggctcaaaataccatcgatgatacagaaatgaaaatgaagtccttactaactgaattatcaaataaggaaacaacaattgaaaaactttcatcagaaatagagagccttgataaggaactaagaaaaaccaaattccaatataaattcttggatcaaaatagtgatgcaagcacgttagaaccgactttgagaaaagaattagagcaaatccaagttcaactgaaggatgcaaactcacagatacaggcttatgaagagattatatcttcgaatgaaaatgcgctgatagaattgaaaaatgaactagcaaaaaccaaagaaaattatgatgctaaaattgaactagagaagaaggaaaaatgggcgagggaagaagatctatctcgtttacgcggagagctcggtgaaataagagctttgcaaccgaaactaaaagaaggtgcattgcatttcgttcaacaatcagaaaagttgaggaatgaggtagaaaggatccaaaaaatgttagaaaaaattgaaaaaatgagtacgattgtccaactgtgcaaaaaaaaagaaatgtcccaatatcagtccacaatgaaggaaaataaagatctatctgaattggttatccgccttgaaaaggatgcggctgattgccaagcagaattaacaaaaaccaaatcctcattgtatagcactcaggatttactcgataaacatgaaaggaaatggatggaggaaaaggctgattatgaaagagaattgatatctaatattgaacagacggaatccttgcgtgttgaaaattcggtattgattgaaaaggttgatgacacagcagcaaataatggcgataaagatcatttgaagctagtttctttgttttcaaacttacgtcatgaaagaaattctttagagacgaagttaaccacctgcaagagagaattggcattcgttaaacaaaagaacgatagtttagaaaaaacgataaatgacctgcaacgaacccagactttatcggagaaggaataccaatgctctgcagttattattgacgaattcaaggatatcacgaaagaagttactcaggttaacattttaaaagagaataatgccatcttacaaaagagtctcaaaaacgtaaccgaaaaaaacagggaaatttataaacaattaaatgataggcaagaagaaatttctcgattacagcgtgatctcatacaaacaaaagaacaagtttcgataaattctaacaaaattttagtatatgaaagtgaaatggagcaatgtaaacagaggtaccaggccttatctcaacagcaaaaagatgtccaaaaaaaagacattgaaaagctaactaatgagattagtgatttgaagggaaaactttcaagcgctgagaacgcaaatgctgacttggaaaataaattcaataggctaaagaagcaggctcatgaaaaattagacgcatctaagaaacaacaagctgctttaactaacgaactcaacgaattaaaagcaattaaagacaaattagaacaagatctacactttgaaaacgctaaagttattgatctagatactaagctcaaggcacataaactccaatcagaagacgtctcgagagatcacgaaaaggacacttatcggacattaatggaggaaattgaatcactcaaaaaggagttacaaattttcaaaactgcgaatagctcatctgatgcatttgagaaattgaaagttaacatggagaaagaaaaggacagaattattgacgaaagaacgaaggaatttgaaaaaaaattacaagagaccttaaataagagtacaagctcagaagcagaatacagtaaagatatcgaaacattgagaaaggaatggctaaaggaatatgaagatgaaacgttaaggagaattaaggaagcagaagagaatttaaagaaaagaataaggttaccaagcgaggaaaggatacaaaagatcatcagtaagcgtaaagaagaattagaagaagaatttcgaaagaaattgaaagaaaacgcgggaagcttaacgtttcttgataacaaaggtaacggggaagatgccgaagaagaattatggaacagtccatcgaaggggaattctgagaggccgtcggctgtcactggctttataaatcaaaaaaaccttaaacctcaagaacaattgaagaatgtgaagaatgacgtttccttcaatgacagccagtcaatggttacaaataaagaaaataatatcgtggatagtagcgctgctggtaacaaggccattccaacctttagttttggtaagccattcttctcctctaatacatcatctcttcaaagttttcagaacccattcacagcatcccaatctaatatcaatacgaatgcccccctacgtacactcaatattcaacctgaagttgcagtcaaagcggcgattaacttttccaacgtaaccgatctaactaacaatagcaccgatggagcaaaaataacagaaattggaagtacatctaaacggccaattgagagcggtacatcttctgatccagacaccaaaaaggttaaagagagtccagcaaatgatcaagcttccaacgagtga

SEQ ID NO: 77056 - DNA, 3663 bp, Saccharomyces pastorianus
atgcgatttggcctgccatcaaaattggaactcactcctccgtttaggataggcatccgaactcaactaacggcactagttagtatagtggctttgggctcactgattattctggctgtaacgacaggggtctattttacctcgaactataaaaatttaaggtccgatagactgtacattgccgctcagttaaagtcatcacagattgaccaaactctaaactacttatattaccaggcgtactatttggcatcaagagacgccctgcaaagctcactaacaagttacgttgcaggtaacaagagtgcagataattgggtagattccttgagtgtggttcaaaaatttttgagttcttcaaacttgttttatgttgccaaagtttacgattcttcatttaatgctgttttgaacgctacgaataatggaactggtgatctaattccagaagatgtcttagacagtttgttcccattatccaccgatacaccgctaccttcttctctggaaactataggtatattgacggatccagtactaaatagcaccgactatttgatgtctatgactttacctatttttgccaatccttctattatcttgactgattcaagggtttacggatacattactataataatgtcggcagagggtctggaaagtgtgttcgacgatacaactgctttagaacgttcctcaattgccattatttctgcagtatataatagtcaaggcaaagcttcagggtatcattttatctttccaccgtctggatcacgattagacctcccgcaaaaagttttttctataagaaatgatacattcattagtaacgcatttagaaacgggaagggagggtctttgaaacaaactaatatcctttatacacagaatactgctttaggctattcaccatgttcgtttaacctagttaattgggtcgcgatagtttcacagcctgagtcggttttcctttctccagcaacgaagctagcaaaaatcatcaccggcactgtcatcgctattggtgtctttgtcattttgttaacccttcctctagcacactgggcagtgcaaccaattgtacgtctacaaaaggcaactgaattaattacagaggggagaggccttcgaccgagcactccaagaacgataagcagagccagttcattcaaaagaggatttagttctggatttgctgttccttcttcgttattacaatttaatactactgaagctggcagcaccacaagcgtaagtggccatggaggcagtgctcatggcagtggtgcagctttttcagcaaatagtagcatgaaaagcgctataaaccttggaaatgagaaaatgtcacctccagaggaggagaacaaaataccgaataaccataccgatgctaaaatatcaatggatggctcgctaaatcacgatttgcttgcaccacattccttgagacataatgacactgacagaagttccaatagatctcacattctcacaacttctgcaaatttaactgaagctaggctaccagattatagaagactattttctgatgaactttccgatttaacagaaaccttcaatactatgacagacgcattagaccaacattatgctcttttagaagaaagagttagggcgaggacaaaacaactcgaagctgccaagattgaggcagaggctgcaaatgaagcaaaaaccgtctttattgccaatatttcgcatgaattgagaacacctttaaatggtattctgggcatgacggctatttcaatggaagaaaccgatgttaacaaaataagaaatagtttaaaactcatttttagatcaggtgagcttttgcttcatattctaacggaattgttaactttttccaaaaacgttcttcaaagaacgaaactggagaaaagagatttttgcattaccgatgttgccttacaaataaagtcaatatttggtaaagttgcaaaggatcagcgtgttcgtctttcaatatcattgtttcctaatttgataaggacaatggttctttggggtgattccaacagaattattcagattgtgatgaatctagtgtccaatgcactaaagttcacccctgtagatggtaccgttgatgtaagaatgaaactgttgggtgaatacgacaaagaattaagcgagaagaagcaatacaaagaagtgtatatcaaaaagggtacagaagtaaccgaagatttagaaactacagataaatacgatcttccaactttatcgaaccataggaaaagtgttgatttagaatccagcgctacttccctaggaagtaatagagacacttcgacaattcaggaagagataacaaaaagaaatactgttgcgaatgaaagtatctataagaaagtgaatgagagggaaaaagcttcgaatgatgatgtatcttctatagtatcaacaactaccagctcgtatgataacgctatcttcaatagtcagttcaataaagcacttggctcagatgatgaagaaggtggtaacctaggaagacctatcgaaaatcccaaaacatgggttatttctattgaagtggaagacactgggcctggtattgacccttccttacaagaatctgtatttcatccatttgttcaaggtgatcaaacattgtccaggcaatatggtggtactggcttaggtctatcaatctgtagacagttagcaaatatgatgcatggaacgatgaaattagagtcgaaagtaggtgttggtagtaaattcacttttaccttgccattaaatcaaactaaagagatcagttttgcagatatggagtttccttttgaggacgaatttaatcctgagagtagaaagaatagaagagtcaagtttagtgttgctaaaagcatcaagagccgacaatccacatcatctgttgcaacaccagctacaaatagaagtagcctaaccaacgacgtgctaccggaggtaagaagtaaaggtaagcatgagacgaaagatgttggaaatcctaacatgggaagagaagaaaaaaacgacaatggagggcttgaacaactgcaggaaaaaaatattaaaccttctatatgtcttacaggtgctgaagttaacgaaaaaaattccttgtcttctaagcatcgttctcgacatgaaggtctaggttctgtcaatcttgatagaccatttttgcaaagtactggtacagccacatcgagtagaaacatccccacagtcaaagacgacgataaaaatgaaacaagtgtcaaaattttggttgtagaagataatcatgtaaatcaggaagttatcaaaagaatgttgaacttggagggcattgaaaatattgaactggcttgcgatggccaagaagcattcgacaaagttaaagaattgacatctaagggcgaaaattataatatgattttcatggatgtccagatgcctaaagtggatggtttactttctaccaagatgataaggcgcgatttaggttatacctcacccattgtcgctctaaccgcttttgctgacgatagcaacattaaagaatgtttggaatcaggaatgaacggatttttatcgaaaccaatcaaaagaccaaaattgaaaactattcttactgagttttgtgcagcatatcagggaaagaaaaataacaaatga

SEQ ID NO: 77057 - DNA, 1590 bp, Saccharomyces pastorianus
atggttttggaataccaacaaagggaaggtaaaggatcctcatctaaaagcatgccacctgattcctcgtcaacgactattcacacatgctctgaagcacaaactggggaagacaaaggcttacttgaccctcatctatcagtattggaattgttgagtaagacagggcattcgccttcgccaatgggacagaacttggttacgtccattgacatatccggcaaccacaatgtaaacgatagtatatcaggatcgtggcaagccattcagcctttggacttgggcgcttctttcatcccagaaaggtgctcttctcaaacgactaatggaagtattctatcatctagtgatacttctgaagaagaacaagagctgcttcaagcgcctgctgctgatataataaatattattaaacaaggacaagaaggagcaaatgtcgtttcaccgtctcatccctttaaacagttacagaagataatatcgctgcccttgcctggtaaggaaaaaactccttttaacgagcaagatgatgatggtgatgaagatgaggcttttgaggaagatagtgtgacgataacaaaaagcttgacttcttcgacaaactcttttgttatgcccaaactatcactaacacaaaagaatccagtttttcgccttctaatactgggaaggactggttccagcttttatcaatcaataccaaaagaataccaatctctttttgaattacccaaatatcacgattccgcaacattcccgcaatatacggggattgtcataatttttcaggagctgagagagatggtttctctgctaaacaggatcgttcaatattctcaaggcaagcctgtgataccgatctgccagcctgggcaagtcatccaagtgaaaaacgtcctgaagtcattcttaaggaataaacttgttaaattattgtttcctccagttgttgtgaccaacaaaagagatttgaaaaaaatgtttcaaagattaaaagatttatccttggaatacggagaggatgtgaatgaggaagacaatgatgacgaagctatacatacaaagtctcggtcctattgtcgtaacaaaaaagccgaaaactcaaaaaagaaatcccctaaatcgaacaaaaaacccaagagaaagaagcagaagttcttcacaagctggttcacttggggcatttcaattactataggaattagttttggatgttgtgtgacatactttgttactgcagcatacgaacaccaaacagttaagtctttaagtttgcggccctccatattggcctctttactttccttagattcctctagcgacacaatcaatacgcccgccactgcatctccttcttcaactgagcagtttttatggtttgataagggtacgcttcagataaacttccactccgatggattcattatgaaaagccttaccataatcaaggagacttggggcaaaatgaatacttttgtcttgcatgctctttctaaacctttaaaatttttggagaaccttaataaaagctctgaattttccattgatgaatctaatcggattttggcactgggttatattctattgtaa

SEQ ID NO: 77058 - DNA, 1038 bp, Saccharomyces pastorianus
atgaacatttctcgatgtagcgtacatatttatgtgtacaagaagtggtgtgtgttgatattgcactgttttatacaagtttttatactgcatatccatacagaattgatgaaaatcttccatactgtcgaagaagttgttcaatggagaacacaggagctgagggaaactagatttagagaaactattgggttcgttcccacaatgggttgcctgcattcgggtcacgctagtttgatctcgcagtctgtgaaggaaaacacctatactgtggtcagtatatttgtaaatccctcccagtttgcgccaacggaagatctagataactatcctcgaactttgccagacgacatcaaattgcttgagtcgttaaaggtggatgttctatttgctcctaatgcacacgtgatgtatccacagggaattccgctcgacatagaagagcagaaaggcccttttgttagtgttcttggattgagcgaaaaattagaagggaagacgagacctaacttctttaggggcgtggcaactgtcgtgactaaactattcaatatcgttatggcggatgtggcttattttgggcagaaggacattcaacagttcattgttttacagtgtatggtggacgaactgtttgttaatacaaggctacaaatgatgcctattgtaagaaacaataatggactggctctgagtagtagaaacaaatatctttgtccagagtctttaaagatctctgaaaacctttaccgcgggctgaaagctgcggaaaatgctattaggagactagcaccagggggacgtctctccagatcagaaatcatcgatactgtgattcaaatatgggcaccctacgttgattcccacgatttcaaaatcgactatgtttccttagcagattttaagactcttgatgaactctccgatgttgaaaacaccagcgaacagcagccaatagtcattagttgtgctgtatacgtgactgaccgcgaaaaacccgatacggtcgtcagactaatagataacatcgttatttaa

SEQ ID NO: 77059 - DNA, 2076 bp, Saccharomyces pastorianus
atgcaaagctcaacaagtactgatcaacatgtgctacatcacatggaccctcatcggtttacgtcccaaataccaactgcaacatcgtcacaattgaggagaagaaacagcacgaatcaaggtctaaccgacatgatcaataagagtattgccaggaatacaataagcgggactggcattcccacaggaggcataaataagaataagaggacaagaagcacggttgcaggaggtacaaatggtacagcattggccctaaatgacaaatccaacagtagaaacagcgtcagcagattatcaataaatcaacttggcagcctgcagcaacatctgagcaatagggatccaaggccactaagagacaaaaatttccaaagcgctattcaagaggagatttatgactatttgaaaaagaataaatttgatattgaaacaaatcatcccatttcaataaaatttctaaaacaacccactcaaaaggggtttattatcatttttaagtggttatatttaagactcgatccaggttacggctttactaagtctatcgagaatgagatctatcaaattttaaaaaatctgcgttatccgtttttagagtcaataaataaatcacaaatttcggctgtaggtggctctaattggcacaaatttcttggcatgttgcattggatggtacgaacaaatattaaactggatatgtgcttgaataaagtagatcgttcattaattaatcaaaatacacaagaaataacaattctgagccagcctttaaagactttggacgaacaggaccaaagacaagaaagatatgagctaatggtggagaaactgttaattgattattttacagagtcttacaaaagctttttgaaacttgaggataattatgagccttcgatgcaagaactaaagttaggttttgaaaaattcgttcacataattaatactgatatagctaatctacaaacccaaaatgacaatctttatgagaaatatcaagaagtaatgaaaataagccaaaagatcaaaaccaccagggaaaaatggaaggctttgaaaagcgattctgataagtatgaaaattatgtcaacgcgatgaagcaaaagagtcaagaatggccaggtaaactggaaaagatgaaatccgagtgtgaactgaaagaagaagaaattaaagccttacaaagtaatatttccgaattgcacaaaattttaagaaaaaagggaatttcaactgagcagttcgaattacaaaaccaagaaagagaaaagctgactagggaacttgataaaataaatatccagtctgataaattgacaagctcaattaaatccagaaaactggaagccgagggaatattcaaaagcttactggatacgttgaggcaatacgattcgtcgatacaaaatttaaccagatcgcgtggtcaattgggtcataatgttaatgattcatctctaaaaattaacattccagagaacttattagacagagattttcatgaaggtatctcctacgagcaattgtttccaaagggatctggaattaacgagtctatcaaaaaatctatcttaaaattaaacgatgaaattcaagaaagaataaaaaccattgagaaagacaacataacattagaaaaagatatcaaaaacttaaagcatgacataaatgagaaaactcaaattaatgaaaaacttgaattggaattatccgaagcgaattccaaatttgagctctctaagcaagagaacgaacgattattagtagcccaaagaattgagattgaaaaaatggaaaaaaaaattaatgattcaaatctcttgatgaaaactaaaatttcagatgttgaggaattggtaacttcaacggaactaaaattggaagaattgaaagttgacttaaacaggaaacgatacaagctacaccaacaagtgatacatgttattgatataacaagtaaatttaaaattaatattcaatcgtcattggaaaactctgaaaacgaattaggaaacgtcattgaagagttacgaaatttggagtttgaaactgaacataacgtaacaaattaa

SEQ ID NO: 77060 - DNA, 2532 bp, Saccharomyces pastorianus
atgacggacgttgaaggctaccaatctaagagcaaggggaaaatctttccagatatgggtgagtcttttttctcatcagatgaggattcaccagctactgatgcagagatcgatgagaactatgatgataacagggaaacgttagaaggacgtggagaaagggataccggcgccatggtaacagggttgaagaagcctcggaaaaagaccaagagtagcaggcatacagcggcggattcctctatgaatcaaatggacgctaaggataaagcgcttttgcaggacactaatagcgatataccagcagatttcgttccagattccgtctctggaatgttcagaagccatgactttagttatttgcggttaagaccagaccatgcttccaggcccctttggatctcgccaagtgacggtaggatcattctggagagtttctctccattagcagaacaggctcaggactttctggtcaccattgcagagcctataagtagaccctcccatattcatgaatacaagatcacagcatactctttgtatgcagctgtttctgtagggttggagacggatgatatcatttcggttctggatagattatccaaagtacccgttgctgaatcgataatcaacttcattaaaggggctaccatttcatacggtaaagtgaaactagttattaagcataatagatatttcgtggagactacacaagcagatattctgcaaatgttgctaaatgattccgtcatcgggcccctaagaatagatagcgatcatcaagtacagccaccagaggatgtactacagcaacaacttcagcaaaccgctggaaaacccgctactaatgttaatccgaacgatgtggaagccgtgtttagtgcagttataggtggtgataatgagcgggaagaagaagatgatgatattgatgccgttcactcctttgaaattgccaatgagtctgttgaagtcgtaaagaaaagatgtcaagaaatcgattatcccgtgttggaagaatacgactttagaaacgaccatagaaacccggatttagatattgatttgaaaccttccactcaaatcagaccgtatcaagaaaaatcgctgagtaaaatgtttggtaatgggcgtgctcgttcagggattattgttttgccatgtggcgcaggtaaaactttggtcggtattaccgcagcatgtactataaaaaaatccgtaattgttttatgtacttcatcagtctccgtcatgcaatggaggcagcaatttttacaatggtgtaccttacaacctgaaaattgtgctgttttcacctctgataataaggaaatgttccagacagaatccggtttggttgtttcgacttattcaatggtggcaaacacaagaaacaggtctcatgattcacaaaaagttatggatttcttgaccggtagggaatgggggttcattattcttgacgaagttcatgtggtgcccgccgcaatgttccgtagggtggtctccaccatcgcagcacacgccaaattgggactgaccgcaacgctggttagagaagatgataaaattggtgatctgaattttttaattggtccaaaactttatgaagcaaattggatggaattatcccaaaaaggacatattgcaaatgtccaatgtgcagaggtttggtgtcccatgacagcagaattttaccaagagtatttaagagaaactgcaaggaaaagaatgctactgtatatcatgaatccaacaaagtttcaggcatgccaattcttaattcaatatcacgaaaggaggggtgataagatcatcgttttttcagataatgtttacgccttacaagaatatgctttgaaaatgggaaaaccatttatttatggttccacaccacaacaagagcgtatgaacattctgcaaaatttccagtacaatgaccaaatcaataccatatttctatcaaaagttggtgatacttccatcgatttaccagaagctacctgtttaattcaaatatcttcgcactatgggtctcgtcgtcaagaagcccaaagattaggaagaattttaagagctaaaagacgtaatgacgaaggtttcaatgcgttcttttattctctggtttctaaggatacgcaagaaatgtactactcaacaaagagacaagcgtttttggtagatcaaggttacgcattcaaagtcattacacatttacacggaatggagaacattccaaatttggcatatgcttcacccagagaacgtagagagctattgcaagaagtattattgaagaacgaagaagctgctggtatcgaggtcggtgatgacgctgacaattccgttgggagaggttcaaatggccacaaaagatttaaatcaaaggccgttagaggtgaaggttcattgtctggtcttgctggcggtgaagatatggcatatatggaatacagtaccaataaaaacaaagaactgaaggaacatcatccattaatcagaaagatgtattataagaatttgaagaagtga

SEQ ID NO: 77061 - DNA, 333 bp, Saccharomyces pastorianus
atgttcaccaacactttggctgccggattatccagcggaattgacttcagaatcgtagcaccatcgtttgttaccatgcaagtgttactggacgcactttgcaataatttatccatcccttttgggcctaatgtgcttttcaccaaatcacccacggcaatggcaccgacaaacgccgacaaacgggcgttttccgctctttcttctgtaacctggtctccaaatatctgtacactcatcctgaatcttttgagctttgtacgactgactcttcttgcctatttaatggccacctttcatcctcttttttattgctctgctcttgtcttttaa

SEQ ID NO: 77062 - DNA, 1584 bp, Saccharomyces pastorianus
atgagtgtacagatatttggagaccaggttacagaagaaagagcggaaaacgcccgtttgtcggcgtttgtcggtgccattgccgtgggtgatttggtgaaaagcacattaggcccaaaagggatggataaattattgcaaagtgcgtccagtaacacttgcatggtaacaaacgatggtgctacgattctgaagtcaattccgctggataatccggcagccaaagtgttggtgaacatcagtaaggtgcaggatgacgaagttggagacggtaccactagtgttactgttttgagcgcagagttgcttagagaagcagagaaattgattgatcaatccaaaatccaccctcaaactattattgaaggttaccggctagcttcagcagccgcattggatgcgttaacgaaagtggctgtggacaactctcatgataagaccatgttccgtgaagatctgatccatattgccaagactactttatcttccaaaattttgtctcaggataaggatcacttcgcagaattagcaactaatgctattttgagattgaagggctccactaacttagaacatattcagatcattaagattcttggtggaaagctatcagattcgttccttgacgaaggtttcattcttgccaaaaaatttggtaacaaccaacccaagagaattgaaaatgctaagattctaatcgccaatacaactttggatacagacaaggtcaaaatattcggcaccaaattcaaagtcgattctactgctaaattggcacaactagaaaaggcagaacgtgaaaagatgaagaataaaattgccaagatttccaagttcggtatcaacactttcatcaatagacaactaatttatgactatccagagcaattatttacagatttgggcataaactcaattgagcatgctgattttgaaggtgtagaaaggctcgccctggttacaggcggtgaggtggtgtctacatttgacgagccaagtaaatgcaaactgggagaatgtgacgtgatcgaggaaattatgcttggtgaacagccattcttgaagtttagtggttgcaaagctggtgaagcttgtaccgtcgtcctaagaggtgctaccgaccaaacgcttgatgaagctgagagatccctgcatgacgcattgtccgtgttgtcacagaccacaaaggaaacaagaactgttcttggcggcggttgcgccgagatggtcatgtcaaaagctgtggacaccgaagctcaaaacatcgacggaaagaagtcccttgccgtggaggcttttgcccgtgctctgagacaactgccaaccattttggcagataatgctggttttgacagcagcgaacttgtgtccaaactaagatcctccatatacaacggtatctccacctcaggtttagatctcaacaacggaaccattgccgacatgagacagttaggtatcgtcgagagttacaagctaaaacgagcagtagtcagctctgcatctgaagccgctgaagttctactaagggtggataacatcatccgtgcaagaccaagaaccgccaatagacaacatatgtaa

SEQ ID NO: 77063 - DNA, 390 bp, Saccharomyces pastorianus
atgtttcctcttcgagcagtactcgagccctgtctcaagaatgtaataatacccatcgtaggtatggttaaagatagcatctccacaacctcaaagctccttgccgagagtcgccctcctttgtcgagtaattttcacttttcatatgagaacttattttcttattctttactctcacatcctgtagtgattgacactgcaacagccaccatcactagaagaacagaacaattacttaatagaaaaactatatctttctcgaaacgatttcctgcttccaacatctacgtatatcaagaagcattcacttaccatgacacagcttcagatttcattattgctgacagctactatatcactactccatctagtagtggccacgccctatga

SEQ ID NO: 77064 - DNA, 2472 bp, Saccharomyces pastorianus
atgacacagcttcagatttcattattgctgacagctactatatcactactccatctagtagtggccacgccctatgaggcatatcctatcggaaaacaataccccccagtggcaagagtcaatgaatcgtttacatttcaaatttccaatgatacctataaatcgtctgtagacaagacagctcaaataacatacaattgcttcgacttaccgagctggctttcgtttgactctagttctagaacgttctcaggtgaaccttcttctgacttactatctgatgcgaacaccacgttgtatttcaatgtaatacttgagggtacggactctgccgacagcacgtctttgaacaatacataccaatttgttgttacaaaccgtccatccatctcactatcatcagatttcaatctattggcgttgttaaaaaactatggttatactaacggcaaaaatgctctgaaactagatcctaatgaagtcttcaacgtgacctttgaccgttcaatgttcactaacgaagaatccattgtgtcgtattacggacgttctcagttgtataatgcgccgttacccaattggctgttcttcgattctggcgagttgaagtttactgggacggcaccggtgataaactcggcgattgctccagaaacaagctacagttttgtcatcatcgctacagacattgaaggattttctgccgttgaggtagaattcgaattagtcatcggggctcaccagttaactacctctattcaaaatagtttgataatcaacgttactgacacaggtaacgtttcatatgacttacctctaaactatgtttatctcgatgacgatcctatttcttctgataaattgggttctataaacttattggatgctccagactgggtggcattagataatgctaccatttccgggtttgtcccagatgaattactcggtaagaactccaatcctgccaatttttctgtgtccatttatgatacttatggtgatgtgatttatttcaacttcgaagttgtctccacaacggatttgtttgccattagttctcttcccaatattaacgctacaaggggtgaatggttctcctactattttttgccttctcagtttacagactacgtgaatacaaacgtttcattagagtttactaattcaagccaagaccatgactgggtgaaattccaatcatctaatttaacattagcgggagaagtgcccaagaatttcgacaagctttcattaggtttgaaagcgaaccaaggttcacaatctcaagagctatattttaacatcattggcatggattcaaagataactcactcaaaccacagtgcgaatgtaacgtccacaagaagttctcaccactccacttcaacaagttcttacacatcttctacttacactgcaaaaatttcttctacctccgctgctgctacttcttctgctccagcagcgctgccagcagccaataaaacttcatctcacaataaaaaagcagtagcaattgcgtgcggtgttgctatcccattaggcgttatcctagtggctctcatttgcttcctaatattctggagacgcagaagggaaaatccagacgatgaaaacttaccgcatgctattagtggacctgatttgaataatcctgcaaataaaccaaatcaagaaaacgctacacctttgaacaacccctttgatgatgatgcttcctcgtacgatgatacttcaatagcaagaagattgactgctttgaacactttgaaattggataaccactctgccactgaatctgatatttccagcgtggatgaaaagagagattctctatcaggtatgaatacatacaatgatcagttccaatcccaaagtaaagaagaattattagcaaaacccccagtacagccttcagagagcccgttctttgacccacagaataggtcttcttctgtgtatatggatagtgaaccagcagtaaataaatcctggcgatatactggcaacctgtcaccagtctctgatattgtcagagacagttacggatcacaaaaaactgttgatacagaaaaacttttcgatttagaagcaccagagaaggaaaaacgtacgtcaagggatgtcactatgtcttcactggacccttggaacagcaatattagcccttctcccgtaagaaaatcagtaacaccatcaccatataacgtaacgaagcatcgtaaccgccacttacaaaatattcaagactctcaaagcggtaaaaacggaattactcccacaacaatgtcaacttcatcttctgacgattttgttccggttaaagatggtgaaaatttttgctgggtccatagcatggaaccagacagaagaccaagtaagaaaaggttagtagatttttcaaataagagtaatgtcaatgttggtcaagttaaggacattcacggacgcatcccagaaatgctgtga

SEQ ID NO: 77065 - DNA, 738 bp, Saccharomyces pastorianus
atgaatagatgggtagagaagtggctgagggtatacttaaaatgctacattaatttgattttattttatagaaatgtatacccacctcagtcattcgactacactacttaccagtcattcaacttgccgcagttcgttcccattaataggcatcctgctttaattgactatatagaagaacttatactggatgttctttctaaattaacgcacgtttacagattttccatctgcattattaataaaaagaacgatttatgcattgaaagatatgttttagattttagtgaattacaacatgtggataaagacgatcagatcattacggaaactgaagtgttcgacgaattccgatcttccttaaatagtttgattatgcatttggagaaattacctaaagtcaacgatgacacaataacatttgaagcagttattaatgcgatcgaattggaactaggacataagttggacagaaacaggagggtcgatagtttggaggaaaaagcagaaattgaaagggattcaaactgggttaaatgtcaagaagatgaaaatttaccagacagtaatggttttcaacctcctaaaataaaactcacttctttagtcggttctgacgtggggcctttgattattcatcagtttagtgaaaaattaatcagcggtgacgacaaaattttgaatggagtgtattctcaatatgaagagggcgagagcatttttggatctttgttttaa

SEQ ID NO: 77066 - DNA, 486 bp, Saccharomyces pastorianus
atggagaagatcaaagagaaattgaatagcttaaaattagaatctgagtcatggcaagaaaaatatgaggagctgagagaacagctcaaagaattagagcaatctaacactgaaaaagaaaacgagattaaatctttgtccgctaaaaacgagcaactcgacagtgaagtggagaagttagagagtcaattgtctgatacaaagcaattggctgaagactccaataacttgagatctaataatgagaactacaccaagaaaaaccaggatctagaacaacagctagaagacagtgaagccaaactgaaggaagcaatggataaactgaaagaggccgatttgaactctgagcaaatgggtagaaggatcgttgctttggaagaagaaagagatgaatgggaaaagaagtgcgaagaattccaaagcaaatatgaagaagctcaaaaagaattggacgaaattgctaattcattggaaaatttatga

SEQ ID NO: 77067 - DNA, 2841 bp, Saccharomyces pastorianus
atgtctgataatttgttatctttagagaatccggtggtgcctagtcactatgagttgcgtctagaaattgaccctaagcagtcgtcgcccaatttcaaaggatccgccataatccatttgaaattcaatccgaactccaccaccttagcttctatcgaagacagttttacccagttcaagttacattccaaggatttgattgtgttgtctgcacatgccaccataaggtctactaagtttgatctaaaaatttctcaggacactggaaagcatttgtcgattttcaactctgaatctcctattcaattgtccaacgattgccctctgattttgtccgtgcaatacgtgggtaaaattcgtgacataaagacacatcatgataagacttttggtattttcaaaaccaattttatggatcgtaaaaccggtactgccaataatcacgtcgttgctactcactgccaaccgttttccgctagcaatattttcccatgtattgacgagccttcaaacaagtccacttttcaattgaacattgcaacggattcacaatataaagccgtttccaatactcctgtagagatggtcgaagctttggatagttctcaaaaacatttggtgaaatttgccaagacacctttgatgactacttccgtatttggtttttctattggtgatttagaatttttgaaaacggaaatcaagttggaaggtgataggactattcccgtttcaatttatgcaccttgggatattgctaatgccgctttcactttagatacagtccagaaatatctacctttgttggaatcctatttcaagtgtccataccctctgccaaagttagatttcgtcctactaccatatttaagtgacatggcaatggagaactttggtatgatcaccatccaactaaaccacctgctcataccaccaaatgccttggccaatgaatccgtcagagagcaagcacagcaactcattgtccacgaactcgttcatcaatggatgggcaactacatatcttttgactcgtgggaatctctttggtttaatgagtctttcgctacctggttggcatgccacatactagaacagaatggtgacctatcccattattggacctcagaaccttatttactacagcaagtggagccgaccatgtgcagagatgcagctgacgttaatggaagaagcatatttcagatttcgcaacggaacactggcatagattctcaaacctccgatatttttgatcctgaggcatacacaaagggtattatcatgctgaggtccctgcaattggctacaggcgaatctcatctacaaaagggcctggaaagtgtatttgaagatactaaaacatttcatgcgagaagcgtcaaaccaatggatatatggaatcatatcggaaaatttttgaagtctcaaaatatcacaaacttcgtttcatcttggacaagaacgccaggtttacctgtcgttaaggtcgaagtagaagagaaagacggaaaaacgcaaacaaaattgactcaacacagatttatcaatcaattgtctactgaagaaaaggatcagttagaagatgtcccatatcaggtgcccttattcggggttctaccagatggtaaaatggatactaaaaatgtactattgacagataggaccttaacgttggattatcctatcttagtaattaaccatttagcccaaggttattaccgcgtttcatatgagtccgaagagtgctatgcattgattaatgataaaataactgaggagacgttatccgagattgacctccggaagattttcttagacttgtcgcagtttattggagatgagggtttccagaattctattcatttgcacggtctctttaagatactaaaccatatcgcttctccttccacaaagattgcatcaaaatattgggatcctctttccaaggggttggaagttctgcaaacgatcgatcgtgccagtttaacgagctctaaattacaatctttcttaaagaaaaaaattgtcattccccttttcaataagattgattggccccacggtgaatttgataaaagcacaaaccctcacgagttgaaagtcatgtctcaagtcttgtttttaaataaaaactccgcaaaatgtgctgaattgtgtcaaatttatttcaaacatctattacagggcccacgttcgagcgtaccgttagaattagtgaactcaatccttgtcgtcgtattgcaacattgtgcaaacatcaagcagtggaaaaaaatattcgatttggtgaaacgcagttcctgtactggtatcacaaaccatgtcattaatatgtatgaccaaaacagtagcgaaaccgccatgttgattcaaaacggtgcaatagaatctcttggattctgtttagattctgatatcgtgaaaaaaactttgaattttatcacttccaatattgagtcagaggggatggaactggcattattcggatttaattacaactttaagaagaggctgaacaaaaacgagaaacctcaagaccaagtcgttcgtgaaacgatctgggagtggtatatgggcaattttgaccaatgggcacggaaggctacaaggaaaggtaccaccacgggggatcatctacacaaggcgttaaggagtatttccctgataatctttcaaatgtttgtagcagacgagccacagaagatagaaaagtttattaatttggagaaagagaagttgggtcaaagcttgttatctttggacgacatctgggcctctgtccagcaagatgaagagtccagaaagactataagaagagacttggcctccttggtctga

SEQ ID NO: 77068 - DNA, 1182 bp, Saccharomyces pastorianus
atgtcatcaagaataattgtcggcagtgcagcattggcagctgccatcacagctagcatcatggtcagagaacagaaggccaagggtcagagaagagagggcaacgtctccgcttactacaacggccaggagtacggcagttcagcacccccacagttgggaaagctacataacataaagcaaggcataaaggaagatgccttgtcgttaaaagacgcgcttctgggcgtatctcaaaaggctagggaagaggctccaaaggtaactaagcgtgtgatatcaccggaagaggatgctcagacacgcaagcagctaggccaaaaagccaaggattcttcctcgcaaagcatcttcaattgggggtttagtgaggctgaaagaaggaaagccatagccatcggggaatttgatactgctaagaagcgtttcgaagaggcagtggatcgtcatgagaaggagctcttgtccacggtgatgagagagaagaaggccgctctggacagagcatccattgagtacgaaaggtacgggagagccagagactttaatgagctttcggacaagctagaccaacaggaaaggaacagtaatcctttgaaacgcctgttgaagaataacacgggtgacgctaatactgaagaagccgctgcaagaagtgtccaaggctggggtgatacggcacaggagtttggtagagaagagttggaggaagccaagagaaatgcttcttcagagccaagcgaggcgcaaaaacgtcttgacgagctgaagaagatcaaggaaaagggctggtttggttacaacaaaggggagcaaagcgagcaacagattgctgaacgggtagccagaggtttagaaggatggggtgaaacagccgctcaactttccaaggacgaaatggacgatttaagatggaattatgagaattcaaagaaacaactggacaagaacgtgtccgatgccatggactcgttatctaaggcgaaggaggacttgaaacagtacggcagccactggtggtctggatggacttccaaggtcgacaatgacaagcaggctttaaaagatgaggcccaaaagaagtacgatgaagcgttgaaaaagtacgatgaagccaagaacaaattcaaagaatggaatgataagggtgatggtaaattctggagctcgaaaaaggactag

SEQ ID NO: 77069 - DNA, 204 bp, Saccharomyces pastorianus
atggttgttggcagcgaatttaacaacactgcagatgtagatgtcgtagctatccttctcacgttgttgaatgctgactattttgttattaagcaacgccttgttagtgcttgttttacaaagcgtattaaatggtattttatttatgctatcgctttattatctttatttacatcacgtaacacggtgtgtgcgccatattaa

SEQ ID NO: 77070 - DNA, 936 bp, Saccharomyces pastorianus
atggtcgatcaccagtggacgccactgcagaaggaggttatctcaggtctgtccgcgggatccgtcaccacattggtagtgcatccattagatttactgaaggttcgtttgcaattatccgctacaagcgcacaaaaggcccattacggcccatttatggtaatcaaagagattatacgttcgtcggcgaatagtggacgtagtgttacgaacgaactgtatcgcggattaagcataaatttgtttggaaatgccattgcatggggtgtttatttcggtttatatggtgtcacgaaagaattgatatacaagtcagtggcaaagccaggggaaacacagcttaaaggtgttgggaacgaccacaaaatgaattcgcttatttatttgtctgccggtgcttccagtgggttgatgacagctatcctaacaaaccctatctgggttataaagaccaggataatgtctacaagtaaaggcgcccaaggagcgtacacttctatgtacaacggtgtccaacaactgttacgaactgatggcttccagggcctatggaagggccttgtacccgcactgtttggtgtttcgcaaggtgccttctattttgcagtttacgataccttaaagcaaagaaaattgcgacggaagagggaaaatgagcttgacatccatttaacaaatcttgaaaccattgaaatcacatcgttgggaaaaatgatctccgtcactttggtttacccttttcaattattaaaatcaaacttacaaagtttcagggccaatgagcaaaaatttaggctctttcctttgataaaattaatcattgctaatgatggttttgttggactttataagggcctatctgcaaacttagtacgggccattccatccacttgcattacattttgtgtatacgagaaccttaagcataggctttag

SEQ ID NO: 77071 - DNA, 642 bp, Saccharomyces pastorianus
atggaatatgaagatttggaactgattaccatttggtcttccccgacaaaggacaaactttgccaatttatcaagcaggatctttcgaaggagcatgttgttacccagttattttttattgatgccacaagctcattcccgctaagccaattccaaaaacttgtaccgccaacccttccagaaaacgtcagaatatacgagaatattagaatcaacacttgccttgatctcgaagaactcagtgccataacggtgaaactactacaaatcttatctatgaataaaataaacgcccaaagaggcactgaagacgctgtgacagaacccctaaagatcatcttatacattaatggattagaagtcatgtttagaaactcccagttcaaatcctcccctcaaaggtcacacgaactgttaagggatacattgctcaagttacgtgtaatggggaatgacgagaatgagaatgcatctataagaacactgctagaattccctaaggaacagcttttagattattatttaaaaaaaaacaacaatacaagaacgtcatctgtgcgtagcaagagaaggcggattaaaaatggagattcccttgctgaatatatctggaagtattatgcagattcattattcgaatga

SEQ ID NO: 77072 - DNA, 1455 bp, Saccharomyces pastorianus
atgtctgttaccagtagggaacaaaaatttagtggtaagtatagttcgtatacagcccaggatcgccaagggcttgttaatgcggtgacatgtgttcttagctcgtcaagcgatcctgtggctgtgtcaagtgactattccaatagcttgagtattgccagagaggtcaacgcttatgctaaaattgccggatgtgattggacgtattatgtacaaaaattagaggttaccattggtaggaacacagacagcttgaacttgaatgctgtgcccggtacagttgtgaagaagaatatagacattgatcttggtcctgccaaaattgtgtctaggaagcatgctgcaatcagattcaacctggagagcggatcatgggaattacagatattcggtagaaatggtgctaaagtcaattttagaaggattcccacaggtccagactctcctcctacggtgctacagtcgggttgtatcatagacataggtggtgtgcaaatgatctttatattgccggaacaagaaactattatatcggattattgcctgaatcacctcatgcccaaattactatctacttatggtacgaatggtaacaacaacccgttgctacgtaacattatcgaaggttctacctatttaagagagcaaaggttacaggaagaggctcgattacaacggctggaccacctacacaccccattatcgtcatcatcagatgttaacccaataggggatccacatggagacacgattatgatggaagaagatgaagaagatgaaaattacaccagaggaggaattagaccgaatacatacacgtccagtagcaacaatgctgtccctaacgataatgtaccccatatagaaaatccatcagacttgtcgctggatgaaaacagatatatcaaaccaccgcagtcttatgcatcgatgatcacccaggccattctttcaacacccgaaggaagtatttcattagcggatatttacaaatttatctctgacaactacgcattttacaggttttctcaaatggcgtggcagaactccgtgaggcataatctgtccctaaataaagccttcgagaaggtgcccaaaagagctggtcaacaaggtaaagggatgaattggaaaattagcgatgaagtcaggcgtgattttttgaacaagtggaatgctggtaaattgagtaagattagacgaggtgcttctgtgacaagacaactgcagttgcacatgtccaaatttggagaaatacctgctcctgaatcttcatcaattgacccgagggggataaaagcacagaaggtgaaaaagtctttacaagctacgagctcgattttaggtgaaagcgccccgcaattacaaagaactcaactcactggccaaatttctactacgacatccatggacgtaacaacaaacgcaaacgtgaacaattcctctctgagttga

SEQ ID NO: 77073 - DNA, 2862 bp, Saccharomyces pastorianus
  modified_base (2508)..(2537): a, c, g, t, unknown, or other
  modified_base (2560)..(2632): a, c, g, t, unknown, or other
atgccagaacaagcgcaacaaggggaacagtctgtcaagagaagaagggtcactagagcctgtgatgaatgcagaaagaaaaaagttaaatgtgatggtcagcaaccatgtatccattgtactgtgtactcttatgaatatacttataagaagcctacgaagagaacacagaactccggaaactccggagttttaacactgggcaatgttactactggtccatcatcaagtactgtggtggcagccgccgcttccaatccaaataaactcctctcaaacattaaaacagaaagggctattttaccgggtgcttctacaatacctgcaagtaacaatccatctaaaccaagaaagtataagactaagagcacaaggctacaatcgaagattgacaggtacaagcaaatatttgatgaggtcttcccgcagttacctgatatagacaatctggatattcctgtgttcttgcagatctttcacaattttaagagggactcgcagtcgtttttagatgacactgtaaaagaatatactttgatcgtaaatgacagttcttcgccgatccaaccagtactttcttcaaattcaaaaaactccactccagacgaatttttacctaacatgaaaagtgactcgaatagcgcctccagcaacagggaacaagacagtgtagatacctactccaatatcccggttggtagagaaataaaaataattctaccaccaaaagcgatcgctttacaattcgtgaaaagtacttgggaacattgctgtgttcttctccgattttatcacagaccatcgttcattagacaattggatgagttgtatgagacagacccaaacaattatacgtctaagcaaatgcaatttttaccattgtgctacgctgcaatcgctgtgggagcattattctcgaaatccattgtctcaaatgactcgtcaagggaaaagtttctacaggatgaaggttacaagtacttcattgcagctaggaaactaatcgacattacaaatgcccgtgacttgaattccatacaagcaattttaatgctgtttatattcttacaatgttccgcacgtttatcaacgtgttacacttatatcggtgtcgccatgagaagtgctttgagagcaggctttcacaggaaattgagccccaattctggttttagtccaatagaaattgagatgaggaaacgccttttttatacaatctataaactggacgtttatatcaatgcaatgctgggcctaccgagatctatttcccccgacgattttgaccaaactctccccctggatttatcagatgagaatatcactgaggtggcgtacctacctgaaaaccaacactccgttttatcaagtacggggatttcgaatgaacatacaaaactatttttgattttaaatgagatcatttctgaactatatccgataaaaaaaactagtaatataatttctcatgagacagttactagcttggaattaaagttgagaaattggttggattcgttgcccaaagaactgatacctaacgcagaaaatattgatcctgaatatgaaagggcaaatcgtttattacatttgtcttttttgcacgttcagataatattatacaggccttttattcattatttatcacgcaacatgaatgctgaaaatgtagatcccttatgttaccggagagcccggaactctattgccgtggctcgaacggttattaagttagcaaaagagatggttagtaataatttattaactggttcatactggtatgcctgttatacaattttttactccgttgcaggtctcttattttacatccatgaggcgcaattgcctgataaggatagtgctagagaatattatgatattttgaaagacgcagaaactggtagaagcgttcttattcaactcaaggattctagtatggccgctagtaggacttataatttattgaaccaaatttttgaaaaactaaactcaaaaactatccagcttactgcgttacattcatcaccatccaacgaaagttcctctttagtgactaataattcctccgctttgaaacctcatttaggagattcattgcaaccacccgtattcttttcttcccaggatacgaagaatagcttttcattagctaagagtgaagaaagcaccaatgattacgctatggctaattacctaaataatacacctatttccgaaaatcctttaaatgaagcacaacagcaagatcaagtatcccaaggaacgactaacatgtctaatgaaagagatccgaacaatttcttatctactgatatcagacttgataataatggccaatcaaatattcttgatgccacagatgacgtctttatcaggaatgacggcgacatccctactaacagtgcattcgattttagcagcagtaagagcaatgcatcaaataactccaacccagataccattaacaacaactacaataatgttagtggcaaaaacaataataacaannnnnnnnnnnnnnnnnnnnnnnnnnnnnncaacaacaacaacaacaacaacnnnnnnnnnnnnnnnnnnnnnnnnnnnnnnnnnnnnnnnnnnnnnnnnnnnnnnnnnnnnnnnnnnnnnnnnntcggcattaagattgataacaattcaccgtcttatgaagggtttccccagttacaaataccgctttcacaagacaatttgaacatagaagataaagaggagatgtcatctaatattgaaattaaaaacgaacaaaatatgactgactcaaacgatattcttggagtattcgatcagttagatgctcagctatttgggaaatacctacctttaaattacccctctgaatga

SEQ ID NO: 77074 - DNA, 7131 bp, Saccharomyces pastorianus
atggcctcgagatttactttcccgccccagagggatcaaggcattggtttcaccttcccaccgacaaataaagcagaaagttctagcaacaataaccagatatcaatagatattgatccttcaggccaggatgtcttggaggaaataaacgaagcgccacttaacacatttcctcttcaccaatccgttacggatgcacctattattgatattccatctcctactgatatgtctgaaggcacctctctaaataatcaattacttttacggcaacaacagcaacaaggaacgggggaaggtcaagctcttccgcctacctttgttgaggagcaaagtgatcaaaacaagatttcaatgctactacctgaacaaaagcagcaaagtatgcaagaatcagcaccgccggacattacagcaaaatcagtagcagaggactacgtgactactttgagacagcaaatggctacagattggaaaagtccctctgaatatgctcttcatatactttttacaaagtttattcgttacgcggagaacaaactaaatatgtgtctacagcagttggacatggcggaacccccaattgtagaaattcttggtgaaggcgttgatcccagctttgatgaaattattaaatctctaggtcacattgcaaagaaaaaaccgaaacctgtgattgatgcaatgatgttttggaggaagactaaatctgaagcggccaactctgcttcagaagaaatggaaaaactattaaaagagtatgagtttgaaaaggcacatccctcgcaggctcattttttaatgaataggcggctatcaagatcttccagtaatacaacctcaaagtacaaacataataacaataccaataatcttcctggcatgaaaaggcacgtttcctcatctttcaacaacaaagttccgttaatcaaagctagtagcagtaacaatagcgctacttcaagtccatccatagcgaactcacaattgaaaagtttagagaacacaattgaagtagcaaaagaagaagcattccttgcagataggaaatctctgattagtatatacatcctatgcagggtgctaaatgaaattgttaagcaggcttccagcaatgaagaagaagatttatctgataagctagaagagattgtttttactcagttaaaaactactgatccactttctatatcaactagtttaatcaagtcttcgaattggaattcttttgccgaactactgggctctatgtctgaaaagaaatttttgtcagttagtgatcgatttatagctgatctagaaaaaatcccggcgtatatacctcccgagttagagccaagtactcatttgttgattcttggtatgagatatttgaagttaagaaattatccgttggagaaatttgaagaaagtgcagatttcatgaaaagtttatcaaagttcttcgcaaagactgaaaattttccggtttgtttggcgtatgctgaagtcactaaccagctattgttgcctttggctggctcgttgacggcagaagttaatcatccaacgtgggtagaggcaatgtctactttactgaacactgccaagaggctacaagctgataataagtattgggtaagtggtttcaaattaacagtttctattttgtgtgcatcaccaccagacttattttctaaacaatggctatcgttgttggaggcaaatgcctcaaaagttaagtccaaaagtctgaatgaaaggattatctttgcagttggtttatccagattagtttgggtctatttatatagatgcccagaaactttaaataatactacaaggacgcttaccaagcttttacaactatatctaaacacaaggaaaaaagagaattggataaccggcgattttggtctcttgaacccattgacagacgcgttaatatcaattggatttttacatccgaattttttaatggaacaagctttaattccattgatacggcaatctttcaatggctctaacctggaaaatatcaattacgaaaaactgattttgactataaatacatacaaaggattgctggttacaaaagagaggccaaggtttcctgaggatgataacaggctttatgaactaaatttaaacaatattacagtgaatcaggttcaagaagcctcttccataaaccatacagaaatatcagattacttttataaattattccttttattggattctagcatcggttctgaagtttggtctcctgaaaatcagcaccaaaagcaatcatcaaacgcattcagcccatttggctttagcttttctaatgacaatgactcaagtaaaaataagtcgctttatgttatattgttcggcaccatcattgaagctataccatgttgcctttctatttcacgcactatcccatataaatctacaattgagattttatcaaggaacgctgttcattcggaggtaattatttcttctagcagtcaaaatgcactaagagcattagcatctaagaagaatccatacaccctaatcacatggtttgctaaatattcatttgatttcgatgaaaagacacaatcaagttataacatgtcgtacttgtcatcaaaggagtacaacagattattgatactttatgttgagcttttggaatgctggttaggagaattccaatcgtctaataaagaggaaaataaaaaagaaactggtttggatggaattcgcttgttgccgatcgatgcagaacaagaggagagtaacgaaaccgaaaaactggagtggaaaaatacagttacagttattgaagaagtagaagggaatggcttattttttctttgttcacacgatgcaaaaattcgtagattgggcatccagatattgagaattattttcaagtttgacgaagcgatgatggagaaaacagagaaattgtcaaacgggcattctagatcatcatcccattttgcagctgatcgcggaacaagacttattgatttattaaatgagtgtaataccactaccttaattaatccacataaagcaacattaagtgcggttgaaaaaacgagattcagtcgactgaattctaaatataaaagaggtctacttatcaaactggccgaatcagagtacggagtagatgctgcactatggcaaagggctttccctaaattactggcgttggttttcaaaacttgtcctatggcgatggcattgtgtcgatctatcgtttgtataagacttgtgcaagtacacgaaataattctgcgggtagcaaatgatgttgatttcaaactcaaaaatgttttaccggaaacaatagtaaaccaatggaagctatatttgattgccgcatgtacttcattaacttccacgtttgaccaaaaactgcatattccgtccaatattcctcagcatggcaggaaaaaaagtcaacaaatctttactgttcagcaccaaaaaatcaaatctgcgaaatcaatcttcaagatggttcttcccttattaaatgcaaagtatattatgattagggatgctataataacggggctaagctcaatgaatatcaacatttttaaagcatatatggaggcaattgatgtatttttagtggcatggaaagaagggagctccaacaaccaaatcagagtggagatgtttcatattttgacgattttatcgccgtacttaaaatcggatatgatatttaatgacgaatggatacttcggaaattatcagagtttttgcagaagacaaaacagttcctcgagaaggattctgtgcaaatctcctacgaatatcaatcgctgcgaagctactttgcaggtcttatattgagctactatatggcagtaagagagcatccgctaatagatgaattatttcccttccaagcacgcgcatcatgtttcaatttcttgaaggaatggtgtggttatggtgagtacgagccaatatctgaagaaagatatgccataatgataaaaaatacagagagtggcagagatagaaccgctattacaactggaatagaattccaaaaaaacagattgcagatgatcgtgctagagactatggttgttttatgttcagatccaataacccaaacattggacgatgatttagagttgcctattgtgatttcattcgatactgaagatttacttgcttggattgaagcactatttgactcggacaatactactgtaaaaaatcttggtgtgcgtgctttggagaatctcctggacaaaaatagggaaaattttaaactatttagagatgttgctttccaatgtgtttcacaccactcacatccttcggtagctgttttatattacactacactttgtaaatccgttttgaaattggataatttggttttagatgaagatgaattagtctccttgggtttgtatggtttagtggcagataaggaagatacaaggacatttgctgttgatctactttcagctgttgaaacgaaattacataattcttcttataccaaggtatttaaggagagacttgcaaattcttcaaagacggtttacaaatcaactgcaaaagaaatttctagcatatttgccgaactgctctctcaggatttgtgtttgagaatattttccagtttggttagaatacttgatttgtttcctttcgaaataaaaagagatttgttggtgcttatggtaccttgggtaaacaaatttacattgaaatctttagaagagttggacacgtttatggtattgaataacctattttacatcactattgatcttaacgactctttaccgaacgaagtagagcagctatggatttctcttggcaagggtaattctttccaaaatatacacgtatcactggagtacatcataaattcttcaatgaatcactgcaatccattgtttgttcagtatgctagagatattgtattgtatttggcaaatattcctggtggcattggactacttgacactctattgaataatttagaaccgaaatacatggttcctttagcgaaacatacgtttaatgagccaatgaataataataagtattcctttttagggaatatctgggaacgactaaattacaatgggaaaagaatcattttctcgaaggcgcagctttcgattatctttttagtcaatttgttaacgaacttgagtgaatctgtaaaggcgaaaattcctcttctactacatatgtccatttgcttgcttgaccattatgtgccgcttattcacgaaagcgcgtgtaaaattgcatctacattaatatttggattggcaccaagtcacgaaaagtctgaggaaaccgtgaaactactaagaaataagcatgccttatggtcatatgataacttgatgaaaaaaggtgcaagatcaccaaaaactatggacctattaattaggaacataatctctatattctcggacttagatgaatttcaagtaacttggcaaagaattgccttgaagtgggctaccacttgctcagttaggcacatagcgtgcaggtcatttcaaatatttagatcattattgacatttttagatcaggaaatgttgcgtgatatgcttcatagactttcgaacactatatcggatggaaatgtcgatatacaaggatttgccatgcagatcttgatgactttgaatgcaatcatggccgaacttgatccgacgaatttgatcagtttcccgcagttattttggtccattacagcatgtttgagcagcattcacgaacaagaattcattgaagtgctgtcatgtttaagtaaattcatttccaagatcgatttggattctcctgataccgtacagtgtttggttgcgatctttccttccaattgggaaggtcgctttgatggcttgcaacaaatagttatgactggattgcgatcagcgaattccttagagattacgtggaaatttttggataagttaaatttgttgaaagatagccgaattatagcaaatacagagtctaggctgcttttcgcattaatagcaaaccttccgagatttttgaatgcaatggatcgcaaagattttacgggcattcaggttgctgcagattcgttaattgaacttgcaaatgcgtacaaacaaccttctctttcccgtttgatagattctctagcaaagaacaagtttagatcaaagaaagatttcatgagccaagtagtgagtttcatatctagaaactacttcccctcgtactccgctcgaacgttagtgttccttctgggtcttctgttcaataaaataggatggatcagagttcaaactctggaaattttaaaatatgtttttcctttaattgacttaagaaggccagaatttattggtgtcggtgctgatttgatttctccgttactcaggttactatttactgaatacgaagcaaaggccttggaagtcttcgattgcgtaccaaatgtttctggaagtaaaatggataaggatgttttaaggataaccatgggaaataaggatgtgaaagacggcgataatgctaccactaccttgtttggtttgcctgaagatagcggttggtctgttcctatgccaacaatgacggcggctacgacaaggcataacgttcacgcagtttttatgacatgtggtacaagcaaatcagatgaagtatctgctcacggatcggatgatatggatgcagttatcgaatttcatgcggatggtgactatgaactcggcagaatggatacaattgtcgagtttcatgcggacggtgattatgaccttggtagaatggacacaaacgattccatttctgttgcggaagaaaaggatgcttcgttaagtcacatgtgggcagagctagataatcttgatagttttttcacaaaggacacaaatgtgccaaatatctcctctaaaatggggatgggaattccacatggacgttctgattcgattgaaaccactcgcacagatcaaactttttcctttgagtctgctccacagttgtatgacaaaaaggtctcagtcatactgaacaggagcttatctagaacaccgtccaatgtttcatttaaaactcatttggctgattcatttgctgtgaaaataaacaggaatggaaagccaagaatataa

SEQ ID NO: 77075 - DNA, 3099 bp, Saccharomyces pastorianus
atgacaccagacgaactaaattcagcagtcgttacctttatggccaatctgaatattgatgattcgaaggccaacgaaaccgcttccacagtaacggattctattgtacaccgatcaataaaattgctggaagttgtcgttgcgttgaaagattattttctttcagaaaatgaggtagaaaggaagaaagcgttgacatgtttaaccactatcttagcaaaaactcccaaggaccacctctccaaaaacgaatgctcagtaatatttcagttttaccagtctaagcttgatgatcaagcgcttgcaaaagaagtcttggagggcttcgccgcattagctccaatgaaatatgtctccattaacgagataactcaacttttgagattattattggacaactatcaacaaggccagcatttggcatcaactagactttggccatttaaaattttgagaaaaatattcgatagatttttcgtcaatggatcctcgaccgaacaagtcaaacgaatcaacgatttgtttattgaaacatttcttcatgttgccaatggtgaaaaagaccctagaaatttactcttgtcatttgcacttaataaatctatcacatcgtccttgcaaaacgtggagaattttaaagaagacttatttgatgtcttattttgctatttcccaatcactttcaagccaccaaagcatgatccttacaagatctccaaccaagatttaaaaacagctttgcgatcagcaattactgcgacgccattatttgccgaagatgcttatagcaatttgctggacaaactcactgcttcttcaccggtagtgaaaaatgatacacttctgacgctattagaatgcgttagaaaattcggcggctcttctatattggaaaattggacgttactttggaacgctttgaaatttgaaattatgcaaaacagcgaaggaaatgaaaacactctactaaatccgtacaataaagaccaacagagtgatgatgtgggccaatatactaactacgatgcttgcttgaaaattattaatctaatggcattgcaactatacaattttgacaaagtatcatttgaaaagttcttcactcatgtattagatgagttgaaaccaaattttaaatatgaaaaggatttgaagcaaacctgccagattttgtccgctataggtagtgggaatgtcgagatatttaacaaggtcatttcgtcaactttccccttatttttgatcaatacatctgaagttgccaaacttaagctgctgattatgaatttttctttttttgttgactcgtacattgatttgtttggaagaatatctaaagaatcgttgggaacaccggtgccaaataataaaatggctgaatacaaagacgagatcataatgattttgagcatggccttgacaagaagctccaaggcagaggttaccataaggactctatctgtgattcaattcacaaaaatgattaaaatgaagggctttttaaccccagaggaagtttcactaattattcaatacttcacggaagaaatattaacggataacaacaaaaacatttactatgcttgtttggaagggttaaagacaatcagtgagatatatgaggatttagtttttgaaatatcattgaagaaattattggatttgttacctgattgcttcgaggaaaaaattcgagtaaatgatgaggaaaatattcacattgaaacaattttgaagattattcttgatttcaccacttcgagacatattttggtcaaagaaagcattacatttttagcgacaaaattgaatagggtagctaaaatttcgaaatccagagaatattgctttctacttatttcaaccatatattctctttttaataataataatcaaaatgagaacgtgctaaatgaagaagatgctcttgcactcaagaatgccattgagccaaaattatttgagataattactcaggaatcggccattgtaagtgacaattacaatttgacacttctatctaacgttcttttcttcaccaatttgaaaattccacaggctgcacaccaagaagaactagacagatataacgagcttttcatttctgaaggtaagataagaatcttagactcaccgaatgtattggctatttcatatgctaaaatattatccgcactaaataaaaactgccaattcccccaaaaatttacagtgcttttcggaacggttcaactactcaaaaaacatgctccaagaatgacggagactgaaaaattaggatacctggaattgctgttggtcttatcaaataaattcgtctctgaaaaagatgtgataggattattcgattggaaagacttatcaataattaatcttgaagtgatggtttggttgactaaagggctgataatgcaaaactcattagagtcatcagaaattgcaaaaaagtttattgatttactgtctaatgaagagattggctcacttgtatcgaagctattcgaagtttttgtcatggatatcagttctttgaagaaatttaaaggtatcagttggaataataacgttaaaatcttgtacaaacaaaaattcttcggtgacatttttcaaacactagtcagcaactataaaaataccgtggacatgaccattaaatgcaattatttaactgcattatccttagtgttgaagcatactccaagccaatcggttggtccttttatcaacgatttattcccgcttttattgcaggctttggatatgcctgatcctgaagtaagggtatccgctttagaaactctgaaggacactacggataaacatcacactttaattactgaacacgtaagcacaatagttccattattactatctctttcgcttccgcaaaaatataatagtgtcagtgtcaggttaatagccttacagcttctagaaatgattacgactgtagtacctctaaactattgtttgagctatcaggacgatgttctaagcgctttaataccagttttatctgacaaaaaaagaataataagaaagcaatgcgttgacacaagacaggtttattatgaattaggccaaatcccgttcgagtaa

SEQ ID NO: 77076 - DNA, 621 bp, Saccharomyces pastorianus
atgtcatcttcgctgagccaaacatctaaataccaggccacctcggttgttaatggactgctatcaaaccttttgcctggcgttcccaaaatcagagctaataatggcaaaacaagtgtaaacaatgggtcaaaagctcagttaatcgacaggaacttgaaaaagagagtacagttacaaaacagagacgttcacaaaattaaaaaaaaatgcaaactggtcaaaaaaaaaaaggttaagaaacataaattagataaagagcaacttgaacaactggcaaaacaccaggttttgaaaaaacatcaacatgagggcacattaacggaccatgagaggaagtatttgaataagttaatcaaaaggaattctcaaaatttgaggtcgtgggatttagaagaggaagtacgagatgagcttgaagacattcagcaatccatcttgaaggatacagtttccactgcgaacatagacaggagtaaaagaagaaggttcaaaagaaaacaattcaaggaagatatcaaagagagcgattttgttaaagatcatagatatcctggtctgacaccgggtttggcacctgtaggactaagcgacgaggaagactctagtgaagaagattaa

SEQ ID NO: 77077 - DNA, 4080 bp, Saccharomyces pastorianus
atgcttcaggaacaatctgagttgatgagcacggtgatgaataatacacctacaacagttgccgcattggctgcggttgctgcagcctctgaaacaaatggaaagctggggtccgaggaacaacctgaaatcactattccaaagccgaggagtagtgcacggttggagcagctactctaccgctatagggctattcaaaaccatccaaaggaaaacaagttggagatcaaggcaatagaagacacttttaggaatatatcacgtgatcaggatatctacgaaacaaagttggataccttgagaaagagtatagataaaggatttcagtacgatgaggatttattgaataaacacttggttgccttacagttactggagaaagatacagatgtccctgactacttcttagacttaccagacaccaagaacgataacactacggcgatcgaagtagactattctgaaaagaaaccaataaaaatatcagcagatttcaatgcgaaggccaaaagtttgggtttagaatcaaaattttctaacgctacgaagactgcattgggcgatccagataccgaaataaggatttctgcacgtatatccaacagaattaacgagctggaaagattacctgccaatctgggtgcatactcactagatgattgtttagagtttattacaaaagatgatttatcgtccagaatggatactttcaaaatcaaagctcttgtggaattgaaaagtttaaagctactaactaagcaaaaatcgattaggcaaaagttaatcaacaatgttgccagccaggcacaccacaatattccatatctacgtgattctcctttcacagcagctgcacaaagatctgttcaaattagaagcaaagttattgtcccacaaaccgttcgtttggcagaagaattagaaaggcaacaactattggaaaaaagaaaaaaggaacgtaatttacatttacaaaaaataaacagcatcattgatttcatcaaagaaaggcagtccgagcaatggtctcgtcaagaacgttgctttcagttcggtagattaggcgcttcattacacaatcaaatggagaaagatgaacagaaaagaatagaaagaactgctaagcaacgtttagctgctttgaagtctaacgatgaggaggcttatttaaagcttttagatcaaactaaggatactagaattacacagttattgaggcagactaattcctttttggattctttgtcggaggctgttagagcacaacaaaacgaagcaaaaattcttcatggtgaggaagtccaaccaattacagatgaagaaagagaaaagactgactattatgaagtcgctcataggatcaaagaaaaaattgataaacaaccttctattcttgttggcggcactttaaaagagtatcaattacgaggtttagaatggatggtgtcgttgtacaataatcatttgaacggtattctagcagatgagatgggtttaggtaaaaccatccaatctatttctctaataacatatctttatgaagttaagaaagacatcggccctttcctagtcattgtacctttatccacaataaccaattggactttagaatttgaaaaatgggctccgagcttaaacactattatatacaaaggtacaccaaatcaaagacactctttacagcatcaaataaggattggaaattttgacgtcttattgacaacatatgagtatattattaaagataaatctcttttatcaaaacatgattgggctcatatgatcattgacgaaggtcatagaatgaaaaatgctcaatcgaagttatcattcacaatttctcattattatcgtacaagaaacagattgattttaacgggtactcctttgcagaacaatctaccagaattatgggcactgttgaactttgttttgcctaaaattttcaattctgcgaagacttttgaagattggtttaatactccatttgccaacaccggtacccaagagaaactagaattaacggaagaagaaactctgttaattattagaagattacataaggtgttaaggccatttttattgcgtcgtttgaaaaaggaagtggaaaaggatttgcctgataaagtggaaaaagttatcaaatgtaaactgtctggtttgcaacaacagttatatcagcaaatgctaaagcataacgcgctatttgttggtgcagggacagagggggctacaaagggtggtattaaaggtttgaacaataagattatgcaattaagaaaaatctgcaaccatccattcgtatttgatgaagtggaaggtgttgtaaacccctcaagaggtaatagtgatttacttttcagagtagcgggcaagtttgaattactggatagagtgctaccgaaattcaaagcctcaggccacagagtgctaatgtttttccaaatgactcaagttatggatattatggaagacttcctaagaatgaaagatttgaagtatatgagattagatggtagcactaagactgaagaaagaacagaaatgctgaatgcatttaatgctccagattcagattatttctgtttccttttgtcaactagagccggtggtttgggtttgaatttacaaactgcagatacggtgatcatctttgatacagattggaatccacaccaagatttacaggcccaagatagagctcacagaattggacaaaagaatgaggttagaattttaagattaattaccactgattccgtagaggaagttattttggaaagagctatgcagaaattggacattgacggcaaggttatccaggcaggtaagtttgataacaaatcaactgcagaagagcaagaagcttttttgagaagattgatcgaaagtgaaacgaacagggatgatgatgacaaagcagaattagatgacgatgagttaaacgatactttggccagaagcgctgatgaaaaaatactatttgataaaattgataaggagagaatgaaccaagaaagagcagatgctaaagcgcaaggcctgagagtccctcctcctagattgattcaattagacgagctacccaaagtattcagagaagacattgaagaacatttcaagaaagaggattctgaaccattgggaaggattagacaaaagaaaagagtttactatgatgacggtctaactgaagaacaatttttggaggctgtagaagatgataatatgtctttagaagatgccattaaaaaaagacgtgaagcacgtgaaagaaggagattacgtcaaaatggtacaaaagagaatgaaatagaaaccctggaaaacacgcctgaagcatccgaaacttcattgattgagaacaatagcttcactgcagctgtggatgaggaaactaatgctgataaagagactacagcttccaggtcaaaacgccggagtagtagaaagaaaaggaccattagcgttgttacggcagaagacaaagagaatactcaagaagagagtacatctcaagaaaacgggggcgctaaggtggaagaggaagtaaaaagtagctccgttgaaattataaatggttcagaatccaagaaaaagaaaccgaaactgaccgtcaagatcaaactaaacaaaacaactgtgttggagaataatgatagtaagcgagcagaagaaaagccagagagtaaatcgcccgcgaagaagactgcagccaaaaaaactaaaactaaatccaagtcgcttgggatttttcccacggtggaaaaattggtggaagaaatgcgcgaacagttagatgaggtagactcccatccaaggacgtccatttttgaaaagcttccttcgaaacgcgactatccggactattttaaagtaattgaaaaacccatggccattgatattatattgaaaaactgcaagaatggcacttacaaaactttggaggaggtaaggcaagccttacaaacgatgtttgaaaatgctagattctataatgaagagggatcctgggtttacgttgatgctgacaagttaaatgagtttactgatgaatggttcaaggaacactcttcgtaa

SEQ ID NO: 77078 - DNA, 3045 bp, Saccharomyces pastorianus
atgctaaggttcgtgtcttcgcaaacctgccggtatagttcaagaggactattaaaaacatctttacttaaaaatgcatctactgtcaaaattgtcggaagagggttagccaccactggtacagataattttctatcgacatcaaatgccacctatatcgatgaaatgtaccaagcttggcaaaaagacccatcttcagtccatgtttcatgggacgcatatttcaagaatatgtctaacccaaagattcctgctacaaaggcttttcaggctcctcccagtatcagtaactttccccagggtaccgaagcagctcccttagggaccgcaatgactggttcagtagatgagaacgtctccattcatctaaaagtgcaattgctatgtagagcttaccaagttagaggtcatttaaaagcccatatagatcctttagggatctcatttggtagtaataaaaataaccctgttcctccggaattgactctagactactacggctttagcaaacacgatcttgataaagaaatcaacctaggacctggtatcctgccaaggtttgcaagggacgggaaatctaaaatgtctctgaaagagattgtggatcatctagaaaagttatattgttcctcttatggggtacaatacacacatattccatctaagcaaaagtgtgattggttaagagagagaattgagattcctgaaccttaccaatatacagtggaccaaaagagacaaatcttagatagattaacatgggccacttcttttgagtcattcttatctacaaaatttccaaatgataagaggttcggtttagaaggtttggaaagtgttgttccaggtattaaaactttggttgatcgttctgttgaattgggtgtagaagatattgttttgggtatggctcaccgtggtagattgaacgttttatccaatgtggtccgtaaaccaaatgaatctattttttctgaatttaagggttcgagcgctcgcgatgatattgaaggatcgggtgatgtcaagtaccatttgggtatgaactaccaaagaccaactacgtctggtaagtacgtcaatttatcgctggtggcaaatccttctcatttagaatcccaagatccagttgttcttggtagaactagagctttattgcatgccaagaacgatttgaaggaaaaaacaaaggccttaggtgtgttattacatggtgatgctgcttttgctgggcagggtgttgtttatgaaaccatgggtttcttgaccctaccagaatactctactggtggtactattcatgttattacaaacaaccagatcggattcactacggatccaagatttgcaaggtccacaccatatccttccgatttggctaaggccattgatgccccaattttccatgttaacgctaatgacgtggaagctgtgacctttattttcaatttagccgcagaatggagacataagttccacacagatgccataattgatgtcgttggttggagaaaacatggacataatgaaaccgatcagccatcgtttactcaaccattaatgtacaaaaaaattgcaaaacaaaaatccgtcattgacgtctatacggaaaaattgataagtgaaggcacattttctaaaaaagatattgatgagcacaagaaatgggtatggaacttatttgaagatgctttcgaaaaggcaaaggattacgtcccatctcaaagagaatggttaactgctgcctgggaaggattcaaatccccaaaggaattggccactgagatattaccacatgaaccaactaatgttccagagagtactttgaaagaactaggtaaggtactctcttcgtggccagaaggttttgaagtgcacaaaaatctaaagagaattttgaaaaatagaggaaaatctattgagacaggtgaaggcatcgattgggccaccggtgaagcattagcgttcggtacattggttttggatggtcagaacgttagggtttccggtgaagatgtagaaagaggtacattttctcaacgtcatgcagtcttgcatgaccaacaatctgaagccatttacacaccgctaagcactctgaataatgaaaaggcagacttcaccattgcaaattcctcgttgtctgagtacggtgtaatgggtttcgaatatggttattcgctaacctccccagattatctagtcatgtgggaggctcaattcggtgactttgcaaatacagcacaggttattattgaccaatttattgccggtggtgaacaaaaatggaagcaacgctctggtttagttttgtctttaccccatggttatgatggccaggggccagaacattcgtctggtagattggaaagattcttgcaactagccaatgaagacccaagatatttcccatctgaagaaaagctacagagacaacatcaggattgtaatttccaggttgtttatccaactacgcctgctaatttattccacattctaaggagacagcaacatcgtcaattccgtaaaccattggcgttattcttttctaaacagctgctgcgtcacccattggccagatcatctctttccgaattcactgaaggtggattccaatggattatcgaagatattgaacatggaaaaagtattggtacgaaagaggaaaccaagagattagttttgctgagtggccaagtgtacactgccctacataaaagacgtgaaagtttgggtgataagaccactgctttcttaaagattgaagagctgcacccattcccatttgctcagctacgtgattcattaaattcttatccaaacttggaagaaattgtttggtgccaggaagagccattgaacatgggttcgtgggcatacacagaaccacgcttacacacaacattaaaagaaacggataaatataaggatttcaaggtcagatactgtggtagaaacccaagtggtgctgttgctgccggtagcaaatcactacatttggccgaagaagatgcctttttgaaagatgttttccaacaatcctaa

SEQ ID NO: 77079 - DNA, 894 bp, Saccharomyces pastorianus
atgtcggagttacagtcacaacctaaaaagattgccgttgttacaggcgcctcaggtggtattggatatgaggtaacgaaggaattagccagaaatggctatttggtttatgcatgtgcaagaagactagaaccaattgcacaattggccatccaatttggtaacgatagtatcaaaccatataagttggatatttccaagccagaagaaattgtaacattttctggttttttgcgagctaatttacctgatggtaaattagatttattgtacaacaatgccggtcagagttgtacattccctgcattggatgcaacagatgctgcagtagaacaatgctttaaggtcaatgtgtttggtcacatcaacatgtgccgtgaattgtcggagttccttattaaagcgaaaggaaccattgtcttcactggttccttggcaggagttgtgtcattcccctttggtagcatttattccgcttctaaagctgctatccaccaatatgctcgtgggttacatctagagatgaagcccttcaacgtgagagtgattaacgctattactggcggtgtggctactgatatcgctgataaaaggcccttgcctgaaacctcaatatacaacttccctgaaggtagggaagcttttaattcaagaaaaaccatggctaaggacaataagcccatgccagctgatgcgtacgcaaagcaactggttaaagatatcttgagcactagtgaccctgtagatgtttatagaggaacgttcgccaacatcatgcgttttgtcatgatatttgttccttactggctattggaaaaaggactttccaaaaaatttaaattggacaaagttaataatgctttgaagtcgaaacagaagaataaggacgattag

SEQ ID NO: 77080 - DNA, 1425 bp, Saccharomyces pastorianus
atgaaattctcaactgccgttactacgttgattagttctggtgccatcgtgtctgctttaccacacgtggatgttcaccaagaagatgcccaccaacataagagggccgttgcgtacaaatacgtttacgaaactgttgttgtcgattctgatggccacactgtaactcctgctgcttcagaagtcgctactgctgctacctctgctatcattacaacatctgtgttggctccaacctcctccgcagccgctgcggatagctccgcttccattgctgtttcatctgctgccttagccaagaatgagaaaatctctgatgccgctgcatctgccactgcctcaacatctcaaggggcatcctcctcctcctcctcctcctcggcaacttctaccctagaaagcagctctgtttcttcatctaatgaagaagctgctccaacatctactgtcgtgtcaacttcttccgcaacccaatctagtgcttcttctgccactaaatctagtacttcttccacttcaccatctacttctacttctacttccacttcttctacttcctcttcctcttcctcctcctcttcttcttcttcttctggcagtggtagtatctacggtgatttggccgacttttcaggcccaagtgagaaattccaagacggcactattccatgtgacaaattcccatctggtcaaggtgtcatttctattgactggattggcgagggtggatggtccggtgtggaaaacaccgacacttccactggcggttcatgcaaggaggggtcctactgttcctactcctgccaaccaggtatgtctaagacccaatggccatccgatcaaccatctgacggtagatctgtcgggggtttgttgtgtaaaaatggttatttgtaccgttctaacactgacgcggattacttatgtgaatggggtgtcgaggctgcctatgttgtttctaaactaagcaagggtgtcgccatttgcagaaccgactacccgggcactgaaaacatggttatcccaacctatgttgaagggggtagctctttgccattgaccgttgttgaccaagatacttactttacttgggaaggcaaaaagacatctgctcaatactacgttaataacgccggcgtctcagttgaagatgggtgtatctggggtacttctggatctggtattggtaactgggcaccattaaactttggtgctggctccactggtggagtgacatacttatcattgattcctaacccaaacaacagcgacgcattgaactacaacgtcaagatagttgctgctgatgattcatccaatgtcatcggtgaatgtgtttacgaaaatggtgagttctctggcggtgctgacgggtgtaccgtctctgttacttccggtaaagctcatttcgtcttatacaattaa

SEQ ID NO: 77081 - DNA, 1056 bp, Saccharomyces pastorianus
atgaagcaggagccacatagacaatccgaagaaaaagagaagccgaaaggaccaatggctgttgaacgagagcatcatacctcattatcttctggtacaaccatgacagctagtacaggagacgagagtaccaacagtagaccagtggaatcatcgcaaactgaaaagtctctatcgcttcgaataagaatattaaaacaacttgggtttgacgatattcaagaactaaatgcatgcgacaccggcctattggagcaatttttaaatgtacgattgataaacgacacaaaagaactagaaaagatacgcgagtcaaatcttgcgaaactaaaccagattattgataaatgtatggaaagtgataaaataagtgattcgacattaaacaagattcttgatatgtccatgaatagagatacaaataatgataacaacaatcatcttacgataccgtctccgataacgacaaagaaacgcaagataaacgcctccgaacttgcaagtccacgaggccatagaagatatagatctgatatacctacagtgtcagaagttgagacaggggtcggataccctcaaatacaccagcaaccaggcgcatatactttacctatgcctgcaaatcagtggatgagcaacccgtatatgcaacctccgcaaccacaagtgcaacagataatgccgcagtatttatatccaccagggatgggaccacaagctcagcttcctacaatgagctcaaactcggagtcccagacaccagtgatgagctcacagtttctttccttgaaccagcatggcctttaccaacaaaatataggtgctcatccggtaatgagtatgggcccacaggcaaatatatacgggcagcagcatcagccgcaacctggtcaggaacgagaccagtcaagaaaaagttttagtcatagaaggtcacaaagtgccaacatttccatggcaaattttaggtcgcccatgcgaaatccccagccggcttcgtcccaaagacccgtcaattttctcattcatacaccaaaacatcctcctcccacatga

SEQ ID NO: 77082 - DNA, 1692 bp, Saccharomyces pastorianus
atgaccaaacaacaaacttctgtaatgcgtaacgcatctatagccaaggaagaacgtgaaggatctgataataataatgtggacagatccagctcagatgccatcagtgacaacgacgcagaaagatgtaattctcattctgaaatagataacgaatcaaattttgatatggtgccttattcaaggttcagccataagcaaaaaatgcttcttgtcgttcagtgcgccttcacaggctttttttcaaccgtggcagggtctatctactatccagtgcttactattattgagaggaaatttaacatcacagaagagttagctaatgtcactattgtggtttattttattttccaaggagtggccccttcaatcatgggtggtttagctgatacatttggaaggcggcctattgtattatgggcaatcttagcctacttctgtgcctgcatcggactggcatgtgcacatgattatgcccaaatcctggctttaaggtgtttgcaagcagcaggtatttctcctgttattgcaataaatagcggaataatgggagatgtaacgacaaaagtagagaggggtggatatgttggattggttgcagggttccaagttgttggaactgcattcggtgcattgatcggtgccggattatcctcgagatggggttggagggcaattttttggtttttggctattggttccggaatttgtctagttttttcaaccttattgatgccagagacaaaaagaactttggtgggaaacggctccgtaacaccaaggtcatttttgaataggtctttgatattgcatgttggttccgtaaaaaaaacattacatttagacgatcctgacctagagaccttagaaccacgtactagcgtggattttttagcacctttaaaaattttgcacatacgagaaatagacattttattgtccatcgccggcctgcaattttccacgtggaccactcatcaaacagccttaacaattgtattgagtaaaaagtacaatctatctgttgcaaaaataggtctgtgctttttacctgcaggaatctcgacactgacaagtattatctctgctggtcggtacttaaattggagctacagaacaagaaaggttaaatacaacagatggattaaagaacaagaattacagctgatggagaaatataaaggtgataaaaacaaggtagcagaacttattcactctaattctcattatacattcaatttagtggaggcaaggttgcatccagcatttgtgacacttcttctcagtagcattggctttactgcctttggatggtgtatttcggtaaaaacaccgcttgctgctgtattatgcacaagtgcatttgcaagtttattttcaaactgtattttgaccttctctactactttgatagtagatctctttccgtctaaggcttctaccgcaacaggttgcttaaatttatttagatgtctcctatccgcaattttcattgcagcactgaccaagatggtcgagaagatgagatatggaggtgtttttacgtttttgagtgctataacttcatcttcatcccttttattattctatctcctgaagaatgggaaacaattatcgttcgataggaatagggcaaatgataagtcggctggaaggtcggttggtaaaaattcagaaaaagttccgacgtaa

SEQ ID NO: 77083 - DNA, 1242 bp, Saccharomyces pastorianus
  modified_base (676)..(805): a, c, g, t, unknown, or other
atgtacttggaatatcttcaacggaagttgaacctaatggatgagtctagcactataagcaataatttccctgattattcaccaaatttaaacacacccattacttcaaattttaatgaagaaacgggttcggactgctctttagttactccaagaataatttccagttcaaattcgaattcgaactccaattctaattcgaactccaactccaactcaggctctattgacgaaaatgagctaaacaactctaattcatcctcctcgtctgcaagacagataaggaaaaaatggaaagagcctgaggatatagcattcattactacaataatgaataattctcaattactaacattcgtagaatatttcaagcccatgaagaatttttggaaaaaaatttcaaaaatcctattccaacaatatgggtacgagagaaactctcgtcaatgtcatgatagatttaaagtcttatacacaaagtctttgaaagtgcatccatcaaagaaatccaagcaaaagaaaaaaaaatcaaaacaagaggcaggctcaaacttaaattttgatccgtcaaaattatctagaatgcagtatttgctagtgcagttacaaaacacttttagttttgtaaacggaaacattatactcaagtcgcaaaaaacattgaagccgaacaagnnnnnnnnnnnnnnnnnnnnnnnnnnnnnnnnnnnnnnnnnnnnnnnnnnnnnnnnnnnnnnnnnnnnnnnnnnnnnnnnnnnnnnnnnnnnnnnnnnnnnnnnnnnnnnnnnnnnnnnnnnnnnnnnnnggaatagtaatcatagtactaatgtttttagtacaccagagcatattcagtcaagtatcaacctcgataaattagaatctttgccagctttggataccaaaggagaaccatcctccattagcccggctcaattttcccttttgtcatcagcaccggcagacaatctaatcctgcaaactccaccatcgccatttttccagcaaacaatgcctatacagctaccgcgcgatgcacaacaagaacaaatttccccagttttctctacagatgtcatatacatgtggcaaacaatgtttaacactattgaaaatttaaaggaacaagtaaattgcttaaaaaatgaagttaagcaattaaaccataaattttaccaacaaaataaaccgttgcataatatgtcaacttcagactcagaaaattttatgcaacaacattaa

SEQ ID NO: 77084 - DNA, 696 bp, Saccharomyces pastorianus
atgtcatttctatgtgggtcagcttcaacgtcaaataaaccgatcgaaagaaagatcgttattttgggcgacggtgcctgtggtaaaacttcgttgctgaatgttttcaccagaggttattttcccgaagtttatgagcctactgtttttgaaaactatatccatgatattttcgttgacagtaaacatatcacgctatcgttgtgggatactgcgggccaagaggaatttgacaggttacgatccttgtcttattcagatacgcaatgtataatgttatgtttcagtattgattcacgcgattctttagaaaatgtccaaaataaatgggtgggtgaaatcactgatcattgtgaaggcgtcaagttagtcttagttgcactaaagtgtgacttaagaaacaatgaaaatgaatctaacgcaatcacaccgaacaatatccaacaggataacagcgtttctaacgacaacggaaataacataaatagcacctcaaacggcaaaaacctgataagttatgaagaaggtctagctatggctaaaaagatcggtgcgctacgttatttggaatgtagcgctaagctgaataaaggtgtcaacgaagctttcacagaagccgcaagagttgctttaaccgcgggcccagtagcaaccgaagtgaaaagtgacagtggatccagctgtaccattatgtaa

SEQ ID NO: 77085 - DNA, 957 bp, Saccharomyces pastorianus
atgacagtaatcaccattgccaagagaggccttccaaaattaaccacttccacttcttcgacaacaactgccagttcaagtagtacgataacatctgttgcttcttcttcatcttctttaccacttttgtccaactctacatcctcttctattataccaagtattactcctccctctagaaatggtaatccttatattttggattccggggatatgcctaatggaacagttttcattgtagtggggggcatcgcgggagtgatttttttggcaatattgctatggtgggtaataacaacttattcttcgcataggttgaccagaagtgttcaggactacgaatcaaagatgttttccacacaacatacccagttttacggcgattccccatatatggattatcccgccaaagaaaatttccaagatcaggtccatatcagcgagtccgatattagtcccggaaataaggatgaatcggtgaaagatgcacttgtatctcatactaataatgaaaaaccattcttaagtaatttcgaaaggccgctatcctctcttgtatccgaatccaacagaaattcacttttcatttcaccaacaggtgatatcttatacaaaacaaggctatctaaactttaccaagaaagccctagattattacagaaacctgtgattatgacaagtgataatgtatctacaaattctctggtgtctacaatctcttcatcatccgcatcgtcgctcgataacggtaatgaaaaggaggtgggtgaagacataaggaaacccgcaaaaattgcatcttcaccaagtcgaaagctgcttaattcaccagaaagtgatggtagcgtaaatcgtaaccatagtaagggtaatttgttggtcgtacagtccaaaagaaaacctacaccttcgacttatctcgagcacatgctggaggggaaagaacaggatgagtaa

SEQ ID NO: 77086 - DNA, 1158 bp, Saccharomyces pastorianus
atggtttttgatttgaaaagaattgttagaccaaaaatttataacttggaaccttatcgctgtgcaagagatgatttcaccgagggtatattgctagacgccaatgaaaatgcccatggacctactccagttgaattgagcaagaccaatttacatcgttacccagatcctcaccaattggaattcaagaccgcaatgacgaaatacaggaacaaaacaagcagttatgccaatgacccagaggtaaaacctttaactgctgacaatctgtgcctaggtgtgggatctgatgagagtattgatgctattattagagcatgctgtgttcccgggaaagaaaagattctggttcttccaccaacatattctatgtattctgtttgtgcaaacattaatgatatagaagtcgtccaatgtcctttaactgtttccgacggttcttttcaaatggataccgaagctgtattaaccattttgaaaaacgactcgctaattaagttgatgttcgttacttcaccaggtaatccaaccggagccaaaattaagaccagtttaatcgaaaaggtcttacagaattgggacaatgggttagtcgttgttgatgaagcttacgtagatttttgtggtggctctacagctccactagtcaccaagtatcctaacttggttactttgcaaactctatccaagtcattcggtttagccgggattaggttgggtatgacatatgcaacagcagagttggccagaattttaaatgcaatgaaggcgccttataatatttcctccctagcctctgaatatgcactaaaagctgttcaagacagtaatctaaagaagatggaagccacttcgaaaataatcaatgaagagaaaatgcgcctcttaaaggaattaactgctttggattacgttgatgaccaatatgttggtggattagatgctaattttcttttaatacggatcaacgggggtgacaatgtcttggcaaagaagttatattaccaattggctactcaatctggggttgtcgtcagatttagaggtaacgaattaggctgttccggatgtttgagaattaccgttggaacccatgaggagaacacacatttgataaagtacttcaaggagacgttatataagctggccaatgaatag

SEQ ID NO: 77087 - DNA, 372 bp, Saccharomyces pastorianus
atgatagaggatgaatttattattaacggcactaacaacgtacatatagctaaatatcactattttgccatgttcaaatttttgaagaaatcaccaatttgctttttcgtattcatggccaacccaacttctactactttaaatcctttcatgtcctttgttattgaagaggatgcatcgaacgacgaagcctttttacctttctcctccaattgtaacctactcacttgctcacgcaataatttgatttcttttagtaaaccgtcacgtgcaagagattctttagctagttttgccactaatggattatcgtccaatctcttattctttacagtgaacaattttaaaatgttcagcaactcttcagtatga

SEQ ID NO: 77088 - DNA, 4305 bp, Saccharomyces pastorianus
atgtcttctttgaaggatgaagtacccactgagacttccgaagacttcggttttaagtttttaggtcaaaaacaaattctaccttccttcaatgaaaaactgccatttgcatccctacaaaatctcgatatttcaaacagtaagtctttattcgttgctgcctctggtagtaaggcggtggtcggcgaattacaattactgagagatcatatcacctccgactctactccgttaacgttcaagtgggagaaagaaatcccagatgtaatatttgtgtgctttcatggtgatcaggttttggtttcaaccagaaatgcattatattcgttagacttggaggaattgagtgaatttcgaacggtcacttcttttgagaagccagttttccaattgaagaacgttaataacactttagtaattttaaattcagtcaatgatttatcagcactggatttaagaacaaaatcgactaagcaactggcacaaaacgttacctcttttgatgtcacaaattcgcagttagcagttctactaaaagatagaagttttcaaagttttgcatggcgaaatggcgaaatggaaaaacaatttgagttctctctaccgtcagaattagaagagcttccagtagaagaatattcccctttgagtgttaccattctctctccacaggattttttggcggttttcggtaatgttatatcagagaccgatgacgaagtttcatacgatcaaaaaatgtacattataaagcacatagacggcagcacctcatttcaagaaacttttgatattacacctccattcggacaaatagtaaggttcccatatatgtacaaagttaccttgtctggtttaattgaacctgatgcaaacgtaaatgtgctagcatcatcatgttcaagtgaagtaagtatatgggactcgaaacaagttattgaaccttcccaggattctgaacgagcagtattgcccatcagtgaggaaacagataaggacacaaatccaataggtgtggcagttgacgtcgttacttcaggcactattctagaaccttgttccggtgttgatacgatagagcgattgccgctcgtttacatattgaataacgaaggtagcttacagatagtcgggttgtttcatgtggcagcaatcaaaagcggccattatagcataaatctggaatgtttagaacatgagaaatctctctctcctacatcagaaaaaattcctattgctggacaggagcaggaagaaaaaaagaaaaataatgaatcaagtaaggctttatcagaaaatcctttcacatcagcaaatacatcaggcttcacttttcttaaaacacaaccagccgctgccaatagcctgcagtctcaaagttcttcaacctttggtgctccctcatttggatcatccgcatttaaaattgacttgccatcagtctcatctaccagtactggtgtagcgtccagtgaacaagacgcaacagatcctgcttctgctaagccagtattcggcaaacccgcgttcggagctattgccaaagaaccgtcaacatcagaatctgcctttggcaagccatcttttggtgctccctcctttggctctggaaagtcatctgttgaatcgcctgcctccggatctgcctttggtaagccctcttttggtactccttcctttggctctggaaattcatctgttgagccgcctgcttccggatctgcctttggtaagccctcttttggtacatctgcattcggaacttcatcaagtaacgaaactaactctggatccatatttggaaaggctgcatttggttcatcatcttttgcacccgccaacaatgaacttttcggatcaaactttactatttcaaaacctacagttgacagcccaaaggaggtagattcaacgtcacctttcccatcttctggcgatcaaagtgaagatgagtctaagagtgatgtagactcttcttcgacaccttttggtacgaaacctaacacctctacgaaaccaaagaccaatgcctttgattttgggagttcttcctttggatctggattttcaaaggctctggaatctgttggttccgatacaacttttaaattcggtactcaggcttcacctttctcttcacagttaggaaacaaatcaccattcagttccttcacaaaagatgatactgaaaatggatctttaagtaagggctctaccagtgaaatcaatgacgataatgaagaacacgaaagcaatggtcccaacgtaagcggtaatgatttgacagattctacggttgagcaaacatcttctactagattaccggaaactccctcggatgaagatggtgaagttgtcgaggaggaagcgcaaaaatcccccataggcaagctaactgaaactataaaaaaaagtgccaatattgacatggctggtttaaaaaatcctgtatttggaaatcatgtcaaagcaaaatccgaatcgccgttttcagcatttgcaacaaatattaccaaaccaagctctacaacacctgctttttcgtttggtaactccacaatgaataaaagtaatacatctacggtttcaccaatggaagaagctgatactaaagaaactagtgaaaagggctccataaccttgaagagtgtggagaatccgtttctaccagcgaaagaagaaagaactggagaaagttctaaaaaggatcataacgatgacccaaaagatggttatgtatcaggaagtgaaatatctgtaaggacttctgaaagtgcttttgataccacagcaaacgaagaaattccaaagtcacaggacgtgaactatcatgaaaaaagcgaaacagacccaaaatatagtcaacatgctgtggttgatcacgataacaagtctaaagaaatgaatgaaacttcgaagaataatgaaaggagcggtcaaccaaatcatggtgtccaaggagacggaatagcattgaaaaaagacaatgaaaaagagaattttgattcaaatatggcaataaagcaattcgaagaccaccaatcttcagaagaggacgcgagcgaaaaagacagtagacaaagcagtgaagttaaagaatcagatgataacatgtcactcaacagtgaccgggatgaaagtatatctgagtcctacgataaactggaagatattaatactgatgagctacctcatggtggagaagcttttaaagcacgtgaagtgagcgcttccgctgattttgatgtacaaacttcattagaagacaattatgctgaatctggcatacagacagacctttcagaaagttccaaggaaaatgaagttcaaacggatgccatacccgtgaaacacaacagtacacaaactgttaagaaggaagcagtcgacaatggtctgcaaactgagcctgttgaaacatgtaatttttctgttcaaacatttgaaggtgacgaaaattatttagcagagcaatgcaaaccaaagcaattgaaagaatattacacaagtgcaaaagtatcaaatattcctttcgtttcacaaaattctacgttaaggttgattgagagtacatttcagacggtcgaagctgagtttactgttctgatggaaaacatccggaatatggatactttttttactgatcaatcgagcatccctttggtgaagcgtacagtgcggtctatcaataatctgtatacttggagaataccagaggctgaaattctattaaatattcagaataatatcaagtgtgaacaaatgcaaataacaaatgctaacattcaagacctgaaggaaaaagttacagattatgtcaggaaagatattgcacaaataactgaagatgtagccaatgcaaaagaggagtatctgtttttaatgcattttgatgatgcttcgagtggatacgttaaagatctcagcacgcatcaatttagaatgcaaaagacattacgtcaaaagctattcgatgtgtccgccaaaattaatcatactgaagagttgctgaacattttaaaattgttcactgtaaagaataagagattggacgataatccattagtggcaaaactagctaaagaatctcttgcacgtgacggtttactaaaagaaatcaaattattgcgtgagcaagtgagtaggttacaattggaggagaaaggtaaaaaggcttcgtcgttcgatgcatcctcttcaataacaaaggacatgaaaggatttaaagtagtagaagttgggttggccatgaatacgaaaaagcaaattggtgatttcttcaaaaatttgaacatggcaaaatag

SEQ ID NO: 77089 - DNA, 846 bp, Saccharomyces pastorianus
atggcactaccatttttcaacgatatatctagagatgtcaatggcctattcaatagggacttttttcacaccaaccccctctctttgaatatttcaacaaccacggaaaatggtgtgaattttactctgaaggcgaagcagggcgtgacagaaggccccatccaaactagcgtagaaggacggttttatgacaggaaggagggagtgtcgctatctcagagttggtcgaaccagaacaggttaaatacaagaatcgaattttccaagatagcacctggttggaaaggtgatgtcaacgcatttttgactccccaatccatcaagaacgccaaatttaatttgagctacgcccaaaaatcgtttgcagcaagaacttctatagacatcttgcaacctaaggactttgtcggaagtgttactttgggccaccgcgggtttgttggcggcactgaaatcgcatatgacacagctgcgggtttatgtgcacgctatgctatgtcaatcgggtatcttgccagagaatattcgtttattttgtctactaacaacaggcaatgcgcaactgcttcattttttcaaaacgttaaccgctatttgcaagtgggaactaaagccactttacaatcgaagacaagttctaatatgaacattgaatttgttaccagatacgtaccagattctatttcgcaagttaaggcaaaaattgcagattcaggcctgactacattgtcgtacaagcgaaatttgaataaagatatttctttgggtgtgggtatgtctttcaatgcgctacaactgactgaaccagtccacaaatttggctggtctctatcgttctcgccctga

SEQ ID NO: 77090 - DNA, 630 bp, Saccharomyces pastorianus
atgaacatatacacatcacccacgcgaacaccgaacatcgtaccaaagagtggccaaagaccatctcttcctatgctggccacagatgagaggtctacggacaaagaaagcccgaatgaagactgtgaattcgtgccttgttcgagtttggacgtgcgcagaatctacccaaaaggcccattacttgttctcccggaaaagatctacctttattcagagcccacggtaaaagagcttttaccctttgatgtggtcatcaacgttgctgaagaggcaaacgatttacgaatgcaggttcctgctgtcgagtaccatcactaccgatgggaacatgattcgcagattgcgttggacttgccatcattgactagcatcatacacgcagctacgactaagcgagagaagatactgatacattgccaatgtgggctgtcgagatccgcaacgctgattattgcatatataatgaaatatcataacttgagtctgaggcactcatatgatctgttgaaatcaagggcagacaagataaacccttccatagggcttattttccagttgatggaatgggaggttgctcttaacgcgaagactaacgtgcaagccaacagttatagaaaagtaccgtga

SEQ ID NO: 77091 - DNA, 3252 bp, Saccharomyces pastorianus
atgaatgagactactacaaaacagccgctaaagaaaaggtccctgagcagctatctttcaaacctgagcacgagacgggaggagctggaaaagatttctaaacaagaaacatccgaagaggaagatactgccagcaggcatgaacaaaaggaaacactgtcggaagaagtaaatgataagcttccagaaaatggtgcatcgtttcgctcacagactacaagcgttcatcaagccacccaaaataacctgaatgcaaaggaatccgaagacctggtccataagaatgacgcgagttcacacgaaggagaggttaatggggacaatcgtccggacgatgtccttgaaacgaatgaaaaaataagccaagcaatacgagcgaaaatttcgtcatcatcatcatcacccaatgtacgtaatgttgatatccaaaaccatcaatctttttcgagagaccaacttcgagcgatgttgaaagaaccaaaaaggaaaactgttgatgatttcatagaagaagagggtttgggagctgttgaagaagaggatttaagtgatgaggtacttgaaaaaaatacaacagaaccagaaaatgtggaaaaagatatagagtatagcgactcagataaggacacagacgatgtgggaagcgatgatcccacggcacccaactcaccaataaaacttggtcgtcgcaaactggttagaggtgaccaacttgatgcaacaacaagttccatgtttaataacgaatcagattctgaattatcagatatcgatgatagcaagaatattgctttatccagtagcctatttagaggcggttcttcacctgtgaaagagacaaacaacaacctttcaaatatgaattcttcaccagcacaaaatccaaaaaggggttctgtctccaggagtaatgatagtaacaagagttctcatatagctgtttccaagcgccccaaacagaagaagggcatatatagggattctggtggtagaacaagactacagattgcctgtgacaagggcaaatatgatgtagtcaaaaagatgattgaagaaggaggttacgatattaatgaccaagacaatgctggtaatacagcattgcatgaagcggcgttgcaaggtcatattgagattgtggaactgttgatagaaaatggtgcagatgtaaatatcaagtctattgaaatgttcggcgatactcccttgatcgatgcttccgccaatggacacctggatgttgtcaagtatcttcttaaaaacggtgcggacccaactatacgtaacgctaaagggttaactgcgtttgaatctgtcgatgatgaatctgaatttgatgatgaagaagaccaaaagattttgcgtgaaataaaaaaaaggttgagtatagccgctaaaaaatggactaacagagcaggaattcataatgacaaatctaaaaatggcaataatgctcacacaatagatcagccaccttttgataataccacaaaagccaaaaacgaaaaggccgctgactcaccttcaatggcttccaatattgatgagaaagctccggaagaggaattctattggacagatgttacttctagagcgggaaaagaaaaactgtttaaagcttcgaaggagggacatttaccatacgttggtacgtatgtagaaaatggtggtaagatagacttaaggtcatttttcgaaagcgttaagtgtggccatgaagatattacaagtatctttttggcattcggatttcccgtaaatcaaacttcaagggataataaaacatccgcattaatggtagctgttggtcgtggccatcttggaactgttaaactgctattagaggcaggtgcagatccaaccaaaagggataaaaagggtcgtaccgctttgtactatgccaaaaacagcataatgggaataacaaacagtgaagaaattcaattgattgaaaatgctataaataactatttgaagaagcactctgaagataataatgatgatgatgatgatgatgataataataatgaaacatataaacatgaaaaaaagagagagaaaacgcaatcacccatattagcaagccgaagaagtgccactcctagaattgaagacgaagaggacgatacggggatgctcaatctggcagacgatgactttaataacgatcgtgatgtcaaggaatctacaacttcggattcgcgcaagagattggatgacaatgaaaatgttggtactcaatactcattggactggaaaaaacgtaaaacaaatgccttgcaagatgaagaaaaattaaaaagtatctcaccactctctatggaacctcattctccaaagaaggcaaaatctgtagagataagtaaaatacatgaagaaacggctgctgaaagagaagcaagactcaaggaagaggaagaatacagaaagaaaagattagaaaagaaaagaaaaaaagaacaggaactactacaaaagctggccgaagatgagaaaaaaaggatcgaagaacaggagaagcagaaagtcttagaaatggaaagattggaaaaagctactttagagaaagcaagaaaaatggaaagggaaaaagaaatggaagaaatctcttatagaagggcagtaagggacttatatccgttaggactgaagattattaacttcaacgataaacttgattacaaaagatttttgccgctatattattttgtagacgaaaaaaacgataaatttgtgctcgacttgcaagtaatgatattgttgaaggatatcgacttgctctcaaaggacaatcaaccaacttctgagaagattcccgtcgatccctcgcacctgactccattgtggaatatgttgaaattcattttcctgtatggaggtagttatgatgataaaaagaacaacatggaaaataaaagatatgttgtaaactttgatggggttgatttggacacaaagattgggtatgagcttttggagtacaaaaaatttgttagtttgcccatggcgtggattaaatgggataacgttgttattgaaaaccacgcaaaaagaaaagaaattgaaggaaatatgattcaaatatcaataaacgaatttgcacgatggagaaacgataagctgaacaaagcgcagcagccgacgcgcaaacagcgttctctaaaaatacctcgagagttaccggttaaatttcaacaccgtatgagcatatcctccgtcctccagcagacatccaaagaaccattttggtaa

SEQ ID NO: 77092 - DNA, 1134 bp, Saccharomyces pastorianus
atgtcattttccttcggctttacttccaatgactttgatgatgatgagcttgttgctcaacctgaaacattcgttgaaagcagcaaagaaaacgaaaatatcactgcttacatcaatccattagattcggatttcttgtcgcaagctggagttgtgcagccaaatgtggaagacctaggaacaatattggaaagtcttaaggatgttagattgacatttgaagagttccaatctccgatatatagaaaaccattgatcaggagggaactattcgatgtcaaacatcagctaatgttagagacagatgcccaatccaacaacaactccacggaactggacattttactaggtgatacttctgaagatttgagaaagaacatctatgaaggtgggttgaaatcatgggagtgctcttatgatttagttgatttgttgtcagagaacgttgatagaataagcaacgatatcgacgcggttgtcgaaataggctgtggtacggcactaccctcagagtttcttttcagatctgctcttctacggaatgatagaagtaaaggtttaaagtttgttttgactgactataatgccagtgtattaagattagttaccataccgaatttggttataacatgggctaaaacggttttgacaaaggaacaatggtacgccttacagaaagacgaatgtgaagatattccaataaataatgaggaactgcttcttacctcaaagctgttagctgccttttacgacgatgtacaaagcaggaatatcagcgtcactcttatatcaggatcgtggggacgtaaatttagtaatttgatccatgaagtactctcaggtagccaaaaagtcctttcattatcctcagaaacaatttatcaacctgacaatttgcccgttatagcggaaacaatacttgacatacacaatttaccacaaaccgatgtcaaaacttacgtagccgcaaaggatatttattttggagtcggtggtagcatcactgaatttgaagcttatttggacgacaaaataaactccgaacatctaccaattcattctgaaaggtttaaagttaactctggcttaaaaaggtcgattatatgcattgaaacaaataaagctatccgatag

SEQ ID NO: 77093 - DNA, 2781 bp, Saccharomyces pastorianus
atgtctcatcacaagaaacgtgtttacccacaagctcagctccagtatggacaaaatgccacccctctacaacagccagcacaattcatgcctccgcaggatcctgctgcagctggaatgagctatggtcagatgggaatgccgccacagggtgcagtcccttccatggggcagcaacaattcctaacccctgctcaagaacagttacaccagcaaattgatcaggccaccacttccatgaacgatatgcatctgcacaacgtaccgctagtcgatcctaacgcttatatgcagccacaggttcccgtgcaaatgggcacacctttgcagcaacagcaacaaccaatggcagcgcctgcgtatggccaacctagcgccgcaatgggccaaaacatgaggcccatgaaccagttgtatccaatcgatctgttgacggaattgcctcctccaattaccgatctgaccttgcctcccccaccgttggttattcctccagaaaggatgttagttccttctgaattgtccaatgcgtctccagattatatcaggtcgaccttgaacgccgttcctaagaacagctccctgctgaagaagtctaaacttccatttgggcttgttatcagaccataccaacacttgtacgacgatatcgacccgcctccattgaatgaagatggacttattgtccgttgtcgtcgttgtcgttcttacatgaacccttttgtcacttttatcgagcaaggcagaagatggagatgtaacttttgtcgtctggccaatgacgttcctatgcaaatggaccagagcgatccaaacgacccaaagagtagatacgacagaaatgaaatcaaatgtgctgtgatggaatatatggccccaaaggaatatactctaagacaaccacctccagccacttactgtttcctgatcgatgtctcccagtcctctatcaagagtgggttactggccactaccatcaacacccttttgcaaaatcttgattccattccaaaccatgatgaaagaaccagaatttccatcttatgtgtagacaacgccattcactactttaaaatcccattggattctgaaaacaatgaagagtccgccgatcaaatcaacatgatggatattgccgacctggaagagcctttcttgcccagaccaaactctatggtcgtgtccttaaaggcctgcagacaaaacattgaaactttattgaccaagattcctcaaatcttccaatctaatttaatcacaaatttcgcactgggccccgctttgaaatccgcttatcatttaattggtggcgttggtggtaaaataattgttgtgtcaggtactttgcccaacttaggcataggaaaattacaaaggagaaatgaaagtggtgttgttaatacatccaaggaaactgcacaactactttcctgtcaagactcattttataagaatttcaccatcgattgttctaaagtacagattactgtcgatttatttttggcttctgaagattatatggacgttgtatcactatcgaatttgagtcgtttcactgctggtcaaacgcatttctatcctggtttttcaggcaagaacccaaatgatattgtcaaattttccactgagtttgccaagcacatttccatggatttctgtatggaaaccgtaatgagagcccgtggttccacaggtttgagaatgagtagattctatggtcacttcttcaatagatcatctgatttatgtgcattttccaccatgccaagagatcaatcatacttattcgaagttaacgttgatgaatccattatggctgactattgttatgttcaagtagcggtacttttatctctgaataatagtcaacgtagaataagaattataacattggctatgccaaccacggaatcgttggcagaagtctacgcatctgctgaccaattagctatagcgtcgttttacaactcgaaggcggtggagaaagcattgaattccagtttggacgatgcaagagtattgatcaacaaatccgtgcaagatatcttagccacgtacaagaaggaaatagtggtgtccaacactgcagggggggccccattgaggttatgtgccaatttgagaatgttcccattgttaatgcattctttaactaagcatatggcatttagatctggtattgtcccaagtgaccatcgcgcctcggccttgaacaacttagaatcattacctttgaaatatctaatcaaaaacatctaccctgatgtttattcgctgcatgatatggctgatgaggctgggttaccagtgcaaactgaagatggtgaagctactggcacaattgttttgcctcaacccatcaatgctacctcttcgttgtttgaaagatacggtctatacttgatagataatggtaacgaattgtttttgtggatgggtggtgacgctgtaccagcgctagtattcgatgtgtttggaacacaggatatctttgacattccaattggcaaacaggaaatacctgttgttgaaaattctgaattcaatcaaagagtaagaaacattatcaaccaattgagaaaccatgatgatgtcatcacttaccaatcattgtatattgttaggggtgcctctttgagcgagcccgttaaccatgcatctgctagggaagttgcaacgctaagactatgggcttctagcaccttagtggaggataagattttgaataacgaaagttacagagaattcttacaaatcatgaaagccagaattagcaaataa

SEQ ID NO: 77094 - DNA, 2091 bp, Saccharomyces pastorianus
atggtaggctcgaaggatattgatctattcaacctgagagagaacgagcaaatcgtttctccttgtcttatcgtgcacggaaaatgcaataagcaaaatggtgcgaagaccgttcaagtgcagcatccacaattgcctccaattacttaccccatacataatcagttcttcaaggccactgtgatattgactcctggtgagaacaagttgacctttgttacagacactaacaccgctaggacaatcgtatgttactacacaccactgacgcagaaccctcccgtgcacctgtgtctgatcttggccaaggattcgcctttacagtttgactctcctcgagaacagaaggacagagagggcgggaatggcctcgaattggcaatcaagaagctaagacttggggccagactcatgcaagcgtacacgaacgagcaaatgctgagaaacagtatgggaaataggacgtttccctttgttgaagaatttacctgggacacgctgttcgaacggcctgctatgagaaacaccatcaaaatacatgtagttcgttcggaaaagacggtgaaggaaatccaggaccctgacatagctcaacagaattccaaagggaaaaacaccggcgccctttttgggatagccatggacgcccttaaaagttacggcggacccttcaccaataacgaaaagcctgttcaggcagcttgtatgtttctagacacccactgggatggtaagttgattagaggccacgccgcattgggtgggggtgacgacagcattaagctcgccatttttgggtcgtacgggctttactcatggcctacttgtctcgagcaattggtgccttatttcactgatgagacaagatcctccaccagtgaagtcgccaacgactgtaatgagtgtggtacttactgggaatgtttgactatcacgttgggagcatttatgcatgagattggtcacttactgggttgtcctcatcaggaaagcggtgttatgctaagaggctataccactttgaataggtctttcttgactaaagaggcttattctgtaagaactaattcaactggtgctagtcctcccatcttccccaaggaagaatgtacctggaaccgtctcgatacggtaagatttttgtaccacccctctttcactttaccacaggattattacgatccatcgttcatgagacctacaaaattgggcggataccccaatataaaacactctgtatatcctttgggtaacggcagttgccgcatattatcgcccacaggaatctatttgattgaaattatatgtgatgatttggccaggggccatattgaatacttgccggtttccctaggtggacaggggcctcaacgggaagttatagtaacattagatgatttacgtgccaggttgcccaagaatgaactcgccaagtttggcaataccttcaaattgaaaattctttctgttaatgcaccggaaaccgagttcgacaagttcccatctttgttagatgttcagccattagacatgtcgaaatatgggttttctaaaaatgttcaaggtatcaaatcaccactttatggtcgcagcgacggtggtaatgctgtcggcgtcgtcgcttttgatgttagattagtcactgctgtgagaatataccatggctatgcattagatggtgtgaggttttattacaaggaaaaaccaactggaacaaaggatgctcccgcatccaagccctctgtaccaccaagaaattatttctcaaaaattacacatagtatcaaaaatcatgcttcaataaacgaagaaaatctaaaaagtgtactctttggacatgaaacacaaaattttacggatgctacactagaaccgggtgaaataatcattgggtttaatctgaggtgcggagcttgggttgatgctatccaaattataacgagtcatgggagaatgaccgacatgtttggtaacaaagacggaggtgggttcgctgaattgcagccacctaatggccaatatatcctaggtgtgactggcagagtcggtcaatgggtcgacgccttcggaattatttacggagctttatag

SEQ ID NO: 77095 - DNA, 2484 bp, Saccharomyces pastorianus
atgtacaaaccagtagacttctctgaaacatctcctgtgccgcctgatattgatcttgctcctacacaatctccacaccatgtggcacctagtcaagactccagttatgatcttttatcccggagttccgatgataaaattgatgctgaaaagggtccgcatgatgaattatctaagcacttaccactttttcagaaaagacctttgagcgatactcctatatcgagcaattggaactctcctggaatcactgaagaaaatacaccttctgactctcctgaaaatagcgctactaatttgaaatcgctacatcgattgcatattaacgacgaaacgcaactaaaaaatgctaaaattcccacaaacgatactactgactacatgcctccttcagatggagcaaatgaggtaactcggattgatttgaaagacattaaatcacctacgagacaccataaaagaagacctaccaccatcgatgttcctggtttaacaaagtctaaaacatctccagatggtctcatatcaaaggaagatagtggatcaaagttagtgattgtcatggtcggactgccagctacgggaaagtcatttattacaaataaattatccagatttttaaattattctttatactattgtaaagtgtttaatgtcggtaacactagaaggaagtttgctaaggagcatggcctaaaggaccaggattcaaagtttttcgacccgaaaaacgccgactctactaggttgagagacaaatgggccatggatactctggatgaattgctagattatttattagaaggttcaggatctgtgggaatttttgatgctacaaatacctctcgtgaaagaagaaaaaacgttctggctagaatcagaaagagaagtcctcatttgaaggttttatttttagaatctgtttgttcggatcatgcactggtacagaaaaatattagactcaaattatttggtccagattacaaaggtaaagatcttgaaagctctttaaaagattttaaaagtcgcctggcaaactacttgaaagcctatgaaccaattgaggatgacgaaaatttgcagtacatcaaaatgatagatgtgggaaagaaagtcatcgcatacaatattcaagggtttttagcttcgcagacggtatattatttgttaaatttcaatttggctgacagacaaatttggataacgagaagtggcgagagcgaagataatgttagtggccgtataggcggaaattcccatttgactcctcgtggtctaagatttgctaaaagtctaccaaaattcattgccagacagagagaaatattttatcaaaatctcatgcaacaaaaaaagaataatgaaaatacaaatgggaacatttataatgactttttcgtttggaccagcatgcgtgctaggactatagagactgctcaatatttcaacgaagatgattatcctatcaaacaaatgaaaatgttagatgagttaagtgcaggtgattatgatggtatgacatatccagaaattaaaaacaactttcctgaagaattcgaaaaaagacagaaagataagttgagatacagataccctggtattggcggtgaatcgtatatggacgttattaatagactcagacctgttatcacagaactagaaagaatcgaggataacgttcttattattacacaccgggtggtggcaagagccttattgggttattttatgaacttgagtatggatattattgccaatttggatgtcccattacattgtgtatattgcctagaaccaaaaccatatggaatcacttggtcattatgggagtatgatgaagcatcggattcattttctaaggtcccacaaacggacttgaataccaccagagtaaaggaggttggccttgtttataatgaaagaagatattctgttataccaacagctccgccaagtgcaagaagcagctttgcaagtgactttttgtcaagaaaaagatctaatcctacttctgcatcttcatcccagagtgaattatcagaacaacccaagaatagcgttagtgctcaaactggcagcaataataccactctcattgggagcaactttaacatcaagaatgaaaatggtgattcgagaataccattatttgcaccacttatggccactaatacttctaataacatcttagatggtggaggtacctcaatttcgatacatcgtcccagggttgttccaaatcaaaacaacgtgaatcctcttttggctaacaacaataaagcggcttctaatgtacctaatgtaaagaagtcagcggctacaccaaggcaaatttttgaaatagataaagtggacgaaaagttatccatgttgaaaaataaaagttttctattacatggaaaggattatcctaataatgctgataataatgacaacgaagatataagggcaaaaaccatgaatcgcagccaaagtcacgtttaa

SEQ ID NO: 77096 - DNA, 2061 bp, Saccharomyces pastorianus
atgtcgaaaaacaacacaatgacctctgcggtctctgatatgctgtcacagcaacagctaaatcttcagcacctgcataacttgcagcagcatacgagaagtatgacttcagcagatcatgccaacgttttacaacaacagcaacaacaacaacaacaacaacagcagcagcagcagcaacagcagcagagcgcaagctttcaaaatggcagtttgacatccgatataaaccaacaaagctatttgaatggacaaccagttccttccactagtaattcaacgtttcaaaacaataggacgctgacgatgaattctggagggttgcaaggtatcataagcaatggttctcctaatatcgactcgaacaccaatgtaaccattgctgtcccagatcccaataataacaacgggaaactgctccaagggaaaaactctttaaccaacacttcaatactgtcgagggctaggtcttccttacaacgtcaaagacttgctcagcaacagcaacaacaacaagatcctagatctccattagtaatactggtccctacagctgcgcaaccaacagatattcttgcagcgaggttttcagcttggagaaatgtcatcaagtcggtgatcgtttacttaacagaaatcgcttctattcaggatgaaattgttagacagcaactaagattatcacatgctgtacaattcccattcttttcgatcgagaatcaataccaaccaagctcgcaggaggataaatcagtacaaaagttttttttgccattgggtaatggctcgatacaggacttaccaacaattttgaaccagtatcatgaatccctagcatccagcgcgtctaaggcatcaagggaattgaccaatgatgttattcctcgtttggaagacttgaggagagatctaatagtcaagataaaggaaataaaatcactgcagtcggatttcaaaaattcttgttccaaagagttacaacaaacaaaacaggccatgaagcaatttcaggagtctttaaaggatgcgcgctattcagtgccaaaacaagatccattcttaaccaagctggcgcttgatagacaaattaaaaagcaacttcaggaggaaaactttctgcatgaagctttcgataatttagagacttcaggcgctgaattagaaaaaattgtagttatggaaattcaaaactctttaacaatatatgccagattactgggacaagaagcacaattggttttcgatatattgatatccaaactagattccggatttttcaacgttgacccacaatttgaatgggataacttcatttcaagggatcccaactttttattgcctaatctaccgatgaggacattcaaagaaatcgtttacaaataccaattcgatcctttgacttatgaaatcaaatcagggtttttagaaagaagatcaaaatttctaaaatcctattcaaaagggtattatgtgctgacaccgaactttttacatgaattcaagaccgcggacagaaaaaaagatttagtaccagtgatgtcgttagcattaagtgaatgtactgtgacggaacattcccggaaaaacagtacatcatcaccaaattcgactggttcggatgctaagtttgtgttgcatgctaagcaaaacggcataattcgtcgtggtcacaattgggtttttaaagccgattcttatgaatcaatgatgtcttggtttgataatttgaagatcttaacatctacttcgaatatacaagacaagtataaattcataacacaaaaattaaacttgaattcagatgggaaacccaagctaaccaataaccataccagcattaataagtatcagctgagtaatgccaatagcacaatggtagaaaatgatgaaaacgatgatataaatagtaattatgtggggtccacggtaacaccaaaattggacaatcaaacaaatacgaatacatccatgtcttcattacctgatactaatgattctgaattacaagatcaagttcccaatatttatattcaaactccaataaacgatttcaaatcataa

SEQ ID NO: 77097 - DNA, 141 bp, Saccharomyces pastorianus
atgaagacatggatgtattcgtatttgtttgattgtccaattttggtgttaccgtggaccccacataattactatttatatcatcgttttcatcattttctaccattgtgctattggcattactcagctgatacttattaa

SEQ ID NO: 77098 - DNA, 1524 bp, Saccharomyces pastorianus
atgataacaccaagattctctataacacaggatgaggaatttatatttctcaaaatattcataagtaatattaggttcagtgcagtgggtttagagataatcatccaagaaaatatgatcatttttcacttatccccttactatttaagattaagatttcctcacgaattaatcgatgatgagaggtctaccgctcaatacgattccaaagatgaatgcatcaatgtaaaagtagccaaactgaataaaaatgaatatttcgaagatttggacctaccgacaaagttgttggctaggcaaggcgatcttgcaggtgccgatgcattaacagaaaatactgatgcgaaaaaaacccaaaagccccttattcaagaggtcgaaactgatggcgtgtcgaataatattaaagatgatgtgaagactattggtcaaatgggagaggggtttaattgggagatagagcaaaagatggattccagcaccaataatggaatattgaagacaaaatatgggtttgataacttatatgatacagttatatcagtgtcgacaagcaacgggaacgatatcaatgaattagacgatcctgaacacactgacgcgaacgatagagttattgaaaggttaagaaaagaaaatttgaagtttgatcctgagtactatgtttccgagtatatgacacataaatacggtaacgaggaagacttggaaattaacggcattaaagaactactgaagtttacaccttcgatcgtaaagcaatacctgcaatggtacaaagacagtacgaacccaaatctggtcatgccaattgagtttactgacgaggaacaaaaacagatgcaggacaatttacccaagaagtcttatctcgtggaagatataaaaccactttatgtcactatactcagcgttcttttcagttatgtgtttgaacagatcgaaaacgaaggtactcataccacagagagtgcttggaccatgggaaaattgtgccctcaaatatcattcttagaccaacaattaaaacaggtgaacgaactgcaagacggtatgaaagaaatatcaaaggttaataaagacagctctctcatcaagattgcaatcattacaggtatcaggagagccctgagttatccactacatagaaactatgacctagcaatgaaagcgtggacattcgtatattatattctacgaggtggtaagagactagtcataagggcgcttttggacattcatgaaacatttcgtttccatgatgtttactacgtctacgacaaagttctcttggatgatctgactgcgtggttcatttctcagggtagtgagaacgtcataagaagtctggccttggaaatgagaaaagagcaagagtcactttccaagcaggatattgaatttgaatgtattgcatcgttcaacgaacaaactggcgaacctgagtgggagacactaaatataagagagatggaaattttggcagagtctgaataccgagagcagcagcagaacccacaatga

SEQ ID NO: 77099 - DNA, 1278 bp, Saccharomyces pastorianus
atgagtggctctacagaatctaaaaaacaaccaagaagaagatttattgggagaaaatctggcaacagtaataatgacaaattaactacagtggctgaaaatggcaacgaaataatccacaagcaaaagagtagaatcgccctaggtaggagtgttaatcatgtgccagaagatatattgaatgacaaagagttgaatgaagccatcaaattattgccctctaactacaactttgaaatccacaaaactgtgtggaatatcaggaaatataatgctaaaagaatagccctacagatgcctgaaggtttgctgatttactcattgattataagtgacattttggaacagttctgtggtgttgaaactctagtaatgggggatgtgtcttatggtgcatgctgtattgatgattttactgctagggcattggattgcgattttattgtgcattacgctcattcgtgtttagttcctattgacattacaaagattaaagtactatatgtctttgttactataaatattcaagaagatcatattatcaaaacgctgcagaagaattttcctaagggatctagaatcgctacatttggtaccattcagtttaatcctgcggtacacagcgtcagagataaactgcttaacgatgaagaacacatgctgtatattattccaccacaaatcaagcctctatcgaggggtgaagtattggggtgtacttctgaaagattagataaagaacaatacgatgccatggtattcatcggtgatggtagatttcatttggagtctgcaatgatacataatccggaaattcctgcattcaagtatgacccatacaacagaaagttcactagagaaggatacgatcaaaagcaactcgtggaagttagagcagaggccattgaagtcgctcggaagggtaaagtttttggtctgatcttaggtgcattaggtagacaaggtaatttaaacactgtaaaaaacttggaaaaaaacctgatcgcagcaggtaaaaccgtggtgaaaattattctaagtgaagtttttccccaaaagctcgcaatgttcgatcaaattgatgtttttgttcaggtcgcatgtcctagactgtccatcgattggggttatgccttcaataaaccactattaacaccatatgaggctagtgtcttactaaagaaagatgtcatgttcagcgaaaaatattatccaatggattattacgaagctaaaggatacgggcgtggggaaactccgaaacatgcgattgaatag

SEQ ID NO: 77100 - DNA, 306 bp, Saccharomyces pastorianus
atgctaaaggtggaaaagttcaaaaaattgaagcgattcgaggtctattattgtttaaaaaattcttttctggaagaagtagatatcgagatgaaatattcctgcagtataacaactataatgagcaatggttcagcaagcttgttgatgaactgggaagaattaacacctggtcactgttttacctcttacacaactaaccctatcgcaggtgactatggtttgaatgcatcagcaatagacggccacacggaagagttagtggcgacccacccagcgggaaccttggagaatgcaacgcagtag

SEQ ID NO: 77101 - DNA, 1944 bp, Saccharomyces pastorianus
atgaaatatcccgcttttagcattaacagtgacacggtacacttaacggacaaccccctggacgactatcagcgtctctacctcgtcagcgtactggatagggactcgccgccggccagtttcagcgccggactcaatattagaaaggttaactataaatcctccattgctgcgcagttcacacatccaaacttcattatcagtgctcgggacgcagggaacggggaagaggcggcggcgcagaacgttctgaactgcttcgagtaccagtttcccaacctacaaacaattcagagcctagtccacgaacaaacgttgctatcgcagctcgctagctccgccactcctcactccgccttgcatctgcacgataaaaatattctgatgggtaagatcatactaccttcccggtctaacaaaacaccagtctcagcatcacccaccaagcaagaaaagaaggctctgtcaacagcatcgcgtgaaaatgccacctcctcgctgacaaagaatcagcagttcaagttgaccaaaatggaccataatctgatcaatgacaagctcatcaaccctaataactgcgtaatatggtcgcatgactccggctatgtgttcatgacgggcatctggcggctgtatcaggatgttatgaaggggcttataaacttgcccagaagtgacagcgtttccactagccaacagcagttcttttgcaaggctgaattcgagaaaattctatctttttgcttttacaatcacagttcgttcacttctgaggaatcttcaagcgtactgttgtcgtcctccacctcttcgccgccaaagagacggaaatccacagggtctaccttcttggacgccaatgcgtcttcttcatctacttcttcaacgcaggcaaacaattacatcgattttcattggaacaacatcaagcccgaactgcgggaccttatttgccagtcttacaaagacttcctgatcaatgaacttggtcctgaccaaatagacttgcccaacttaaatccggcaaattttacgaaaagaataagaggtggttacatcaaaattcagggtacttggttgccgatggaaatctcaaggttgctatgcctgcggttttgttttccgatcagatactttctggtgcctatttttggtccagatttccccaaagattgcgaatcgtggtatttggctcatcaaaacgttacatttgctagttctaccactggtgcaggtgctgctactgctgctactgctgctgctaatacaagtaccaattttacgtctactacagtggcaagacctaggcagaagcccagacccaggccaagacaaagatctacttccatgtcccattccaaagcgcagaaacttgttattgaggacgccttgccctcattcgactcatttgtagaaaacttgggcctttcctcaaatgataagaacttcattaaaaaaaacagcaaaaggcaaaagtcgtccacatacacctctccaacatcttctccaatagggccaagagatccaacggtgcaaattttgtcaaacctagcatccttctacaacacccacggtcaccggtattcatatccgggaaatatctatataccacagcaaagatactctttacccccaccaaaccagctctcgtcgccacagcggcagctaaactatacttacgaccacattcacccagttccttctcagtaccagtctccaagacactacaacgtcccctcttcaccaatcgcgcctgctcctcccactttccctcaaccttatggtgatgatcactatcattttttgaaatatgctagcgaagtttataagcaacaaaaccaacgaccagctcataatacaaataccaatatggacagctcttcttcgccaagggcgaacaattcactgaacaatttcaaatttaaaacaaactcaaaacaataa

SEQ ID NO: 77102 - DNA, 1650 bp, Saccharomyces pastorianus
atggcaagacaaaagatgttttataacaaattactcggcatgctcagcgtaggattcgggtttgcttgggcgctcgagaacattactatatacgaatttgactttggcaagggcattctcgatcaaagctacggcggtgtattttcaaacaacggctcttcgcaagtgcagctgcgggatgcagtcttgatgaatgggacagtggtatacgattcaaacggcgcttgggacagtagtgcgctggaggaatggctccagggacagaaaaaagtttccatcgaaaaaatatttgaaaatattgggcccagcgccgtgtatccgtctatttcgcctggggtcgtgattgcgtcaccatcgcaaacgcatccagactacttctaccaatggataagggacagcgcgttgacgataaacagtattgtctctcattctgcgggcccggcaatagagacgttattgcagtacctgaacgtttcattccacttgcaaagaagcaacaacacattgggcgctggcattggttacactaacgatacagtggctttgggagaccctaagcggaacgtcgacaacacggctttcacggaagattggggtcgtcctcaaaacgatgggcctgctcttcgaagcattgccatcttaaaaatcatcgactacatcaagcaatctggcactgatctgggggccaagtacctattccagtccaccgcagatatctttgatgatattgtacgttgggacctgaggttcattattgaccactggaattcttccggatttgatctatgggaggaagtcaatggcatgcatttctttactttactggtacaactgtctgcagtggacaagtcgctgtcgtattttaacgcctcagaacggtcgtctccctttgttgaagaattgcgtcagacacgccgggacatctccaagtttttagtggaccctgcgaatgggtttatcaacggcaagtacaattatattgttgggacacccatgattgccgacacattgagatccggactggacatatccactttattagctgcgaacaccgtccacgatgcgccatctgcttcccatcttccgttcgatatcaatgaccctgccgtcctgaacacgttgcaccatttgatgttgcacatgcgttcgatataccccatcaacgatagctccaaaaatgcaacgggtattgccctgggccggtatcctgaggacgtatatgatggatatggctttggcgagggaaatccctgggtcctggccacgtgtgccgcttcaacaacgctttatcagctcatttacagacacatctctgagcagcatgacttggttgtcccaatgaacaacgattgttcgaacgcattttggagcgagctggtattctccaacctcacgactttgggaaatgacgaaggctatttgattttggagttcaatacacctgccttcaatcaaaccatacaaaaaatcttccaactagctgattcattcttggtcaagctgaaagctcacgtaggaacagacggggaactaagtgaacaatttaacaaatacacagggtttatgcagggtgcccaacaccttacctggtcctatacttcattctgggatgcctatcaaataagacaagaagttttacagagtttgtag

SEQ ID NO: 77103 - DNA, 468 bp, Saccharomyces pastorianus
atggatagaccaagaacattacgcacatatagaggactcataagagccattctgaaatatgaaaggccaagcaagatagtcaattggggcaatctacgaaaggcaatgataacaaagttggaatatgctaagaaacaaaatcagagagactcgcatgagaacatcaacaaacagttagagaaatggaaaaaactagatccggtaagcgacagatctttgaatttgtttattgccgactctaagtcattacgttccatattacaaaacgatataaagtgggagaaaaaggtggcccagggacaaaacgttgacgagatattcgaacacgctttggacatcatcaagttcttggacaaccaaagagaatacgaggagctggtcgacagatacaatcctggcaacaagttgacacaggatgagaaagtgaaaagaactgcaaacgtggttgggctggacgttccgacatag

SEQ ID NO: 77104 - DNA, 1551 bp, Saccharomyces pastorianus
atggcagagaaatcaatatttaatgagcctgatgtggatttccatttgaaattaaatcaacaattatttcatattccttatgaactactgtccaaacgtatcaagcatgctcaagcggtaattaataaggaaaccaaatcactacatgaacacacggccgcattaaatcaaatatttgaacataatgacgttgagcacgacgagttggcactagcaaaaataactgaaatgattaggaaagttgaccatatagaaagatttttaaatacgcaaatcaagtcctactatcagattttgaacagaattaaaaaaaggctggagtttttccacgaactgaaggacatcaagtcacaaaattcaggaacttcgcataatggaaataatgagggtaccaggactaaattgatacagtggtatcagagttatacaaacattttaattggtgattatctgacgaggaataacccgattaaatacaactcggagacaaaggatcattggaactctggcgtagtgtttttgaaacagagccaactggatgatctcattgattatgacgtcctcttggaggctaatagaatttcgacttcgttactacatgagcgtaatctcttacccctaatttcatggataaacgagaacaaaaagacactgaccaaaaagtcctctatattagagtttcaagcaagattgcaagaatatattgaactactaaaggtggataactataccgacgctatagtatgttttcaaagattccttttaccattcgttaagagcaacttcaccgatttaaaattagcatctgggcttctgatttttatcaaatactgtaatgatcaaaagccaacttcttctaccagctctggattcgatactgaagagattaagtctcaaagtttaccaatgaagaaagatcgaatatttcaacatttttttcacaaatctttacctagaattacctccaaacctgcggtgaatacaacagactatgacaagagttccttaataaatttacaaagtggagatttcgaaagatatctgaatttattagatgatcaaagatggtcggtattaaatgacttattcttgagcgacttttattccatgtatggcatatcacaaaatgaccctttattgatatacctgtcactaggtatatcgtctttgaagacaagagattgcctgcacccttctgacgatgaaaatggaaatcaagagacggaaactgccacaacagcagagaaaggggttgaagatttacaactctttacgctacattcactaaaaaggaaaaattgtcccgtttgcagtgagactttcaaaccaataacacaggcattaccatttgctcatcacattcagtctcaattatttgaaaatccaatactattaccaaatggaaatgtttacgacagtaaaaaattgaagaaattggccaaaacattgaaaaagcaaaacttaatttctttaaatccaggtcaaattatggatccagttgacatgaaaatattttgcgaatcagattctatcaaaatgtacccaacctga

SEQ ID NO: 77105 - DNA, 1011 bp, Saccharomyces pastorianus
atggccaggaaattgaagggtaagattgggagtaaaggtctaaaaggtgcattattaaggcaccaggccaaagtgaaattagtgaggaatattgaaagtaagcaaaaacatgaactaagaaagaaaaattcgagcgctaataacaaaaccgtgaagagaaaccaagaattccaaaaacttaatcaaggaaaggttatgcccgttgagaaggatgaaactttgatgctatgtggtgaaggagatttttcttttgccagatccattgttgaacaaaactatattgaaagtgataatttaatcataacaagttacgataattctgtgaatgagctgaaattgaaatatccgcatacttttgaggaaaattaccagtacttaaaagatctaaatattccgatatttttccagattgacgttacgaagctcgtaaagagctttaaaatttccaaaaataatacttggtttaaaataatcaacaggcttagcgatcatcgttggggtaacaaacctttacaaaatatagttttcaattttccccataatggaaaaggtattaaggatcaagaaagaaatattagagagcatcaggacttaatttttaactttttccaaaattccttacaattatttaatcttataaacacaaaaattcaaaatgatactcttcgttatacgcaaggctatgatcttaatgaggatactccccaggctaaaaaattgaccgccgaaggttatggtaacatcatactgtcccttttcgatggagagccctatgattcatggcaaatcaaacttttagccaaaaaaaatggactaactctgagcagatcgagcaaattccaatgggaaaattttccaggatatcatcaccggagaacgaatagcgaacaagatactacaaaacctgcgaaagaacgtgatgctaggttctacatctttagtaaatatgtctcgaatagttcaaaacataaccgtaaaagcaaaaaagacacagattctgattcagactaa

SEQ ID NO: 77106 - DNA, 2433 bp, Saccharomyces pastorianus
atgaatgctccacagattagtctgtatgaacccgggacaatattaactgtgggatctcatcatgctaagattatcaaataccttacgagtggtggattcgcacaagtatatactgctgaaatttcccctcctgacccatatagcaatgctaacatagcatgcttgaaaagagtcattgtcccccataaacagggtttaaataccttgagagctgaagtggatgctatgaaactccttagaaataataagcatgttgtttcttacatagattcacatgctgcaaggtctgtaaatggtatagcatatgaggtgtttgtgttaatggaattttgtgaacgtggaggtcttatagattttatgaacaccagattacaaaataggttacaagaatctgaaatattagaaattatgagtcaaaccgtccaaggtataactgcaatgcacgctctgcagccgccattgattcatagagatattaagattgagaatgtacttatttctcatgatggcttgtataaagtttgtgattttggttccgtttccggtgtgataaggccacctagaaatactcaagagtttaattatgttcaacacgacatcctaacaaatactacagctcagtatagatcacctgaaatgattgacctgaacagagggttacctatcgacgaaaaatctgatatttgggctcttggtgtctttctttacaaaatatgttactatactacaccgtttgaaaaaagtggtgaagccggtatactacatgcaaggtatcaatatccatcctttccgcagtatagtgacaggttgaaaaatttgatacgtcttatgttaatggaagcaccatctcagaggccaaatatttgtcaagttttagaggaggtttccaggttacagaataagccttgcccgattagaaacttttacttgttaagagcaatgaatcagaatgcgaatacccaattggccggtgaaccgtcttcgacaaattatgttccaacacagaaattaattcccgtacaaagccttcagagcatcaaccagccaccaaatatgatgcctgtaactcacgtcaggactactcctaatttgggtactttccctatatctattaatgataataacaagacagaagtaacggcgcatgctggcttacaggttggaagccattcaaatttgactagtcccttaatgaaaacaaaatccgttccacttactgatgaatttgcatcactatattataaagagctacacccttttcaaaagtctcagactttcaaatcagtagaaagtttccaatccccacaaaggaagtctatgcctccattatcgcttactcctgttaataatgacatttttgatagagtttcggcaataaatcgtccaaataactacgttgattctgagacgcaaaccatagataacatggccgtgccaaacttaaaactatctcccaccattacaagcaaatcactaagctccacaaaagaaattgctgctccagataatataaatggaagcaagattgtgcgttcactaagctctaagttaaaaaaggttattactggtgaatctcgcggcaattctccgattaaatcaaggcaaaatactggtgatagtatcagatcagcatttggtaagcttcgtcatgggtttacaggaaactcagtgaacaatagcaggtctgcttcctttgataataacaatgtcaacggcaatggtaacaatacaaacaggcgattagtttcgtcttcaacctcctcctttcctaaatttaattctgataccaaaagaaaagaggaatcagacaagaatcagagactggaaaaacgtcgcagtatgcctccttcaattttatcagattttgaccagcatgagaggaataattcgagaactggatcaagggactattacaggtctcattctccagtgaagaaaactcaagcatcagctaaaacgacatcaaagcctactttgataccagataatggcaacgttaatataaatcaagaaaagaaggaatcgattcaaagaagagtgcataacttactaaagagttctgatgatccggtaacgtataaatccgcatccgggtatggtaaatatacagatattgatacagaaacttccaatcggcattcaagtgtaagaataacaccaatcacagaagaaaagtttaagaaaacccttaaggatggtgttttggacatcaaaacgaaaagcaacggtaaagataaatcaagaccaccacgtccaccaccaaaaccactacatttaagaacagaaatccagaagataagaaactttagtcgtttacaatcaaagaaactgccgattgaaagaatttccagcgaagccacagaaactattgttgatgttaacgtagatgatttagaagccgattttagaaaaaggtttcccagcaaagtttaa

SEQ ID NO: 77107 - DNA, 1116 bp, Saccharomyces pastorianus
atgtttagatctgttgctactagattatctgcctgccgtgggttagcatctaacgctgctcgcaaatcactcactattggtcttatccccggtgacggtatcggtaaggaagtcattcctgctggtaagcaagttttggaaaaccttaactccaagcacggcctaagcttcaactttattgatctctacgccggtttccaaacattccaagaaacaggaaaggcgttgcctgatgagactgttaaagtgttgaaggaacaatgtcaaggtgctcttttcggtgcagttcagtctccaactactaaggtggaaggttactcctcaccaattgttgctctaaggagggaaatgggccttttcgctaatgttcgtcctgttaagtctgtagagggagaaaagggtaaaccaattgacatggttatcgtcagagaaaatactgaggacctgtacattaaaattgaaaaaacatacattgacaaggccacaggtacaagagttgctgatgccacaaagagaatatccgaaattgcaacaagaagaattgcaaccattgcattagatattgccttgaaaagattacaaacaagaggccaagccactttgacagtgactcataaatcaaatgttctatctcaaagtgatggtctattcagagaaatctgtaaggaagtctacgaatctaacaaggacaagtacggtcaaatcaaatataacgaacaaattgtggattccatggtttataggctgttcagagaaccacaatgttttgatgtgatagtggcaccaaacctatacggggatatattatctgacggtgctgctgctttagtcggttcattaggtgttgttccaagcgccaacgtaggtccagaaattgtcattggtgaaccatgtcatggttctgcaccagatattgctggtaaaggtattgctaacccaattgccactataagatctactgctttgatgttggaattcttgggccacaacgaagctgcccaagatatctacaaggctgttgatgctaacttaagagagggttctatcaagacaccagatttaggtggtaaggcttctactcaacaagtcgttgacgacgttttgtcgagattatag

SEQ ID NO: 77108 - DNA, 795 bp, Saccharomyces pastorianus
atgaagatacaaacaaatgctgtaaacgtccttcaacggacgtccgcttacttgaaatcaggattgttgaaagaaacacctgcgtggtacaacgttgtagcgtctatcccaccatcaaccaagtttacacgtgaacctcgttttaagaatccttccaatggacacatcataggaaaacttgttgacgtaacagaacaaccgcatgccaacaataagggactttacaagacaagacccaactcgagcgacaaaagggtgggcgtgaaaaggctgtacaggccacctaaactaacatacgttgaggataggctcagatcgctcttttacaaacaacatccatgggagttgtcgagacctaagattttagtggaaaacgaaattggtgatgaaaactacgattggagccatatgcttcagataggaagaccactcgatggtgaaagtgttatccagcgaactatgtacttaatcaaaacgaagcagtatggggacatggtcgaagcatatgaccatgccagatatgaattctatgcgttgagaatgcaagaagaaacagagcagcaagtggctttggaagaagcggagatgttcggatccctctttggagtttctgccattgaacatggtatacaaaaggaacaagaggtcctagacgtctgggaaaagaaggtagttgaagaaactgaactaatggcagcaaggacaagtaaccctgcagggtcgtggaaggacgacactacattgaatacggcgcaagaagaagaatccaccacttccgagaacctccacttctag

SEQ ID NO: 77109 - DNA, 1902 bp, Saccharomyces pastorianus
atggtgcaaatgagatccaaaaacatggcatacgagtcgggaactaataactatagtgatacaatagctaatggaaataccctgccgccgcgaagcaagaagggacacagtggacgtagaaagaggagcgaaactttgcccatagcgtgtaataatttttgtgttacaagacagattgatgacgatgaacaagcgttcaaaatgctagataaagtgagtcatctgaaaaaattcagtgctgaagacggtgatgataacaatatattcgtccaatgggccgatgatattacagatatcttatctggactatgctgtacaggaacgtttttgaaacttcttataagctctgcattatccggccgggctaagacatggtttgattctacaacggagggaatcgatgaccatgtgataaaggcttacagttttgaaaaatttcttgctctactatcagaagaatttgatggagcaagatctttaagaagggaaatttttacggaactattgacgttgtccattgattctgagaagtcattagaagcatttgcccataaatcgggacgtctaactccatattatctgtcttctggtgctgcgttggatctattcctcacaaaattggagccacagttgcaaaagcaactggaaaattgtgcattcccaatgactttgaatttagcactattgataactgcctgtgaatttgcgaagagagcatctaatcataaaaaataccggtataaaaatacgagggattccgacatttgtactccaaagagtaagaatactgctatcgttagcaaattatcgaatactaaaactataagtaagaataaggttattgaaaagagtgataagaaaaattactttgataagaacagtcaacacatacccgatcctaaacgtcggaaacaaaatgaacctggaatgcggctctttcttgtcatggatgaggaaaagaatattcttacatctaggaatgtttctgccaatgcatacacatcaaaaaatggacacaccaatttaagcgatctccatacgaatcttaaaaacagtaaatctcaacaatgtgcagtggagccaatgtcgattttgaatagcggcagttcggttacaggcacaattaatattgacctaattaatgatgaagttttaggcacgaaggaggaaactacaacttatgatgaacgtatagatggaaactcacgttctttgaatgagaggtgctgcgccgtcaagaaaaactcactacaacctataacatcaaatatatttcaaaaaaacgctgaaattcagggcacaaagatcgggagcgttctagatagtggtatatcgaatagcttctcctcaacagagtatatgtttccgcccacaagctctgcgacagttagtaatccagtaaaaaaaaatgaaatcagcaagagtagccaggttaaagatattgcccagtttaatccgttcatgacaaacgaaaaggagaaaaagttaaatccatcagaaagcttcaaaagccctggagtgtctatggaaataaatagcctaagccgtatcgcgggcctcagaaatattccaggaaacatttacgaagacagcaaaatgcttaatttgaaaactcgaaagtgctacccactgcataactttgctgtgcgcacgaggagtgcacattttaatgaccgtccttctaattatatatcaccgcatgaaaccataaatgcgactctcagatcacgtgcaagctttgatagtattcaatgtattactaggtccaagagggtagacgcagagaccaataaagcaactgtttcagcaaaaagcgaaaatatagaaactaaaagcagaaagttccctgaagtaataaacccttttcttgtgaacacaacgaacaagaaagaaagcgattaa

SEQ ID NO: 77110 - DNA, 2166 bp, Saccharomyces pastorianus
atgagtgacagttctgtgagggaaaagaatgataatttccgtggctatcggaaaagaggaagacaagaactgaggaagattaaaagatcttctgccagaactgaaggcggaagcacagaaacattagaggacgtagcagaagatattgaccatagatccgatgaggatgaagtgtccgatgtagacagtggcgatgatttcgatattgaggatgaagagggtaaaaaggaaaaagtttatgacgctttattgacgattctcaaatctgaacatccagagccaaaaagaagaaggcgagaggctgacgagagtaacaaagctcctgccgaagttggggaggatgagcacgaaaatacagaacatggaccagtggatgatcaattggagatagagaatggccttttgggtaatcacgaggatgataacgacgatgacagcagtgaagacgaaaaagatatagacagtgaagatgagcaagatcctttcgagtctcatttcaaccaagttccggagaaattcgttgatgagttgtcgaatgctttcaagaccaaaagtgtaaaatacaaatccgtaaagggctcactaagtgacagtgaatcatatatatatgctaaaccggtagtaattggtgaggaagcattggtggaaagtccgtacaggtcatcatctatatattcatactttttgaaacaaaggctaaaagtgcaaaatggactattggataaaaaaactgatccattgactgctttgcaaaaaaaattagtagaccccatgtttcagtacaaagacatattatacgagtatgactcctacgaaaaggatgaagacgagtacagagatttatatgctttgcatgttttgaatcacatctacaagacaagagatagaatcttgaaaaataatcaaagattacaggataacccagacactgaacacctagatcaaggttttacaagaccaaaagtgttaattgtagtccctactagagaggtggcgtaccgcgttgtagataagataatttcaaaatctggtatagatcaggttgacaagaagggaaaattctacgaccaattccgtgacgattccttacctccaaagtccaaaccaaaatctttccaacacatatttagggggaacaccaacgatttttttgttgtcggtctcaaattcacaagaaaggctataaaactttatagcaatttttaccagtctgacattattgtatgttcgccattgggtattcaaatgatcttagaaaatacagataaaaaaaagaggcaggacgattttttgtcctcaatagagttgatggtgattgatcaattacattcaatagaataccagaacatatctcatattttcaccatctttgaccatcttaacaaaatcccggatcaacaacatgaagctgactttagcagaattcggatgtggtacattaatgaacaagctaagctcttcagacagacaatggtattcacaaaatacatctcgccagcggctaattcattaatcaatggtagatgccgtaacatggcaggaagatggaagaatcacaagataataggatcagaaaactccagtattgggcaatccggtttgaaaatcaggcaaatctttcagagatttgacattattgggaattcgattattgaagagcctgactacagatttaaattttttacaagtgtcattattcctggtattgtcaaatccaccgggtatgaagacggaatactgatttacattcctgattacactgacttcattcgtattagaaactacatgaaagagaagacgacgattttatttggggatataaatgagtactctagccaaagacagctcaatgcaaataggtcattgtttcaacaggggcgtctaaaagttatgttgtatacggaaagactgcaccattatagacgttatgaaatcaagggtgtcaagagcgtcgttttttataagcctccaaacaatcctgaattttacaacgaagttgtcagatttattggtaagaacgcctttctaggtaataccgatttaaacatatccactgttagatgcatttatagcaagcttgatggtctttcactcgaaagaattgtggggacgaaaagagcagctgtattatcacatgcacaaaaggaaatttatgaatttaaataa

SEQ ID NO: 77111 - DNA, 1476 bp, Saccharomyces pastorianus
atgaccagtttgtccaaaagcttcatgcagagtggacgaatctgcgcagcatgtttctatctgttattcacactactttcaattccaatctcgtttaaagttggtggtttggaatgcgggctttccttcacggtgacactgttcactttgtatttcataactacgactcttaacgtgttggcaagacgacatggaggaagactatacattttttttaccagctgtctgtattactcacaacattttatcattgcatctttgctatacctgtttttgtctggattttctaatgatgagttgggaaacgttctgaaaaataaatataatgagtcggagtcgttcctggaagctttgaaaaatagcttgaattccaatcaaattaactacgtcttatattattactactatcgatttgttgtacaaccgtggcagttcgtgcttaccaagtccacacctttttttactctatcggaaggttttttcactattttagccattcaggccgtcggggaaactaatagatggttatcaaatgacttgaattcaaacacgtggattatttcctcattgttaacttccggaggtgtgattaccgcatcgctgtactatttgtatcggatttatgtcacccccatatggccgttatccatccaaacggcgtccttattaggatttgttttgtctatggtatgtggactggggttgtatggtattgtgagtcaaaaaggatccgtcatagagagctctttattttttgcgtatattgttcgttgtatttatgaaatttcccccaaattagctactaccgcgactgatgaaattttaaatttgttcaaagacgtctggcagaaacatcaaagaaatctgcccacagctgacaatcttttgtgctactttcataatgtcatattgaaaaatgcagaggtgttatgggggtcctttattcctagaggaagaaagaaaaccggtgattttcatgataaactcattagtattctatcattcgaaaaagtatccttgatatctaaaccattttggaaatttttcaagaatttcacctttagtgttccgctatccattaatgaattttgccaagttacaattaagatggcaagcgaatcagtttccccagctatagtaatcaatttatgctttagagttctgatgttttactcggcaacgaggattattccagcattacaaagaaaaaatgacaaacagttgcgcaagagtcgcaggatcatgaagggattgtattggtacagtccttgcatattaattgctatgtatactcacctgattttacaatattcaggtgagctaaagaaagacctgtgcatatggggttgcagtgaaaagtggtttggcgtagatcaaccagaaattatagtagattcatggggattttggaactggtgcaacattttctgtactattttggtatacgctacagaattaataggttctggtagttga

SEQ ID NO: 77112 - DNA, 1473 bp, Saccharomyces pastorianus
atggaggctacatcaagtgctctttcgtctacggcgaatctcgttaagacaatagttggcgctggtacacttgccattccgtacagttttaaaagcgatggtgttctggtaggggttattcttacattattggcggcggtaacatccggtctgggtctctttgtgctatcaaaatgttccaagaccttaattaatccaagaaactcttctttcttcacattatgcatgctcacctatcccactttggccccaatttttgatttggcaatgatagttcaatgctttggtgtgggcttaagttacttagttcttattggtgatctctttccaggactgtttggtggtgaaagaaattattggataattgcatcagctgtaatcatcattcccctatgtttagtgaagaaactagatcaattgaagtattctagtattctaggtcttttcgcgctagcatacatatcaattctggtgttcagccattttgtgtttgagctgggaaagggtgaattaacaaatatattaagaaatgacatatgctggtggaaaattcacgactttaaaggattattatcaacttttagcattataatttttgcttttacgggatcaatgaacctattccccatgataaatgaattaaaagacaacagcatggaaaatatcactttcgttatcaataattcgatatccttatcaacagcactatttttgatcgttggtttatcaggatatttaaccttcggtaatgaaaccttgggtaatttaatgttgaactacgatcctaactcaatttggatagtaattggcaaattctgtcttggctcaatgttaattctttccttcccgcttctctttcatccgctgcgcatagcagttaacaatgtcatcatctggattgagatcacttatggtggggcaaatcccgaagaggacccacaagtttcggaatacactcgtgcttccaacctaagaccaattagcatgactgtcgaagatccagcccagcccagtgatgcactagacgcaacttcttataacgagcaagaatgtttactacctaacgggaactttgataatggttcaattgaaagtcaagagaacaataatgatgaaagagggactatggcggtcgccggggataacgagcatcatgcgccatttgttaagtctagattttactggattactgcattattactaataagcatgtataccttggcgttgtctgtccagtcatttgcactggttctttcatttgtaggggctacaggttcaacgtctatttcattcactttacctggattattaggttacaaattaataggctcggattctttggctattgggaagatgattccaccaaaagatagattttacaaaaggtgcagcttattgctagtcttctacggactatctgtgatgtttttgtcattgtatgtaactgtattcaatcgttcagatgaagcctaa

SEQ ID NO: 77113 - DNA, 474 bp, Saccharomyces pastorianus
atgtctgctaaacccgctactgacgatgccaaagatgaacttctatcaccatttcgccggctatatgcattgacaaggacaccttatcctgcgctcgcaaacgcagcactattagcatccactccggtgctatccccaagctttaaagtgcctccaacgcaatctcctgccctctcgataccaatgtctagggtattctctaaatcttctactgccagaatcggtataactactaaaaccgcccttttcttttctacaatgcaagctataggtgcatacatgatctatgacaacgacttggaaaatggggctggcttcattgctacatggtccgccttatatttgattgtagggggcaagaagtccttcaatgcgttaagatatggaagaacttggccgttggtgctatcctcggtttcattggccaacgcagtcctttatggccaacggttccttgctaccggattccagtga

SEQ ID NO: 77114 - DNA, 984 bp, Saccharomyces pastorianus
atggctattcaaaaggttagtaacaaggacttgtcccgcaaggacaaaagaagatttaatatcgaatctaaagttaataagatttatcaaaatttttactcagaaagagataatcaatataaagatagactgacagcattgcaaacggatttaacttctctgcatcaaggtgataatggccaatatgcccgccaagtacgagatttggaggaagaaagagatctagagttagtcaggttgcgcctgtttgaagagtaccgtgtttctcgttccggtatcgaatttcaagaagatattgaaaaggctaaggctgaacacgagaaactcattaaattatgcaaagaaagactctattcgtctatagagcaaaaaataaagaaattacaggaggagaggttactaatggatgtggccaatgtgcactcctatgccatgaattatagcagaccgcaataccagaagaacacgagaagtcacacagtaagtggttgggattcttcgtccaacgaatatggaagagatacagcaaacgaaagtgctactgacacgggagctggaaacgatcgaagaacgctaaggagaaggaatgcttctaaagacacgagaggtaacaacaacaatcaagatgaatctgattttcaaactggtaatggttctggaagtaatggccatggttctagacaagggtcgcaattcccccatttcaacaacctaacctacaagtcaggcatgaactctgactcagattttctacaaggtataaatgaaggtactgatctatatgcatttttgtttggcgaaaagaaccccaaagacaatgctaatgggaatgaaaagaaaaaaaaccgtggtgctcaacgatattctaccaaaacagcaccacctttacagtctttgaaaccagatgaggtcacagaggatatttccttgatcagagaattaacaggtcagcctccagctcctttcagactaaggtctgactaa

SEQ ID NO: 77115 - DNA, 1098 bp, Saccharomyces pastorianus
atgccacctctacccgtgctcaacagacctcaaattcatacgtcagttactgaaataagtcatgcaattgatcgtacaatcaaggaagagctctttcccgttgcctacactactgaagaagagcaatatttcaaaactaaccctaaacctgcctatatcgatgaattgattaaggacgctaaagagtttattgatttgcagtattccctgaaaaggaacaaaatagttcttatcacctctggtggtactactgttccattggaaaacaatacagtacgttttatcgataatttttctgcaggtactcgtggtgcatcgagtgctgaacagttcttagcgaacggatatagtgttattttcttacatagggaattctcattaactccgtataataggtccttctcccatagcattaatactttattcttggactacattgattctgaaggtaaaatcaaacctgaatttgctgagaatgttttgaagaacaaaaagctatatgacaagtatatggagaaagaggagaaactacttttactaccattcaccacggtcaaccaatacttatggtcactgaaaagtatagccaagctattgaataatagtggttgcttgttttacttagctgctgctgtcagtgatttttttgttccatattcaagactacctcagcacaagattcaatcaggagacaacggtaagatgggagcaaataatgacactgaaggtacaactaggactacgcctgatggtaaactgattgtgaatcttgaccctgtccctaagtttttgagaagattagtggaatcatgggccactcaagcgatgatcgtttcgttcaaattagaaactgatgaatccatgctgctttacaaatgtacacaagccctggatagatacaaccatcaattggttatcggaaaccttttacagacaagaaacaaacaggtcattttcgtatcccctgaaaacagaaagggagattgggtacgtttggatgaaaaacaccatagcattgaagagatgataatcccagaagtcatcgcacgccatgacaaatgggtggcgcattcgaaaactaagctagctacgaaataa

SEQ ID NO: 77116 - DNA, 1083 bp, Saccharomyces pastorianus
atgtcgacattgttatctgaggtggaaagtatcgatactttgccgtatgtgaaggatacaacaccgacaggaagtgactcgtcatcatttaataaattattggctccttccatagaggatgtagatgctaacccagaggaactgaggactttacgtggccaaggacggtattttggaataacagattatgactcaaacggtgcgataatggaggcagagccaaagtgtaataattgttcgcaaagaggtcatttgaaaaggaattgtccccatgtgatatgtacttactgcgggtttatggatgatcattactcacaacactgccctaaggctattatttgcactaattgtaatgcaaacggccattataaatcacagtgtcctcataaatggaagaaggtgttctgcacgctttgcaatagcaaaagacactcaagagaaagatgtcctagtatttggagatcttatttattaaaaacaaaagatgctaaccaaggtgactttgattttcaaacagttttctgttataactgtgggaatgccggtcattttggcgatgactgtgctgaaagaaggtcatcgagagtgccgaacactgatggaagtgcattttgcggtgataacttagccacaaaatttaaacaacactattttaaccaattgaaagactataaacgtgaagcttcacaaaggcaacactttgataacgaacatgaattcaacctgcttgactatgaatataacgacgatgcatacgacctccctggctcaaggacttatagagataaaatgaaatggaagggcaaagtgcagtcaacaaggaacaaaaatagtagcaataatagatatgaaagcagtaataacaggaagaagaagtcaccatttagcgcacagaactacaaagtgacgaaaaataaaagagttcagacacaccccttagatttccccagaagtagccaaaacaacagaacgaacgattattcgagccagttcagctataatagggacgacttccccaagggtcctaagaataagaggggccgatcttcttctaacaaaagccaaagaaatggccgttattga

SEQ ID NO: 77117 - DNA, 2205 bp, Saccharomyces pastorianus
atgagtgctagtgaagcaggtgtcgctgagcaagtcaaaaagctgtctgtcaacgatagtagtaatgatgccgtaaaaccaaataagaaagaaaacaaaaaatccaagcaacagtccttgtacttggatcctgaaccaactttcatcgaggaaagaattgaaatgtttgacagattacaaaaggaatacaatgataaagttgcttctatgccacgtgttccattgaagattgtcttgaaggatggagccgttaaggaagccacttcttgggaaaccactccgatggatattgccaaaggaatttctaaatctttagcagacaggttatgtatttctaagattaatggtcaattatgggacttagatagaccatttgaaggcgaagccaacgaagaaatcaaattagaactgctagatttcgaatctgacgaaggtaagaaggtcttttggcattcgtctgcccacgtcttgggtgaatcttgtgagtgccacctaggtgcccatatttgtttaggtcctccaactgatgatgggttcttttatgaaatggctgttagagatagtatgaaagatatatctgaatctccagaaagaaccgtctcccaagctgatttcccaggattggaaggcgttgccaagaatgttatcaagcaaaagcaaaaatttgaaagattggtcatgtccaaagaagatcttttgaaaatgtttcattattcgaagtataagacttacttggtacagacaaaggttccagatggaggtgctactaccgtctaccgttgcggtaaattgattgatctatgtgtcggccctcatatcccacatactgggcgtatcaaagctttcaaactattaaagaactcttcttgttatttcttaggtgatgcgacaaacgactctttacaaagagtttacggtatctcttttccagacaaaaaattaatggatgctcatttgaagttcttggcggaagcctctatgagagatcacagaaagattggtaaagaacaagaattattcttattcaatgaaatgtccccaggttcttgcttttggttacctcatggtactagaatttacaacactttggttgacttgttgagaactgaataccgtaagagaggttacgaagaagtcatcactccaaacatgtacaactccaaattgtgggaaacctcaggtcactgggccaattacaaggaaaacatgtttactttcgaagtagagaaggaaactttcggtctaaaaccaatgaactgtccaggtcattgtttgatgttcaagtctagagaacgttcttatagagaattgccatggagagttgcagacttcggtgttatccacagaaatgaattttctggtgccttgtctggtttgactcgtgtcagaagattccaacaagatgatgctcatatcttctgtacccatgaccaaattgagtctgaaattgaaaacattttcaactttttgcaatacatttacggcgtttttggatttgaatttaagatggaattgtccactagaccagaaaagtacgttggaaagatcgaaacctgggatgccgctgaatcaaaattagaatctgccttaaagaaatggggtggtaactgggagatcaatgctggtgatggtgctttctacggtccaaagattgacattatgatttctgacgctttaagaagatggcatcaatgtgccaccatccaattagatttccaattgccaaacaggttcgaattggaatttaaatctaaagatcaagatagcgagagttacgaaagaccggtcatgatccatcgtgccattttagggtctgttgaaagaatgactgccattttgaccgagcattttgctggtaaatggccattttggttatcaccacgtcaagttttggttgtgccagttggtgtcaagtaccaagggtatgctgaagacgtccgtaacaaattgcacgatgctggcttctatgccgatgtcgatttgaccggtaacactctgcaaaagaaggtcagaaacgggcaaatgctaaaatataacttcatttttattgttggtgaacaagaaatgaatgaaaaatctgttaacattagaaacagagacgttatggaacaacagggtaaaaatgctactgtttctgttgaagaagttttgaaacagttgcgtaacttgaaagatgaaaagagaggtgacaacgtcttagcttaa

SEQ ID NO: 77118 - DNA, 963 bp, Saccharomyces pastorianus
atgttgggaaaagaagaagaacagcaatatggccagaatggtaagggaatggaaaatgaactaccctttatgaagaggccttggtttaaaaaggcttatgaaaatgctattgaatttcatgaaaaagacgaattgctggatgcaagagacaggctggagttatcgaaggcctatagatccattgctaaagctgagatgtggggtggttggcttgggttttcagctgtatttttaactccatttgcctatcgttactacaagaccaaggctattaaaggtgttaaggtgccgaggaattttgtcttgggtgtaatggctttattttttgctacaaattttgctggtaggtccatgtatacacgacagttgaacgaacgtgaccccacaggtgttttgaaggataactattccaacaaatatggtgacaacgactttggagcctttcaacatgatcaaacaaaagaaattccgagaaatcaaaggcagtacaatatgatgcgcttattagattcaggctccccctcaaggtggtcgatgtacttttacataacgtaccaaaatccggagagaagattgccagacccgaaagtcaaactgcagcaaatgaaaaaaggcggagtttttaacggctcgccctttatgaaccaaagggatcctataggattgtatcgtaataagggtagaaaatctcctgacccaattgaaggagagcaaaacgacagtcctgttctgtcttcctgggaaaaaatcaggaacggcgacaacagctcgtcttcatcatgggaaaatataaggaacaccagtagagatcagtcgcaggaatcagatgcttcagtagatcatgaatccgatatatttatctcaggattttctgacgatggtaatgctaccgataattcctcttctgatgacaaatatcagcgtttactgcagagcgggagatatggtggaaaccgctcctag

SEQ ID NO: 77119 - DNA, 2838 bp, Saccharomyces pastorianus
atgtctttgacgactgctgctccacttttagcattgttgagagagaatcaagattctgttaaaacatatgccctagaatctataaataatgttgtggaccaattatggtctgagatctcgaatgaactgccggatattgaggcattgtatgatgacgataccttttcagaccgtgaaatggctgctttgattgcatccaaagtttattacaatcttggtgaatacgaatcggctgtgaagtatgcacttgccgcaaaggatcgttttgatatagacgaaaagtcacaatttgttgaaactatagtctcaaagagtattgagatgtacgtccaagaggcttccaagcaatacactaaggacgaacaattttacaccaaggatattattgacccaaaattaacctctatttttgagcgaatgatagaaaaatgtttgaaagcttcagaattaaaattagctttaggaattgccttagaaggttacagattggatatcattgaaagtgctttaaagagcaaattggatcaggattccacttctgaaaacgttaaaattattaactacttattgaccttagctataactactgtgacaaattccaagttcagatcctcgatattgagaaaatcatttgatttcctaatgaatatgcctaactgcgattacttaacgctcaataaagtagttgtaaatttgaatgacgccggattggcacttcagctatttaaaaaattaaaggaagagaacgatgaaggattatctgctcaaattgcatttgatttggtttcgtctgcgtctcagcagttgcttgagattttagtaaccgaactaactgcccagggttacgattctgccttattgaatattctatctgggctaccgacttgtgattattacaataccttccttttgaataataaaaacattgacatcggtcttttaaacaagtctaaatcatctttggatgggaaattttctttgttccacaccgcagtcagcgttgccaacggttttatgcacgctggtactaccgacaattcatttatcaaggcgaacttgccatggttaggtaaggctcaaaattgggctaaatttacagctacagcctctttaggtgtaattcataaaggcaatttattggagggtaaaaaagtcatggccccttacttgccaggcagtcgagcttcttctaggtttatcaaaggtggttcattgtatggtttgggtttaatttatgctggatttggtcgtgatacaactgactatctgaaaaacataatagttgagaatagcggaacttcaggcgatgaagacgtagatgtattgttacatggtgcttcactgggtatcggtcttgctgctatgggttctgctaatattgaagtttatgaagccttaaaggaagttctgtacaacgattctgccacatctggagaagcagctgcattaggtatgggtctctgtatgctcggaacaggtaagcctgaagcgattcacgatatgtttacatattctcaagaaacgcagcatggcaatattactcgtggtctagccgttggtttagccctgataaattacggccgtcaagagttagctgatgatttaattactaagatgttagcaagtgatgagtccttgttacgctatggaggtgcattcacaatcgcgttagcgtatgcgggtacgggaaataattcagctgtcaagagattactgcatgtggcagtctcggattctaacgatgatgtcagaagggcagcagtcatcgcattagggtttgttctcttgcgtgattataccactgtaccaaggattgtccaacttctatctaaatcgcataacgctcatgtcagatgtggtaccgcatttgctcttgggattgcttgtgccggcaagggtctacaatcagctattgacgttctagatccgctaacaaaggacccagtggattttgttcgtcaggctgccatgatagctttatccatgattttgattcaacaaacagaaaaactaaaccctcaagttgctgatattaacaaaaattttttgagcgtgattacaaacaaacaccaagaaggtttagccaaattcggtgcatgtgtggcccaaggtataatgaatgccggtgggcgtaatgttacaatccagctggaaaatgcggatacaggcacattggataccaagtccgtagttggtttggtcatgttctcacaattctggtactggttcccactggctcactttttatccctttcttttacaccaacaactgtcattggtattcgtggtagtgatcaagctatacccaaatttcaaatgaattgttacgctaaagaagatgcattcagttatccgaagatgtatgaggaagcaagtggtaaggaggtagagaaggtagcaacagctgttctttccacgacagcaagggcaaaagcaagggcaaagaagacaaagaaggaaaagggtccaaacgaggaagaaaagaaaaaagagcatgaggaaaaggaaaaggaaagagagacgaataaaaaaggcataaaagaaacaaaagaaaacgacgaagaattttacaaaaataagtactcttctaaaccttataaagtcgacaatatgacccgtatactaccacaacaatcgagatatatttcctttattaaggacgacagatttgttcctgtacgtaaattcaaaggaaataacggtgtggtggttttaagagatagggaacccaaggaacctgtagcactaattgaaactgttaggcaaatgaaagatgttaacgctccacttccaaccccatttaaggtcgatgataatgtcgactttcctagtgcttag

SEQ ID NO: 77120 - DNA, 1410 bp, Saccharomyces pastorianus
atgtcttattcagctgccgataatttacaagattcattccaacgtgccatgaacttttctggctctcctggtgcagtctcaacctcaccaactcaatcatttatgaacacactacctcgtcgtgtaagcattacaaagcaaccaaaggctttaaaacctttttctactggtgacatgaaaattctactgttggaaaatgtcaatgcaactgcaatcaaaatcttcaaggatcagggttaccaagtagagttccacaagtcttctctacctgaggatgaattgattgaaaaaatcaaagacgtacacgctatcggtataagatccaaaactagattgactgaaaaaatactacagcatgccaggaatctagtttgtattggttgtttttgcataggtaccaatcaagtagacctaaaatatgccgctagtaaaggtattgctgttttcaattcgccattctccaattcaagatccgtagcagaattggtaattggtgagatcattagtttagcaagacaattaggtgatagatccattgaactgcatacaggtacatggaataaagtcgctgctaggtgttgggaagtaagaggaaaaactctcggtattattgggtatggtcacattggttcgcaattatcagttcttgcagaagctatgggcctgcatgtgctatactatgatatcgtgacaattatggccttaggtactgccagacaagtttctacattagatgaattgttgaataaatctgattttgtaacactacatgtaccagctactccagaaactgaaaaaatgttatctgctccacaattcgctgctatgaaggacggggcttatgttattaatgcctcaagaggtactgtcgtggacattccatctctgatccaagccgtcaaggccaacaaaattgcaggtgctgctttagatgtttatccacatgaaccagctaagaacggtgaaggttcatttaacgatgaacttaacagctggacttctgagttggtttcattaccaaatataatcctgacaccacatattggtggctctacagaagaagctcaaagttcaatcggtattgaggtggctactgcattgtccaaatacatcaatgaaggtaactctgtcggttctgtgaacttcccagaagtcagtttgaagtctttggactacgatcaagagaacacagtacgtgtcttgtatattcatcgtaacgttcctggtgttttgaagaccgttaatgatatcttatccgatcataatatcgagaaacagttttctgattctcacggcgagatcgcttatctaatggcagacatctcttctgttaatcaaagtgaaatcaaggatatatatgaaaagttgaaccaaacttctgccaaagtttccatcaggttattatactaa

SEQ ID NO: 77121 - DNA, 2661 bp, Saccharomyces pastorianus
atgaaagctgaaaaagcttcagacaaatattttaatgaagtcttttgcaaatgtaagattttcgcaaccaagcttctctccatccatgaggctttgtttcggacaaacaccaacctcctacggaacttcaaatgttatatcagttctttcaaaagcgctagtgagtatcgttttgacgatttaataactaatacacagcagcattcagagaaatacttacagataatcaatgagcatgtggaaagtttctccaatgaagagaaaactgagtttaaaaaactgacgttcgagttttacttggtaaattttcaattatatctttcggaaaatgacctggatacagcaaatatttacactgcaaaagtaaacatcactgataattccaaatatatggacgcagatttgctcatcgaattatgcagaatgatctataattccacagttatgttgaaagaaattaataatcctgaaactcagttagtagacgtaaatataatttcttttttgaaggatgtggaaaaatatttggagttacctgtggaaaatttaaaatctcatactgattatagtaatttaaagtattcagttttgatttttatggcaaattgtttggttgaaggatacccacaagcttctgaacttgaacaatgtgatcactatttaagtcttttacaaaatgaatacccaaacaaggtggacccttttatattggctatcaatttgactaaacggagaaatatcgtaaatccggcagaaacaatagaggaaatcctcatgcgaatgattatgtcagtagatgtaatatccaattttcaagctgtcatagcttctatcaatgacttatcaaaaatggacaccaaattctctatagtgtgtctcgattatttgttaaccaataaactgaattctaagaatgatagtaaattcttagaaaaagccatttgctccaggtttttaattacaacgcaatcaaaaacaatgaatgattccgagatagcggaaagcttagagaattttagcacacagatggaaagaatagtttcagaacccctcaccaaacatgctatctcttgcataataactttattatggaatactggaaaaaagttagaaaagatggaaaaatacgttgttagtattaggttttacaaattagcactcaaagatattatcagtcaaaattattccgaccgggggaaaattcaaagggctctacaagtcgtatataataaaattgaagactattccaacacagttagagtatatcaggatatggacgaagtagatagacaatctcctctgtgtcaacttttgatgttgcagtcttttctagcggacgataaaacagaggaagcgcttacgtgcctccagaagataaagtcgtctgaagatgaaaaaagtacagacgctcttatattagcagtagcagaatgcaaacgaaagacagatttgtctgttcaagggctcttaatgatatttgacaaattacaatctaaaagcaattcgcaaactatatcatctacgtcgagttctcagacactgagcattctcaggtataccctacagatgattgtcaaagtatcggaagaggagcctttagaaaccttcataaattatttaccaacagtacagaaacttttacagaaggctgtcgagtttctcaaaactgtaaagttactaaatcaattaccaccagacgttgagaaggaagcaatatatcagcaatcagtggctgtaaacgaaatcgagtggtttgcctctttttcctataatgtggctgtaaaatgcttagttgatcagtcctgtgaatccatctccgagtttccccagtattgcattcaatttattgaccttattccggtccaagacttcactttcccgaaaatgtatcatttcacatattggaagttcaaagccacaatcttgcaaatgataatagccaaagaaaaagcaaagcaagaccaacaccaaaaggattgggatatttatgagaagtcagaagagttggttaatagcataaatgttatgaagaaaagctcggaatttaaggatgggtcatcattggaagatagaaatacattacatgaatgttttctggaggcgttgactatacatctggaaagcgccttaatcatgcctgatcaaactaggattctggacatattgaagaaaacggaattgtatcaagatagccgcgtggatgcgctacttattgatatctcgtcgaatatggaagatttacctaaaggagttctcatagagatacttgaaacagtattaaaaagaaacatgggccctgaagtgaaagaacgggaactctgtagctggctgcgaattttactggaaaatgcaattaatcttaaccatgaggtcgaactacgcatattggatagggttcttaagatcctaaatataaatcaatcaagtcttcaagacacagatggtgtccttcaaacagagttagaaactatagccacttactgctggaatatcggcgtcaattacataatcaaagacaacaaaagcaatggaattgtttggtgtaaacattcaatggggttcgcaaacatggttaatgaaggcttgcaggagcaattgtactctttatgggagtctttagcaagttcggcaaatatcgatatcaatagtattgctaaataa

SEQ ID NO: 77122 - DNA, 1818 bp, Saccharomyces pastorianus
atgtctaataaacaactagtaaagccaaaaacagagacaaagacagaaataactactgaacagtctcaaaaattgctccaaacaatgctcacaatgtcttttggttgtttagcctttctcagggggttgttccctgatgatatatttgttgaccaacggtttgtaccggagaaagttgaaaaaaactacaataagcaaaacacgtctcaaaataactctatcaaaatcaagacattaattaggggcaaatcgactcaagcagatttattactggattggttggagaagggagttttcaaatccattcgtttaaagtgtttaaaagccctatcattaggtatatttctagaggatcccaccgatctcctagaaaattacatttttagttttgattatgacgaagagaataatgtcaatattaatgtaaacttgagtggcaataaaaaaggaaacaaaaatgccgacccagagaacgagacaatttctttactagattcgagaaggatggttcaacagttaatgagacgatttatcataattacccaatccttggaacctttaccccaaaaaaagttcctcactatgaggttgatgtttaatgataacgtcgatgaagattatcagccggagttgttcaaagacgcgacttttgacaaaagagcaactttaaaggtccccacaaatttagacaacgatgcttttgacgttggtactctgaacacgaagcatcataaagttgctctttctgttttgtcggcggcaacatccagtatggaaaaagctgggaacacgaactttattagagtagacccctttgatttaattttgcaacaacaagaagaaaataaacttgaagaatctgttcctacaaaaccccagaattttgtcacaagccaaacaaccaatgtgcttggaaatcttttaaattcttcgcaagcaagtatacaaccaactcaatttgtttcaaataacccagtcacgggcatttgtagttgcgaatgtggattggaagttcccaaagcagccaccgtgttaaagacttgtaaaagttgccgtaaaacactacacggcatctgttatggcaattttctacattcgtcaattgagaaatgctttacttgcatttttggtccttccttggatactaaatggtctaaatttcaggatcttatgatgattagaaaggtttttaggttcttggtgagaaaaaagaagggatttccggcctctataacagaactcattgatagttttatcaacgtcgaagatcagaataacgaagtaaaagagagagttgcattcgccttatttgtatttttcttagatgaaacactatgcctcgataatgggggaaaacctagccaaactattaggtacgttacgagctctgtactcgttgatgtaaagggaattatcataccaaatactagaaagcaactgaacgtaaatcacgaatataaatggcactttaccaccagttcccctaaatccgagagcttctatcaagaggttctgcctaactcaagaaaacaagtcgagtcgtggttacaggatatcactaacttaagaaaagtctattctgaagctctttctccgtcgtcaaccctacaggagcttgatcttaactcaagcttgcccacgcaagatccaataatttctggccaaaaaaggagacgttacgatcttgatgagtacttagaggaagataaaagctcagttgttaatgatacgataaaagcaaaagattttgatgaaagtgtaccagcaaagattcgcaaaatcagcgtctctaaaaagactttgaaaagtaactggtag

SEQ ID NO: 77123 - DNA, 477 bp, Saccharomyces pastorianus
atgaataataaagtgacgttacttccccccagagtttttttctgcctgtcatggtctgtcatggtgaatattgaccgaaggaagagtgatcgctccgtaaatctagatgatcagcattcaaacaaacctccctctgaatcactaatatcgcttctatcgttaacttcatctatgtccatatcgtcactgctttcattattgataatagttgctgtattgtttccaccgctatacatcagtgaattaccttggataatgtctttcaaatccgtgttttcattttttagtttatctataacctcgtttatcatggtgccatttctgctaatttcgttaacaatactttgtaaaatggaactatcctcaaagtgtatcacgtccccgtcaatttcgaaatttaactgccctgatattattaactttgtcaattcttccttaatatcctccaaatcaatacctagtgtagatgataaataa

SEQ ID NO: 77124 - DNA, 1335 bp, Saccharomyces pastorianus
atgtttcatggcgctaaaggacctttattgatagaacgcattggtcatttactttctatcaattatggcgagaaagaggaacgaaaacgatgggccatgcaaggcattagttatttacaggaagtccagtgtacaagcactccctatttggaaattttggtagaagagagcggattaagacctgtgagcctactaaacagccaactagtaggaaaacctcatttttcattgcttggaggattcgatgaaaacatcgcacgagatataatttcacataattttcagaacgcaatatttcaaatggagtcagaagaggttccattgactaaacgatatcagcatttagaaaaaattacccaaatatccctactatgcaagaatttcaaaggcattgaagaaatagaatataatgtgaaaaatatcattcaaggccgtaaaaattttgatatgttaaattccatggaaaaagatcggataagccatgaagttgttcaagatgattccttctcacttctcaggatacaaatgttgctttgcgtctcatatttccttcaggaaaggtattttgactgttgcacaaaattttttacaatgatgacttcggaacctttaacattgaaagttctgtcagaacacttagactgcatgaattttatatcgaaagaggagtttataatgatggtgaatatatccgtacttatttcaatacctttggataattatgatgattttatctatttgagtgatttaaagcaattttttcagatgacacccttattggttaattgtctcgaactgttgataaacactaatttcaacaaatttttcaaaatttggcatggtgaaataaataaaatatgcatggaaagcctttttttggaacctagctggtcgtcgtcggctgctgttatcatgaggtgcaaaatatatttcttttacttaaggatatcaaaaaagctacagttttcttatttatcatctacactaggtattgatttggaggatattaaggaagaattgacaaagttaataatatcagggcagttaaatttcgaaattgacggggacgtgatacactttgaggatagttccattttacaaagtattgttaacgaaattagcagaaatggcaccatgataaacgaggttatagataaactaaaaaatgaaaacacggatttgaaagacattatccaaggtaattcactgatgtatagcggtggaaacaatacagcaactattatcaataatgaaagcagtgacgatatggacatagatgaagttaacgatagaagcgatattagtgattcagagggaggtttgtttgaatgctga

SEQ ID NO: 77125 - DNA, 801 bp, Saccharomyces pastorianus
atgttcttaagaagcgttaaccgtgccgtcactagaagcattttgactacgcccaagccagccgtagtaaaatcatcgtggagagtttttactgttgctaactctaagagatgtttcacacccgctgcaatcatgaggaaccaagagacccaaagagtaggtgatattttgcaatctgaattgaaaattgagaaggaaacgttaccagagtcaacgtcgttagactcatttaatgactttttgaacaaatataagttctcattagtagagacacccggtaagaatgaagctgaaatagttagaagaaccgaatcaggcgaaacagttcatgttttttttgacgtagctcagattgctaatctgccttacaacaacgcaatggatgaaaataccgagcaaaatgaagacggcattaatgaggatgattttgatgctttatcagacaactttgccaacgttaatgttgttatttctaaagaaagcgcaagcgaacctgcagtctcatttgaattactaatgaatttacaggaaggttcattttatgttgatagtgctactccatacccctcagttgatgctgctttgaatcagtctgctgaggccgaaataacaagagaattggtataccatggcccacctttttcaaacttggacgaagaactacaagaatctctggaagcttatttggaaagtagaggtgtcaatgaagagctagcctctttcattagtgcatattccgagttcaaagagaataacgagtatatttcttggttggaaaagatgaagaagtttttccactaa

SEQ ID NO: 77126 - DNA, 384 bp, Saccharomyces pastorianus
atgttatatgtaatcagtgaactttttttttttcttatatatcgttattgcttttcgaattctaatacaaaccgcctcatcaaagtaggttcgcgatctacaccgttggcctccatgttacggcggtattcatgtaacatttccgtagcctgttgtacgatcttctttctttctgagctactcacatctttcctacacttcaatattcctaccagtaaatctatgcgcgagtcccagtatacttcaagatacttttgccaaatatctaatatgctatctatcggctcacagcttaggtccatgaagaactccattacagtaaaattttgtgtaattagcgtatccttgctttcattaccatccagcaccttgacaaagagctga

SEQ ID NO: 77127 - DNA, 2418 bp, Saccharomyces pastorianus
atgtcttcagatcccttgcagcaagtttgtgatttaataaagggagatctatcacttgaaagggtacgagatattaaggaacagttgctaaaagaaaaatccgttgtagaataccaattgaataaagaatcagacaaatactatggcgaagtcgaagaatccctcaaactactgaatctgtccaaaaattcggtcacttcaatcaaacaacaaatcaatgaagttaataaattgggtaatgataatcgatttgcaattaatcgttatgatatacttttccgagccacaaaactttatgaaacggtcaatacgacatcatcgatttatgatcgaatatataactttgttgcactaatggagcatatagaaagactattagtggcggaattagcggaagatgccctggaaactggttgtccccatcttttggaaattcatttcctattaacttcagcacgcgactttcaagagcaggttgttgttatggctaaagaagcaactgaagatgcgcaacgtacagtcatgaaattgttttcaagattatccggaataatatcaaaatttgataaattgctggacggattaacttacgatattgtagaaatggccagagctgagcaaatatctttagcaattcgactttttaaaatttatgacctagaagaaagggaagatttgagaattgaagctatcagaaatataatcaagaagaaagaaattgaaatagaaaaatcctcaattaaaaaacttccaaatagcaaaaacaccgcaaggttacaagatgagacacccaaagttatagaatatccgacaaacaagggattataccaagaaataatgagcggtaccatctcaacaagaacagcacctcgaggttacaagcattttctaataaatggtataaataattccatttctgaaatgtttggtgaaatgagagaaaaatacgttggtgatcaaaaatttgatgttcttgataacatggattggattttcaacgaattgattattgtaaaggaacatattgccaactgctgtccaccacattggaacatatttgaagtatactttgaccaatactataaggaattgcattcattaatcacggatctcgtggagtccgaacccgagaccattattattcttgatattcttgcattcgataagacgtttcaagatacacttaagcaagattttggatttaccaaaagcgaagtcaaatctgtcatcggcgataaagaaaaggaaacactatttaaagactatttgaatttgatagtggttaaaatgaccgagtggataggtaatttagaaaaagcagaatttgatgtattcttggaaagaagtaccccgccacattctgattcagatggattgctttttcttgatggtactaagacttgttttcaaatgtttacacagcaagtggaagtggctgcaggtactaatcaggccaaaatacttgtgggtgtggttgaaaggttcagtgatctactaacaaagaggcaaaaaaactggatttctaaaataagtgaagaaatcaaaaagcaaatcaattacaatcacaagtatgatatagatccagagagtataactcctgaagatgagtgtccaggaggtttggtggaatacttaattgctgtatcaaacgaccaaatgaaagctgcggactatgccgttgccatttcatccaagtatggtaaactggtttctaaagtttatgagaagcaaattacaaatcacttggagggcactttagatggttttgctgaagttgctcagtgcagttctttaggcctaatcacattgatgttcgatgatctgagaaaaccctaccaagagatttttagcaagacatggtatatggggagccaagcgcagcaaattgcggacacactagatgaatatcttttggatatcaaacctcagatgaattctgtgctgttcgtgaacttcatagacaatgttattggtgagacaattataaaatttttgactgctttatcgttcgagcattcattcaaaaacaaaaacaataagtttttagaggcgatgaagagggattttgaaattttttatcagctctttgtcaaggtgctggatggtaatgaaagcaaggatacgctaattacacaaaattttactgtaatggagttcttcatggacctaagctgtgagccgatagatagcatattagatatttggcaaaagtatcttgaagtatactgggactcgcgcatagatttactggtaggaatattgaagtgtaggaaagatgtgagtagctcagaaagaaagaagatcgtacaacaggctacggaaatgttacatgaataccgccgtaacatggaggccaacggtgtagatcgcgaacctactttgatgaggcggtttgtattagaattcgaaaagcaataa

SEQ ID NO: 77128 - DNA, 2037 bp, Saccharomyces pastorianus
atgggtgtgcattttgatgataatgctaacacaacgtgggaagccacagaccctggcgtttcaagtgattgcgatggacagcaccgtgtgactgagtctatacaactgcagaacttttccaatacagacatggaaagtatgcttgatgaagaagggagagaaaacagtaagtcaaaatggttactattaaaaaggaaacatcctatacaaaagtttattgaaagagtttggaatggccctgttgagccaagtgatgaaccgcctagctttcctaaacgttggggatggctgaagaagatagatgattttccgcagactagattcaaaactaaaataccaagtaagttgatacgactgttgctactgattgtgtactgctgcttttggatgcgcattttttattctctcatatacccctatcttatcaagccgccatacttccatccaaatgatggctcagaaaaggttcctatattgtctttaagttgcaattcctacttgaactgggagggtaccaataacgaatgtggtttaaatgctaaaaactgcggtccacttgataataaagaatacatgatcagatgtccagcactgtgtgatagaggtggatggacatactccgccattgccgtagggaataggagagtcaaatatacagggtatgaaattggcggaggtgccctgtttagcgaagaagacccgatggtcgtgtcctacccttatagaagtgactcgtttccatgcgcctctgcagtacatgcaggtgttatctcaccattttacggtggctgtaccaaagtttctatgcaaggggcccaaaattcttttccatcaaaaaaaggaatgtataacactgggttttcagtagcattcaattcattttttcccggttcatattcattcagagatatacaaggcggtatcctgtcgggctgttatgatcctcgagcagctgtggtcgcattgaatatgctttttggactgccaatattttatttgtacgacagtatttacgggtactggataaacacgatagtgggctattggactcttgtattatctctagaccctccattactaacggatgcacatgacccagctagcgtgtatgagcttttcagtgtgggatttcaaaggcttttacctttatgctttgttttatacgtcgtttggaagagtgcggtgaaaagaacactagaaaatggatcgcccatagcaaaagtaatactttggtaccccacattttggttgggaatctcaaataatgtcacatttgaccgattacctgttgatagacttacgacgacggatttgaaagagcaggctggagcactgactgctgtgggatctattgcagccactattcttacatgcgcagttatacaggcttattcactctggaaatcaggaagattcaaaaagtattttaaaatatacatttgtttcattggcggattaatagctttgggatctttgccgggactgaacttgaggatacatcactacatcttaggttctatactggttccaggctgtgccacgagaggatcatctgcatatctgttccaaggaattttagtcgggttaattctgtctggtgtagcaagatgggattttgcaagcatagttgagacagatacggccttgttaagaggagaagcaggtgcttctttgaagccacctatactggattttaacgacgatcaaaaccattctctgtcgtggcatctaaatgcaactgatccagtaattgatcaaataggaaacatcgacggtttttcattacttttgaacgatgtggaagtgtacgtaggcaagaatgagactgtgagtatcgatgttcttcggatggagaatccagcacttgctcaaatgatggacgatgctcttgatgcctctaacgggacaatagacttgtatttaagagtggctcgtgcctctgtacggtctccaacgaatagaggtgactatacgaatgcaggagttttacagtggccgaacggaatgtggcaaaagcctgaaccaggcgtatcataa

SEQ ID NO: 77129 - DNA, 444 bp, Saccharomyces pastorianus
atgcgcatccaaaagcagcagtacacaatcagtagcaacagtcgtatcaacttacttggtattttagttttgaatctagtctgcggaaaatcatctatcttcttcagccatccccaacgtttaggaaagctaggcggttcatcacttggctcaacagggccattccaaactctttcaataaacttttgtataggatgtttcctttttaatagtaaccattttgacttactgttttctctcccttcttcatcaagcatactttccatgtctgtattggaaaagttctgcagttgtatagactcagtcacacggtgctgtccatcgcaatcacttgaaacgccagggtctgtggcttcccacgttgtgttagcattatcatcaaaatgcacacccattcaattcaatgctaaatggtctatctctcacaagtctactactggttga

SEQ ID NO: 77130 - DNA, 774 bp, Saccharomyces pastorianus
atgaaaagaagtgaaaaaaaatcgatgagctcagctcttaagaacggtattatggaacgaactcaacccgaaaaggtagtacagatgcagggcacggcagatttgagcacttcgaaacttggtacgaaaaaatactgggatgaactgtatgccctggagctggagaatttcaggcggaatccgcaggataccggggactgttggtttagcgatagcgatgctgaacaaaagatgattgattttctggtagataacattggtgcgtacagaatttctgagaatgcttctgttgtagacctcggtacaggtaatggacacatgttatttgaactgcatcaaacggaattccaagggaaactggtcgggatagactattctgaggaaagcgtcaaactcgctagtaatatagccgaggccaccggtgttgacaatttcatcagtttccagcaagcagacatctttagtggtgactggaacccgggaaagtatgacattgtgttggataaagggaccctagatgccatttcattgagtggcatgaagatcaacggtaaacttgatgtagtcgatgtatacgccggagtagtggaaaagattttggaaaaagacggtattttcttgatcacttcttgtaatttcacacaagatgaactagtaaagatcatagagactgataatttgaaaatgtggaaaacaataaaataccctgttttccaatttggcggggtccagggtgcgaccatatgtagtgtagcatttgttaaacaaaattga

SEQ ID NO: 77131 - DNA, 984 bp, Saccharomyces pastorianus
atgagtgagaccaatggtggcgatgcagccagggaaaattctgaggtgaagcaaactgcagttgaaaatcctatcgataaactagatggaactcctaagagaccgagggaaaaagatcaggatgaacaagcggaagaaacgagtgacaaatcagaagcacccaataaaaacgatgaggagaaaaaggaggaaggtaaaaaagaccaagaaccatcacataagaggatcaaggttgacgacggaaagaccgtagaatctggtagtgtggaagatgacaaaaaggaggataaattcttgtttggtgccgcatctaaatttggaactgggtttggtgttgccaaaaaggacacgaaagatggagatacaactaccagtactgaaagtttaccagcctctgacagcaaaacaaagaagccatttgcatttggttcaggtttgtcatttggcagcggcttcaacatactgaaaaacaaaacagaaaataactctgaaagtgaaaagaaagctactgatgttgacaaagataaagtccatagtggatccgaacaactagcgaatgcctcagaagatacaaaagacaaaccgaaacccctcaaattgcagaaacaggaagtcaagtctggtgaagagtctgaggagtgcatatatcaagtcaatgcgaagctgtaccaactttccaacataaaagaaggctggaaggaaagaggtgttggtatcatcaaaatcaataaaagtaaggacgacgtcgagaagacgcgtattgttatgaggtctcgtggtatcttaaaagtcattttaaacatccaactggtcaaggggttcactgtgcaaaaaggatttacaggttctttgcaaagcgaaaaattcataagattactagcggtagatgataacggtgatcctgcacagtacgccataaagactggtaagaaggaaaccacggatgaattgtataacattatagttaaatccgttcctaaataa

SEQ ID NO: 77132 - DNA, 465 bp, Saccharomyces pastorianus
atggaagccgattggaggagaattgacatcgatgcatttgatccagagagtggcagactaaccgctgccgatctggtaccaccatacgaaactactgtcacattacaagaattacaacctcgaatgaatcaattgcgctcgcttgccacaagtggtgattctttgggagccgttcaattacttacaaccgatcctccatacagtgcagatgctccaacaaaggagcaatattttaagagcgtccttgaagcattgacacaagtcaggcaagccgatattggtaatgtaatcaaaaatttgagtgattctcagaaggacgtgctggtaaagtatctctacaaaggaatgtccgtacctcagggccagaaacaagggggtgtcttgcttgcgtggctggaaagaattactcaagtcagtggtgtcacacctatcgttcattatatatcggatagaagaactgtatga

SEQ ID NO: 77133 - DNA, 903 bp, Saccharomyces pastorianus
atgaattataatctatccaagtatccagacgacgtgtcgagacttttcaagccaaggccacctttatcttacaaaagaccaaccgattacccatatgcgaagagacaaacaaatccaaatatcactggcgttgcaaacttactatcaacctctttgaagcactatatggaggagtttcctgaaggatctccaaacaaccatctccaaagatacgaagacatcaaactttccaagatcaaaaatgctcaattgttagaccggagactacaaaattggaatcctaacgttgaccctcatatcaaggacacagatccctacagaacgatatttattgggaggttaccatacgatcttgacgaaattgaactgcaaaagtattttgttaagtttggcgagatcgaaaaaattaggatagtcaaggacaagataacccagaagagtaaaggctacgccttcatagttttcaaagacccaataagtagtaaaatggcattcaaggagattggagtacacagaggtatccaaatcaaagacagagtctgcatagtcgacatagaaagaggcagaaccgttaaatatttcaagccaagaagattgggcggcggccttggaggcagaggctattccaacagagacagcaggcttccaggaaggtttgcaagcgcaagtacatcaaatcccgccgaaagaaattatgctcccaggctgccacgcagggaaacttcttcctccgcatatagcgctgatagatacggcagttccacattggacgcgaggtaccgtggaaacaggcccttgctctccgccgccactcctactgctgctgttacttctgtatataaatctagaaactcacggactcgagagtctcaaccagctcccaaagaagcgcccgactattga

SEQ ID NO: 77134 - DNA, 285 bp, Saccharomyces pastorianus
atgatggacggccacgttcagggtctgagaaaaccactcattcctatgtcccatgtggttggttgcaatttgctgctatatatacgacttggctgtagagagatctacgtaggatgtgcccactatcaaggggggtttaccaaccttatcttctattttaagtgctcaaatgaaggttgcattatatccctggcagttttcccggcaattttcccggccgcttataatagtcatggtgaaaggattgttgcttgttgtggttgcaacatgacagttgcctactaa

SEQ ID NO: 77135 - DNA, 495 bp, Saccharomyces pastorianus
atgacgaaaaaggataagaaagcaaagggtcctaagatgtccaccatcactacaaaaagtggtgagtccttaaaggtttttgaggatttgcatgattttgaaacatatttaaagggtgagacggaagatcaagagttcgaccatgtccattgccaactgaagtactatccaccctttgtcctgcatgatgcgcatgatgatccggaaaagatcaaagagactgccaattcgcactctaagaagtttgttcgccatttacaccagcatgttgagaagcacctgctaaaggacatcaaaaccgctatcaacaagccagaattgaaattccacgataagaaaaagcaggaatcctttgaccggattgtttggaattatggcgaagaaacggagttgaacgccaagaaattcaaggtgtctgtcgaagttgtatgtaaacacgatggcgcaatggtagatgttgattacaagacagaacccttgcagccactcatctaa

SEQ ID NO: 77136 - DNA, 1923 bp, Saccharomyces pastorianus
atgaacggtcctccaacattcactcaatatagaataaataagttttctgggaatggagcaactcataagattagagaattactcaattttaatgatgaaaagaaatggaaacagttttcgagcaggaggctggagctgatagacaaattccaactaagtcaatataaggcaagcgaacaagatcaaaacataaagcagattgctacaatattaagaacggagtttggataccctgtaagctgctctaaggaattcgaaaagttagtcactgctgctgtgcaatcagtgagaaggaatagaaaacgatcaaaaaaacgctacgctctgagcatagccaatggcagtgacggcaatgtcaacaacagcatctcgtcaaattctacttctgacgacgagatctctccgtcgatctaccagcgctccaattcggacttcctgcctagttctaattatgctgcagatttccagttttcaaacaagttccagcctctcaggagtcaccagagtcataacggaaccatttttccaactgtgggcacccaaaatgactcatctccatcggttacttcgacccaacaaaagtataacgacatagtcaccatgctagtgcacgatcttgttacgaatgtcgtacccctatcagaacaagctctcaaggacccatatactgggccaaatctgtcacattttgccacgtcttcactcagccagcaacctaacattaccacaaacatcccgatagattctaccgtgccatttttcctgagggaaaagttactcctacaaatccaaagatcaagaacttgtcaggacatttcgcaggctgcaggatccattgatatatacgcaaatctggagattttgggtgaaatgtcaatccgaatgtctatcgcattcgttatcgaacgatttttctccaacttggtctcttcttcaatgaagtatatcactgccaagacgtgctctcctgaaaatctggctttgttgtctcaaagactgttcggtgccgctacaagacataacttatctcatttccccgcggctcaggtacaactaaggctactgtatttggtcataggtggtattgtcaaggattttggcttcgaccccacgctttaccctttaagtgaaatcatacatcatattgtgatggttcagtatcctttggctagttcctgtgcgtcagaaccaccatcatcttcacctaacaagagggtaaagagaagccctcctgtcgtttcaagtgacgttatgttgaataataataacactctatcgaatagagctacacttttaactacgctaccaatgaagcctcaatcggccaataaagatgttaatcgcagagtgatcattagatttaatgatcgcgagcaagcctttactttccaccagttgagcaatggaccacccacggtgtctgaagttttggaaaactgtaaaaatttatttaatattatcaacaagaacaagaattttgatattttccataacgataacctcttgaatgatgaaagtttggcaaagttatttgattccttttccacgagcgaaattcgtctcgtaatcaaggacatttccaccattccactacaagatgcaaaaataccagtgcccattacgttgcccaaaatgtcatgcataggtgaaaacccctctatgccttctattccattggtaccacaagaaaaagatgatccaaaaaaatcaagcttaactgcctttgataacatccttaataggatctctaaatcgccaatgaatgaagaaaatagcaacactactttaaacaccggcacctccatctccaacacaaataataatgaccacaacgagtctgtgccagcgccatacgttacaaagaacaaaaattctttccaaaatggcaatttaccacagccggttttccagcctttactttga

SEQ ID NO: 77137 - DNA, 1884 bp, Saccharomyces pastorianus
atgactctagaaccacactatagtgccaagtcggctgcttcagccagtgcctttgttgcccgttctgcgaccgaaagctcaacagcaagcacaaaagctgctcctaggaaaaagacgtactcgcagtcaaatggtattcccataaggattgataatctccctccgggcaagacttgggcccaggtaaaatatttgataggcggaatcatataccataccaatattttacaggtgaaaatgctgcctccaatgacttccatggttcctccttttattacttttcagagttgcattgtcattctgaagaactcgatagataacgagtccctggaaaacttactacttactttgaacacctaccaatgggattatcatgatctgttcgtttacctgttgccgtacactaatgattctccttcactgcgatatccagaaattagtgatagcaacaatgacgtccggagtgctcccgatgaaactaaaagatctatttctcctcgatatgcaagccatgtttcatctgtgacaccgcagccaccatccgcttctatcccaccttctcaatttttcagtttttctcctgaagtgagccttcgaaagaatgagagcataacgccattgcccacgcctgttcccgtacctgttggtgtgccacctcttgctcccccgcctcatggtccattttcgacttcgatgctacctatgttgggtgctcctccgggaacgctacctaatatgcagatgccctatcaaactactctaccttcaccaacagctgctgctactactggtggtccacttgcttcccctacacactatccccgtcgtcggcatttctatcaccagaaccaaagccagtttcaaaaatacatgcataatagccccaggaatccagatactggcacaggccctcgtctttctcagcagcatcacctctccttaaggaacaataagataaatccctcttataacgaaatatctgccctttacaacttgaacatggcctcaaattccaataataatggtaatattcccactacaagtacgaatggtgatgaccgtgccctccaagcaaagaatggtggaacaattacaccttcacaaactcaaataaatcacaaaagattaaagcatatctttaacgagaaaagctttagaaaacaaaagacgaatagaggtatgtggcagctgaagatcataaatttcccaccctatatacctatagaattcttggagaaattatcagagtctgatttcaatgagttaatgaaccaagagaagttcacagttattgaaattaaagagaaaggacaattggaaaaatttggcaggctaagatggacagttctaaaagattttataaaactgaaatgccccaagctattaagactacaggaaagacagtttctacagcaacaaaacgaagcatctttactcaatgaatctatggacgctctaaagatatcagaaaatgagaacaccaacgggagtgcaaataatagcacatacacaaatggcgggcctcgaacatctatcaataatacaagggaattctatgtaggggtttatgaagaccatgaagaagcaactctactgaggtttaaattaccggaagatgaattagaggagtttaatagaaatttgccaactacttttgcacaaagtggaaacgtctctgactccgaaggtgatagcaaggcgaaatactttaaagttagcacaattgtgtataatgccattgttgggttccacgataaagagctgtctgatttgacgttcgaatccttacaagaccaggaatattcactggggtacaaaattcaggtaatggaactgccaccatttgacgaggatgaatttgaaaatcaacggcagcagttctaa

SEQ ID NO: 77138 - DNA, 318 bp, Saccharomyces pastorianus
atggccccgaaggctttttttgtctgtcttccttgggtcttaccccgccacgcgttaatagtgagacaagcaggaaatccgtatcattttctcgcatacacgaacccgcgtgcgcctggtaaattgcaggattctcattgtccggttttctttatgggaataatcatcatcaccattatcactgttactcttgcgatcatcatcaataacataatttttttaacgctgtttgatgatggtatgtgcttttattgttccttactcaccttttcctttgtgtcttttaattttgaccattttgaccattttgacctttga

SEQ ID NO: 77139 - DNA, 816 bp, Saccharomyces pastorianus
atgaaacgtttcaatgttttaaaatatatcagaacaacaaaagcaaatatacaaaccatcgcaatgcctttgaccacaaaacctttatctttgaaaatcaacgccgctctattcgatgttgacggtaccatcatcatctctcaaccagccattgctgctttctggagagatttcggtaaagacaagccttacttcgatgccgaacacgttattcacatctctcacggttggagaacttacgatgccattgccaagttcgctccagactttgctgatgaagaatacgttaacaagctagaaggtgaaatcccagaaaagtacggtgaacactccatcgaagttccaggtgctgtcaagttgtgtaatgctttgaacgccttgccaaaggaaaaatgggctgtcgccacctctggtacccgtgacatggccaagaaatggttcgacattttgaagatcaagagaccagaatacttcatcaccgccaatgatgtcaagcaaggtaagcctcacccagaaccatacttaaagggtagaaacggtttgggtttcccaattaatgaacaagacccatccaaatctaaggttgttgtctttgaagacgccccagctggtattgctgctggtaaggctgctggctgtaaaatcgttggtattgctaccactttcgatttggacttcttgaaggaaaagggttgtgacatcattgtcaagaaccacgaatctatcagagtcggtgaatacaacgctgaaaccgatgaagtcgaattgatctttgatgactacttatacgctaaggatgacttgttgaaatggtaa

SEQ ID NO: 77140 - DNA, 438 bp, Saccharomyces pastorianus
atgtttttaagaaattccgttttgagaacagcaccagtcttgaggaggggtataacaacattgactccggtcagcaccaagttggccccacccgctgccgcctcttactcccaagctatgaaggccaacaattttgtgtacgtgtctggtcaaatcccttatactccagataacaagcctgttcaaggttctatctctgagaaggccgaacaagtttttcaaaacgttaagaatatcttagcagaaagtaattcttctttagacaatatagtcaaagtcaacgtattcttggctgacatgaaaaactttgccgaattcaactctgtatacgccaagcacttccacacccataagcctgcaagatcctgtgttggtgttgcttccttacctttgaatgttgatttagaaatggaagttatcgctgttgaaaagaattga

SEQ ID NO: 77141 - DNA, 858 bp, Saccharomyces pastorianus
atggagctaagttcaccatcaaaaaaaaccacaacatcgccaataaatataccaggggggaatagagataacctaataatcggaccacattctcacagcttcaagaccgatccattttcaagtaacaatagtagtttgctgtccaaaatatctactaaccccagtttggaaagccctttctcttcgaaatctttactagattgttctcctgtacaagctgtaaagaagtctttagagtcggaagcaaaaacgcatagcctggacgaggagacaaatgaacagactgatgtaaagatcttaaacatagcagactttcccacagatgaactcatactaatgataagtgcgctacttaacagaattataacagcaaacgatgaaactacagatgtctcacaacaagtgtcggaagagaccgaagacgaactcttaactccaatccttgctttctatggaaagaatgttccagagatagctgttgttcagtacttagagagaattcaaaagtactgtcccaccacaaatgatatttttctttctctccttgtatatttcgatagaatctccaaaaattatgggcattcttctgagcgtaatggttgcgcaaagcaattattcgttatggactccgggaacattcatagattgctcataacaggtgtcacaatttgcacgaagttcttgagtgattttttttacagtaactctcgatacgccaaggttggaggtatttctttgcaagagttaaaccatttagaattacaattcctgatactatgtgatttcaaattattggtttcagtcgaagaaatgcagaaatatgcaaacttgttatataaattctggaacgaccagtag

SEQ ID NO: 77142 - DNA, 762 bp, Saccharomyces pastorianus
atgtactttaatgaagaacaattgctaaaatatactatatatgcctatagattatccttttttgtaggcatttgttcacttttcatagccaaaagttgtctaccagaatttcttcgatatggtaaaacctaccggcccaaagagaattcaaagtactcaaacgttttagaacggatcaagaagttcacagtttcaaaggcgtattttccccatttttattatttggctacttttctatccttagtcaccttatattactatcctaaattccccatcgtttggatcatatttggacactcattgcgccgactttatgaaacgctttatgtactacattatacaagcaattctaggatgaattggtcccattatctagtcggtatatggttctattccgtactcttgttaattcttaatatatcactgtacaagaactccattccaaatacgttaaacatgaatgctttcatcatattctgcatagcatcttgggatcagtacaaaaatcatgttattctggccaatctggttaaatattcgctgccaacaggaaggcttttcaggttggtatgctgtcctcattatctcgatgaaataatcatttattctaccctgttgccctatgaacaagaattttacctaacactagtttgggtaatcacaagtttgactatatccgcattggaaacaaaaaattattacaggcacaaatttaaagacaatcacgtagccccctacgccataataccttttataatctag

SEQ ID NO: 77143 - DNA, 1617 bp, Saccharomyces pastorianus
atggccaccaccacgcaaccacaaaatatactgatggatgaacctttaaatcttcctaataacagtgcccacaacaataactatggaaacataaatgcgaatataagaacttctgctggtatgagcatgcacatgcaccctgccaggctgaactctctggagtttttgcacaagcccaggagactatctaatgtaaaactgcacagattacctcaggacgagcttcaaagaaatacggacatgaataagggaatgtattttaatgggaaacaagttcatgcccatcacccgtttataaattctggagcgaactttaacgcacatcatcaagacgtcagtaaattaggcgaggaggaagacgaaatctctcctctatcacatgataatttccagtacgaatccgaggaaaatggtaatccttcgcctcccatttacaagaaatctggagaactggttaagagttcattaaaaagaagatccaagtccctacccattactcccaaatctatattcaacaaaactggctctaagagtaaacatgtcaatttagatcatgtagatactaggctattgcaaagaagtaaaagtgtccatttcgatcgtgttttaccaataaagctgttcaatgaaaatgagaaacccatagatgttggcaaacaaatggttcaacaagatgttctgaatttcaagcataagcctttgacgagactaagtgcccttaatggcggtagtgatagcgtacctatagaagatttactatctgaaaacaaccaaaacgaatatggagatacatggctacgaaacccgaagggtgtattcctatttggtacaaattctaataatcgcagaaataaaaaaaagaagtttaaactaagtgacgatgacagtgatattgaaaatgacaatgatagtgacgatgctataaaccgtttagtaaggcaacaagacaaagaccaagctcatcttgcgcacgggttgaagaatttgttaataaacgatgacgacgattatttagaaacaagaacaaattctgctaaatcaggagccaacttgtttattggaaactctaaaagaattgttggtctttacaacaagaacttcccaatattaagtgacaggaactgtaagagtttaaaacttaacatatttctgaatctttcccgtggaaggcccgtttttttgcaagaaattacgctactaactggctttcacaacatggttataattggcaaagtctttgtgaaaaacatatactttgataagaagattatcgtaagatatacatgggatgcatggagaacttttcatgaatcagaatgcgtgtatttttctaatgccaatggcatcttaccaggaagcaatatggatatttttaagttctccattgatgatatacacaatccaaatgataaagatagcaatatatcacaattggagttttgtattcaatacttaacttggggcgttgatcgttctaggaaggaatattgggacaataatgattcggcaaattataaaattgacgtggtaacgaatgaaacgaggacagggcccacaacagacgtcaatgataactacgagatgaaacatagtcttttcagaaacccattccattaa

SEQ ID NO: 77144 - DNA, 897 bp, Saccharomyces pastorianus
atgtcgacgtcagtcccagtcaagaaggcattaagtgctcttttacgcgatccaggaaacagtcattgtgccgactgtaaggcgcaactacatccacgctgggcttcctggtcacttggtgttttcatttgcattaaatgtgctggtatacatagatcattgggaacgcacatttcgaaagtgaaatctgttgatctggatacatggaaggaagaacatttgatgaaactgatacagttcaaaaacaatttaagagctaactcatactacgaagctactttggctgatgaattgaaacagaggaaaatcactgatacgagcagtttacaaaatttcatcaagaataaatatgaatataagaagtggattggtgacctctccagtattgaagggttaaatgattctactgaaccagttctgcataaaccgtctgcgaatcattcgttgcctgcttcgaatgcaagattggaccagagctcaaattcattacaaaagacgcaaacacaaccaccttcccacttattaagcacctcaaggagtaatacgagcttattaaacctacaggtttcatcgctttctaagactacatctaatacaagtgtaactagttctgcaacaagcataggtgctgctaataccaagactggcaacagagtcggtgaagttgggcaaaggaacgatttgaaaaaatccattttatctttatactcaaaaccttctgcccagactcaaagccagaactcatttctcacttccacgactcctcagccttgtaatactccgtcaccattcgtgaacactggaattaccgctacaaataataatagtatgaattcaaattccagttctaacatttcattggatgataacgagttatttaagaacgtctggagttga

SEQ ID NO: 77145 - DNA, 1185 bp, Saccharomyces pastorianus
atgtggaagattatgcgttcatggaaatgtgggggaatgcgctgggcacatcgccagcgaccctcacacgagctgctgtcgcaactgtcgttcgaccagcattacaagattaggtcgaacattgagctgctgatacaggactacgctagtaaaccaattgcgcccctaaactacgagtatttcctgcaatacaggccgccgctgaccaagaaagaggagtacatgctgacgatcaagacaatcaacctgttgctttcattgacgtgtaaacggcttaatgccattcagaggctaccgtataatgcggtaatcaaccctcacattgagagaaccaactctttgtatttgaaaagcttgcaaacgttgctatcaatcgcatacccgtacgagttgcacaatcctcccaagatacaggccaagttcacagaactgctggacgaccacgaggacgccattgtggtattggcaaaaggtcttcaggaaatccaatcgtgttacccaaaatttcaaatttcgcagctcttgaacttccacctgaaggagagaatcacgatgaagctgcttgtgacgcactatttgtcgttgatggcacagaacaaaggtgacacgaacaaaaggatgattggaatcttgcaccgggacctccccatagcacaattaatcaagcacgtttctgattatgtcaatgatatatgctttgtgaagttcaacactcagcggaccccggtcctaattcacccgccatcacaagacatcacattcacgtgcattccgcccattctggagtatattatgacagaggtattcaagaacgcttttgaagctcagatagctcttggaaaggaacatatgcccatagagatcaatcttttaaagccagacgatgacgagctgtacttacggatacgggaccatggtggcgggatcacgcccgaggtagaggccctcatgttcaactactcttactctacacatacccaacaatcagctgactctgagtctacagatctgcccggcgagcaaatcaacaacgtctccggcatgggctttggtctaccaatgtgcaagacgtacctagaactgtttgggggcaagattgatgttcaaagtttacttggctggggcacggacgtgtacatcaagctcaaaggcccttctaaggccgcactactctccaaaaggtaa

SEQ ID NO: 77146 - DNA, 981 bp, Saccharomyces pastorianus
atgtcgtttaatgccttcgccagctctttgagcaagaaattacaggaaatatccacaagtgtttccgaaaaaacccaggaattgcccagtttggcgcaatccacccaaagaatggtccaggaacgtttgggtcaggtgacggacatctcccaattgccaagagagtacacagagctggaagataaggttgacaccatcaaactgatttacaaccacttcttgggtgtaactgctatctacgaaaacggatcgtacgattaccctaaatacatcaacgaatccgtcaacgagttttcaagaagcgtggcttccaagttgacagagttgactcatgctacatctgcgtctgaggcacaaaacatcttagttgctccaggccccatcaaagaacccaagacgttgaactacgccctcagtaaagtggctttgaactccagtgaatgtttgaacaagatgttccccaccgaggaacaacccttggcttcggcactcttgcaattcagtgatgtgcaggctaagattgctcaagctagaattcaacaagataccttgattcaaaccaaattcaataaaaatttgagggaaaggctctcttttgagatcggtaaggccgataagtgccgcaaggatgtccattccatgagattaagatatgacgtggcaagaactaacttggcaaacaacaagaagccagaaaaggaagcttctttgagagtccaaatggagactttggaagaccagtttgctcaagtcactgaagacgctactgtgtgcttgcaggaggttatttctcacgctaacttcagtgaagatttgaaggaactggccaaggctcaagctgagtattttgaaacctcggctggcctaatgaaagagttcctatccaactcatttgcggaagagccggaagcaaagcctgaggttgcagaagaagaaaagccacagacagctatctctatgaatgacgaagacgacgcttaa

SEQ ID NO: 77147 - DNA, 417 bp, Saccharomyces pastorianus
atggacgctactcaaccgcaatacgaactatccgtagtcacacaatgcctaaagtctgccattgacgtcatccaatggttgattcctactattactaagttcagccaatcacacccgttagttttccaactattgtttattttcttcacattttatgtcttttacaagttgttgatgaacttaattactctggtcaaaagattcctgtatttgacgttggtagtaacatgtatcggtatttatatgcgtggttcgcagcagtttttgactgtggacctgttgaatttctacaatttcgtcatgtcaaatagatactacgcatttaaaatttatactctgtttattaatgccctggaaagagaaatcaacactgtttatcatttggcgcagatgaaaatggaacagttgcttaaatag

SEQ ID NO: 77148 - DNA, 1422 bp, Saccharomyces pastorianus
atgctcaggtgtgcggtcaagaagtttgcatattttgccaccttcctcactatcgtcgctaatatttacatctatacttatccatctttccatccagaacagtgttcatggaactgctctaacaagaacgcaccactacagaaagatttgacttttgtggacaaagtgaagaattacttcagtgatgttcgagagcaatggcatggtagccatgcctctgcaggtaacgatgaggatattcatattttggccttcggtgatcctcagattaaaggcatctggccaaagacgccatatgtgtcccgattagatacatacggtaatgactactatcttggtcacatctatgatatgatgcagcagagactgaagcctcaggtggtgactgttatgggtgatcttttctccagtcaatggatcggtgattccgaattccataatagaacgaaaagatatattagcaggattttcaaaagagacccaacttctattgaaaatatcaaacaacagaacctcgatgagaaaggtcaatataaggcgaattggcctgaatggggagaccgttttaatgaaattttagacaatgtcaaggaaaacgaggctgataatcaagaactttcttttgggtttggttatgaaaatatccactcatggaatccagacttggaagactttttaatcatcaacatcacaggtaatcatgatgtaggttactcaggcgacgcgacctatcaacatatgacaaggttccacgaccttttcggtaaggacaattattggattgaatacgaaaccaacactacccatccttggagaattgtagtgttgaatgatcttttactagaaggtcccgctttacaaccagaatttgttgaagctacttggatcttcttaaaccaactaaatgaacgtaaattcaatggtagtactgttttgttgacgcatgttccattttacaagcgtgaagggttatgcgttgatggcccagacactaggtattatccagatgcccatgccccagaatcatataaatctgggcttttgagatcccaaaatcatttgagtgaatccgtttcaaatcaagttttgaatatgatattcgaaaatgggaagccaggtatcatattaactggtcatgaccatgagggctgtgaaacagtttataataaaaaatctgcatctacttgggaagcgactaaaaatatcgaaagtgacgttttcgttaaagaaatcacagttaagtctatgatgggtgaatttaatgggaatactggattggttacaggacacttcaacacagattcaatgacttgggagtggactttcagtttatgcccattcgctattcaacatgtttggtggttcgctaaagtgtccctgctcgtcaccatattcacttggtcctcgctactatttgtctaa

SEQ ID NO: 77149 - DNA, 2511 bp, Saccharomyces pastorianus
atggctcatagaaaattacagcaggaggtcgatagggtctttaaaaaaattaacgaaggtttagaaatcttcaatagctattacgaaagacatgaatcatgcacaaacaatccttcccaaaaggacaagctagagtcggatttaaaaagagaagtcaaaaagctgcaaaggctaagggaacagataaaatcatggcaaagctcacccgatattaaagataaagattctcttctagattacagaaggtctgtagaaatagcgatggaaaagtataaggctgtagagaaggcgtccaaagaaaaagcatactctaatattagcctgaaaaaatcagagactttagacccgcaagaaagagaaaggagagatatatctgagtacctttcccaaatgatcgatgagctggaaaggcaatacgattccctacaagtggaaattgacaagcttttacttcttaataaaaagaagaaaacgtcatctacgacaaatgatgaaaaaaaggaacaatataagcgttttcaagcgaggtataggtggcatcaacagcagatggagttagccttgagattgttagccaatgaggaattggacccccaagatgttaaaaacgtgcaggacgatataaattacttcgtggagtcaaatcaggatccagatttcgtagaggatgaaactatttatgatggtttgaatttacagagtaacgaagccattgctcatgaggtggcccagtattttgcttcacaaaatgctgaagataacaacacaccggatgctaatgaatctctgcaggacatatcaaaactttctaaaaaggagcaaagaaaattggaaagagaagccaaaaaggctgctaagctggcggcaaaaaatgcaacaggtgcagctatacccgttgctggtccctcttctacgccgtcacctgtcattcccattgctgatgcttcaaaagaaacggaaagaagtccttcatcttcccctatccataatgcaacaaagcctgaagaggctgttaaaacttctataaagagtcccaggagcagtgctgataatttgcttccgtcattgcaaaaatcaccaagttcagctacaccagaaactccaacaaatgtacatacacatattcatcaaactccaaacggtattactggtgccactacattgaaacctgctactcttccagcaaaacctgctggtgaattaaaatgggccgttgctgcatcacaagcggtagaaaaggatagaaaagtcacttctgcatcgtccaccatatccaatacctcaacaaagactccaacaactgctgctgctactacaacatcatccaacgctaacagcaggattggtagtgcgttgaatacacctaagttctctacttcatctttgtctttacaacctgacaataccggcgcatcatcttcagcagcaacggccgctgctgttttggctgctggggcggctgctgtgcatcaaaacaatcaagccttctatagaaatatgagctcctcacatcatcctttagtttccttggcgacaaatccaaagtctgaacatgaagttgcaactacggtaaaccaaaatgggcctgagaacacaactaagaaggttatggagcagaaagaggaagagtcaccagaagaaagaaataaattgcaagtgccaacttttggagtattcgatgacgattttgaatcggatagggattcagagacggagccagaggaagaagaacaaccaagcacaccaaaatatttaagcttggaacaaagagaagccaagacaaatgaaatcaaaaaagaatttgtaagtgattttgaaactttacttctaccaagtggtgtgcaagaattcataatgagttctgaactctataatagtcaaattgaatcgaaaataacgtacaaaaggtctcgtgatatgtgtgaaatttccaggctggtcgaagtaccgcaaggagttaatccaccatctcccttggatgcattcagatctactcaacagtgggacgttatgcgttgttcgttgcgtgatattattataggctccgaaaggctgaaagaagattcatcgtcaatttatgccaaaattctagaaaatttcagaactttggaaatgttttcgttattttataactattattttgctattactcctttagaaagggagattgcatacaagattctaaatgagagggattggaaagtttcaaaggatggtacaatgtggtttttaagacaaggtgaggtcaagttttttaatgaaatttgcgaagttggtgattacaaaatttttaaactggacgattggacagtaattgataagattaacttcagactggattattcatttttgcagccaccggtagatacagcgtctgaggtccgtgatatgagtgttgacaataacaatgttaatgatcagagtaatgtaactttagaacaacaaaaacaagaaatttctcacggcaagcagctcttgaaacaattgaaacagggaaaaattagtgtatga

SEQ ID NO: 77150 - DNA, 1971 bp, Saccharomyces pastorianus
atgaacaatgtacacataattaaacctttatcacttccacagaggttttttagttgtattttccatcctctattactgatattctttacttctgttattttaactatttggggttccttttcagtcattgacattacaatggcaaaaatgtctcacgcacaggtcaaacgaaatgataccgtctcaacctttgcatctatttcaactgctacagcgacagccacaacaacggccacaacaacggccacaatgacagcagtcacaacacagcatgccatatattctgccaacagttactctttaaataaaacattcattgataatacaattgatcagtatttcgaaagcaaactacgaagtattgaatctacggtaggtacggatatgcaagaaaaattcaagtcatacacagacgacatattggataataaacaaaaacttatcaacgaccaaataagtttggaaactgaattgattaaggaagttcttgaggtaaacaatacaatttttaacgaactactcactaaatcacagctgataaatgacacatggaatgaaatatcagaagacgcaatgaccattgataaggattccatttcacaaatggcatcaaacctactgttaaattactgcatgtttgacagtatttttgggaactactcaaggaaattgaaatcattgcagaacttcaatggcactatcactgatttttctactcaattagatgcctctagtaccttaagtttaaattttctacgaaattccactgactggcttcagttgaaaaggaactttactgcaaacttacagaatgaaatttccattttatctggggggagtaccgaggttacatcgtctacttcaataattaaacggtctctgaaaacaaatagcgaggaaaacagtgtactaagtgcagtaaaaaatcacgttttccgtaaatgtaagagaatgacaataattttcacagtcatgtactttgcatttgtgattttgctcatggcaatcgaaagaattctgtttcagctggaaaatcagcaagtaaacctggttatgtcccaaattaatggcctgacaggacaaaccaattttactaaatacaacaaagttttgaaaagcttaattactactctgaatctcagtacactttatccaattccctaccaattaacaaagcttatcaatcaaaaaatatttaaaagagaaccagaaaaaatcgatgacaaaaaagtcaaaaaatcaaaactattttactgtaactggtggataatctcaaatggggctcatctgtggctgtttggttttttgatgttattaattcattggcagatagtgacgcgattaacaaactttgaagtacccagtttgcctacattccacaaaagagcgggaccttcgctatacaaaagggaagtttggacagatggaaatataacaactacgatagagggtttcattaatgacagcgtatcattattgtgtgaaaatttccaaatggaagtagatgaaaagttcattacagcagatttaagccttcaaactgaccccaatttgaaagtgcaatcaacggacatcctaaatctttgggttaacgacacaaacactcagtatgaaaaatatcttaatgagaattctcaaaattggcaggggataaacctgcaggttgagcctctgttaggcagcgattcaattaatgagttcctgggtcagtatttcctaccgacatacgaagttacgaatacaaattcttcatttgcactggacattcaaaaatatggtataattaatcgaggaattaatataaccaacgcatcggtagcggcattgtcttcactgtcaaaacgccaaataaaggataaggagcaaaaacaaacgtactttttacacactgtttataagtggggacttttagcagtttgcctgactatattgttccaccacatgcttatatttataatattaaagttgtaa

SEQ ID NO: 77151 - DNA, 1767 bp, Saccharomyces pastorianus
atgtttactggtcaggagtatcattccgtagactctaattccagcaagcaaaaagacaacaataaacgtggtattgatgacacatcaaagatcttgaataataagataccgcactctattagtgatacttctgccgccgccgccgccaccacttctactatgaacaattctgctttaagtagatctttagatcctactgacataaactataacacaaatatggctggtgtggttgaccagatacatgattatactacttctaatagaaattctttaaccccacaatattctattgcagctggaaacgtcaattcgcatgatcgggttgttaaacccagcgccaattcaaactatcagcaggctgcataccttcgacaacagcaacagcaggatcagcgacaacagtcaccctctatgaaaactgaagaggaatcccaactctacggtgatattctgatgaatcctggtgtcgtacaggatatgcatcagaatctggccactcatacaaatctgagtcaactgtcgtctacccgtaagtccgctccgaatgattctactacagccccgactaatgcgtccaacatcgccaatacggcttctgtgaacaagcagatgtatttcatgaacatgaatatgaataacaacccacatgctttgaacgatccatccatcctggaaacattatcgccattttttcaaccttttggtgttgatgtagcacatttacctatgacgaatccaccaattttccaaagttctttgcctggatgcgatgagccaattagaagaagaagaatatcaatctctaacggtcaaataagccagctaggcgaagatattgaaactttggaaaacctgcacaacacacagccgcccccgatgcccaattttcacaattataatggtctgagccaaactaggaatgtatcaaacaagccggtcttcaaccaagcagtgccggttagtagtattccacaatacaatgcaaaaaaagttattaatcccacgaaggactccgcattgggtgatcagagcgttatttactcgaaaagtcagcagcgaaattttgtaaacgcgccatcaaagaatactccagcggagagtataagtgatttggaaggcatgacgacgtttgcgccaactactggaggtgaaaataggggcaaatctgcacttagggaatctcactctaatcctagcttcacttcaaaatctcaaggatctcatttaaatttagcggcgaacacacagggaaatccaatccctggtactacggcatggaagaaagcaagattgttagaaagaaatcgaattgcagcttcgaaatgtagacaaaggaaaaaggttgcgcagctgcagctccaaaaggaatttaacgaaattaaagacgagaatagaattttactgaaaaagttaaattactatgaaaaactaatctctaaattcaagaaattctccaaaattcatttacgtgaacatgaaaaactaaataaagactcagataataatgttaatggcactaatagtagcaacaaaaatgaaagcatgactgtggattcattaaagatcattgaagaacttttaatgatcgattcagacgttacagaagtggataaagatactggtaagatcatagccatcaagcacgagccatactctcaacgtttcggaagcgatactgacgatgacgatatagatctcaagcccgtagaaggtggtaaggatccagacaaccaatcattacccaattctgaaaagataaaataa

SEQ ID NO: 77152 - DNA, 1119 bp, Saccharomyces pastorianus
atgaaatgcagggtatggtcagaggctcgtgtttatacgaatatcaataaacaaagaaccgaggaatattgggattatgaaaacactgtaattgattggtccacaaatacaaaggactatgaaattgaaaataaagttgggcgaggaaaatactccgaggttttccaaggtgtcaaattagactctaaagttaaaattgttattaagatgttgaaaccagttaaaaagaagaagatcaagagagaaatcaaaatcttaacggatttgtctaacgaaaaagtgcctccaacgactttgccatttcaaaaagatcaatattacacaaatcaaaaggaggacgttttaaaattcatcaggccctatatctttgatcagccacacaatggtcatgcaaacataattcatctatttgatataataaaggatcccatctcaaaaactccggctttggtcttcgaatacgtagataatgtggacttccgtattctttaccctaaattaaccgatctcgaaattaggttttatatgtttgagttattaaaggccttagactattgtcattcaatgggaataatgcatagagatgttaaacctcataacgtaatgattgatcataagaataaaaaattgcgattgatagattgggggcttgctgaattttatcatgttaatatggaatacaatgttcgtgttgcgtcgaggttttttaagggtcctgaactactagttgactacagaatgtatgattattctttagacttgtggtcgtttgggacaatgttggcttctatgatctttaaaagagagccatttttccatggaacgagtaacacagaccagcttgtcaagatcgtcaaagtacttggtacaagcgattttgagaaatacctgttgaagtatgaaattaccttaccgagagaattttacgatatggaccaatacatcagaaagccttggcatagattcatcaatgatggtaataaacatttaagcggcaacgatgaaattattgaccttattgacaatcttttgagatatgatcatcaagaaagattaactgctaaggaagcgatgggacacccgtggtttgccccaataagggaacaaattgaaaaataa

SEQ ID NO: 77153 - DNA, 864 bp, Saccharomyces pastorianus
atgtctgatgctcaattcgatgctgctttagatcttcttaggaggctaaatcctaccacgttacaggagaatctaaacaacttgatcgaattacaaccaaatttggcacaagatttactatcttcagtagacgttcccctatccacacagaaagattccgccgattcaaaccgggagtacttatgctgcgactataatcgtgatattgattcgttcagatcgccttggtcgaacacttattacccagaactatccccaaaggatctacaagacagcccctttccctcagcccctttaagaaaattggagatcttagccaatgactctttcgacgtttacagagatctctattatgaaggcggtatctccagcgtgtacctctgggacctcaatgaagaagatttcaatgggcacgattttgcaggggtagtgcttttcaaaaaaaaccaatcagatcacagtaattgggacagtatccatgtttttgaagttacaacatctccttcttctcccgacagtttcaactatagagtcaccactacaatcattctgcacttggacaaaacaaaaactgaccagaattctcatatgatgttatccgggaacctgacaagacagaccgaaaaggacatcgctattgatatgtcccgtccattagatgttattttcacatcacatgtcgctaatttgggttccttaattgaggacattgagtctcagatgagaaatctattggaaactgtttatttcgaaaagacaagagatatcttccaccaaacaaagaacgcagccattgcttcctctgctgaggaagcgaataaagacgcacaggcagaggtaatcagaggtttacagtctttatag

SEQ ID NO: 77154 - DNA, 1251 bp, Saccharomyces pastorianus
atggtatcttctttgcccaaggaatcgcaagccgaattgcaactgttccagaacgaaatcaacgccgctaatccgtccgactttcttcagttctccgccaactatttcaataaaaggctggaacaacagagagcgttcctcaaggccagggagcctgaatttaaggcaaagaacattgttctatttccggaaccagaggagtcattttccagacctcaatcagctcaatctcaatcaagatccagatcgagtgttatgttcaaatccccctttgtgaacgaggacccacactccaacgtgtttaaaagtgggtttaatttagacccgcacgaacaggacactcaccagcaagcacaggaagaacaacagcatactagagaaaagacatcaactcctccactcccaatgcacttcaacgcccaaaggcgtacttctgttagtggtgagaccttacaaccaaacaattttgacgattggactccagatcactataaggaaaagtccgagcagcaattgcaaagactggaaaaatcgatccgtaataactttctgttcaacaagctggattccgactcaaaaaggctggtcataaattgtctggaggagaagtccgtccccaaaggtgctacgataatcaagcaaggtgaccaaggggactacttctatgtcgtcgaaaagggtactgttgacttctacgtcaacgacaacaaggtcaactcttccgggccaggctccagtttcggggaacttgctcttatgtacaacagccctcgtgctgccaccgttgtagcaacctccgactgtttgttgtgggctctagacaggctcaccttcagaaaaatacttttgggcagctctttcaagaagagactcatgtatgacgatcttttgaagagcatgccagttttgaagagtttgactacgtacgaccgtgccaaacttgccgatgcactggataccaagatctaccagccgggtgaaacaatcattcgcgagggtgatcaaggggagaacttttatttaattgagtacggagctgtggacgtctctaagaagggccaaggtgtcataaataaactgaaagaccatgattatttcggtgaagtggccttgctaaacgatttgcccagacaggccactgtgactgctacaaagagaaccaaagttgccacattggggaaaagtggttttcaacgtttactgggtcctgcagtagacgtattaaagctcaatgatcctacaagacattaa

SEQ ID NO: 77155 - DNA, 357 bp, Saccharomyces pastorianus
atgaaacaagccatacgtgagaaagtaaaaaaaaaaaggaggagggaaaagaatacgagtggaaaatataaaggactttatatacttttcagattagccgccgacgattttacttactcagcttttttctatctttcaaaacgctcaaaagaggagcatacgacttcggcggctaatcttcacccaagaaaaaaaagcgcatgccaccacgacgagcggaaaaaaacaaaagcacccaatcaccactcttccttctttcttcatgttatacccgccacttttgttctgtctgataatatattgattatactgtgctcggattccgacctcttctttattgcagaagccataagctga

SEQ ID NO: 77156 - DNA, 3105 bp, Saccharomyces pastorianus
atgtctgccagaaaacgcaagtttaatagtctcaaaccgctagacaccttgaacagctctcgtgccagctctccaaggtcctctgcttctctaccgcccaaaagatataacacttttcgtaaggatccgaaaatcgttgatcatctaaacaatgcttctacaaaggatttcttaccagttttgagtatgaacagcgagagtaagaggcagatcgaattgtcggataatgatgttgataataatgatgaaggtgaaggcgtcaacagtggctgttcagatcaagattttgaacctttgcaaagctctcctttgaaaagacactcatcactcaaaagcacttccaatggtcttttgttccaaatgtctaataatctggggaatggttcaccggaaccggcagtagcgagcacttctccaaatggctcaattatttccactaaactaaatttgaacggccaattttcttgcgttgattcgaaaacattgcgaatttatcggcataaagcaccatgcataatgacttttgtctcagatcataatcatccgaaattttcattgtattttcaacaatcggtgatctacaattcacaagttaatctgcttgatgatgttgaattgataattttagataagaagaactcttttatggctataattttaaaagatctgaaaaaggtcaagatgatactagacgtgaataactcttcaatcaacattaacacgaacatcttgatatggtccactgcaagctccgcttcaaataaaaaaataaagtctattaaaagattcctgttgatgtcatattcttcgtcgataaaagtcgaaattttagatcataaagagcagattttggaaagactaaaacatctgattcatcctatttcttcgtcatcaccttcattgaacatggaaagggcaataaactccactaaaaatgcattcgactctttaagacttaaaaaaactaaactttctactaatgatgatgaaagtccgcaaattcatactcatttcttatcaaacaaacctcatggtttgcaatccttaacaaaaaggactcgtattgccagccttgggaaaaaagagcattcaatatctgttccaaaatcgaatatttcaccctcagatttctacaacactaacgggacagaaactttacaatcccacgcagtttcacaactaagacgttcaaatagatttaaagatgtttcggatccagcaaactcaaattcaaattcagaatttgatgatgcaactacggaatttgaaacaccagaactgtttaaacctagcctctgttacaaattcaacgatggttcaagctatactataacaaatcaagatttcaagtgtcttttcaataaggattgggttaatgatagcattttggatttttttacaaaattttacattgaatcatctattgaaaagtcaattatcaaaagagagcaagttcacttaatgtcctcttttttttacacgaaactaattagtaatccagcagattattattctaatgtaaaaaagtgggttaacaatactgatttgttttctaaaaagtacgttgttataccaattaacataagttatcattggtttagttgcattataacaaacttggatgcgatcttggattttcatcaaaacaaagataaaaacgatgccatcaactccgatgagatttctataaataatcctctggttaatattttgactttcgactcgttgaggcaaactcattcaagagaaattgatccaataaaagaatttctcatatcctatgcacttgataaatattcaattcaactggataaaacacaaatcaaaatgaaaacgtgtccagttccacaacaacctaatatgagcgattgtggtgttcatgttattttgaatattagaaaattttttgaaaatccggtggaaacaattgatgtatggaagaattctaagattaaaagtaagcacttcaccgcaaaaatgattaataaatattttgataaaaatgaaagaaatagtgcgagaaagaatttaaggcatactctaaaactcttacaactcaattacatcagctatctgaaaaaagaaaatttatatgaagaagttatgcaaatggaggagaaaaaaagcaccaatatcaacaataatgaaaattacgacgatgacgatgaagaaattcaaatcattgaaaatatagatcaaagcagtaaagataataacgcgcagttaacctcggaacctccctgctcacgatcatccagtatttcaacaacagaaagagagccgacagagttgcataattccgtagtacgacagcccaccggtgaaataataactgataatgaagatcccgttcgcgctgcttctccagaaacagcatccgtttctcctcccatacgtcacaatattttaaagagttcatctcctttcatatcagaaagtgcgaatgaaactgaacaagaagaatttacgtcaccatactttggaaggccgtctttaaagacgagggctaagcagtttgaaggcgtttcgtcaccaataaaaaacgatcaagccctgtcatccacccatgatattatgatgccgtcgcctaaacctaaaaggatttacccaagcaaaaaaatcccacaactttcctcgcatgttcaatctctatcgactgattctatggaacgccaatctagtcccaataataccaacattgtaatttcagatacagaacaagattcgaggttaggagtgaattctgaaagtaaaaatactagtggtattgttaacagggatgactcggacgtcaatttaattggtagttcactacctaatgtagcggaaaaaaatcatgacaacactcaggaaagtaatggtaataatgacagtcttggtaaaatacttcaaaatgttgacaaagaactgaacgaaaagttggttgatattgatgatgtggcatttagtagtccaactaggggtattccaagaaccagcgcgacaagcaagggatcaaatgcacaacttctctctaattatggagatgaaaataaccagtctcaagattctgtttgggatgagggcagagataatcctatactcttggaagatgaagacccttga

SEQ ID NO: 77157 - DNA, 399 bp, Saccharomyces pastorianus
atggacgatgcaaggttattcagacgcgttgtttgtatgccatttccaatgataatgttggttgcgttatatagaaatgtgttaggaagagattctacagttgattgcagctttgacgttatacttacaccttggataatggccagtatgttttccaaacgtatggtgaattggtctaatccacgtcaagctgttttaaaagtatgcagcgcagccgtgacctcccggatagttgccaattggttgtttacgatgaacatattatataccagtggtgaaaagggtttttactcgctagcaacagctgtggtaattaaaacggtcactgatgggtttacggtgatacgggttttctctattcacctgaacgagtcagtatatagcaagccattaccataa

SEQ ID NO: 77158 - DNA, 426 bp, Saccharomyces pastorianus
atgtcgtttgtttccaagcttctctatacagtctctgcattggtgttatttcattctggtttctcaagctatgagtttcatcacttattaaaacttaactcgcttaataatgcacaaggtgcaatcagcaagttacctaaagatatcatgtatgaaacgtatgcaggattgatactctttgttcttgcagtgttcacttcgttcgagaaattacaatatttaccaattgagagtaacgatgggaagataatatcccaaggaaactatctaaaagaaatcgcattaaataaagccaccaacgtggataacttgataggaagtaaccctaatggtgagatcatatttactccaagctttgttgacgttcatatgaagagaaaaatttgcagggaatgggcctctaacactgtaaaaaaagaaaaataa

SEQ ID NO: 77159 - DNA, 3453 bp, Saccharomyces pastorianus
atgactgctgtgcgtcgctcaactagaataaggactaaatctcaagttattgaggaagattacgatgacgagcaaaacaccagcgcacaacacgtagaatctgataagatcactgccaaaacgcaacgtgaagaagaagaagagcaagatactggtgaaagtgaagaaagtagtagtgaggatgactatgaagaccaggatgatgatgactacgtagataccgctacggcaaagagaaagtctagaaagagaaagcccaaatcagcatcaaataccagtagtaaaaggcagaagaaaaaacctacttctgcccagaagtcggcggtatctcatgcgcctgcttatcaccgctctaaaaaagatcaggatcaatacttagaaattgcgaaggatttccaacctacagaattgtttgatatattatccacttcagaagatgtttctattgaagaactattgcgagaatggttagaaacctattctgaaaatagagataaatttttacaagaatttatcaatttgctattgaattgttgtggctccgtcgctcgcgtcgaagaccacgacgttcacagcaatgaatcttctaacgaaacgattggtgaaattcagttgctatttcaaagacagaaactgcacgaattttacctcttgattagcaaggaaaacaaaaagagaaaaaactttaaaatgggtcccctttatcaaaatttcgcggaattcatgactaaattgttggaagtggcaaatgacttacaattactatacgtggaatcggacgaagatgatacccaaatagttactggtaaccttgtgttggatttgttgacttggctgtcttctttttcagtttgcaaaatcagatgcttcagatacatttctacgctaacgctatatcttttccaggactatttgacccaacaggctgttaatttagaaaagaattatttggcgaagttatccaagcagttatcactagaagagaagaaaaaaaggcccaataacaagactttagaaaagctagagagcactatcgccgaaactcaaggcagcaaagtcgttattgatagcattatcgataacatcgtcaaactatgttttgtgcataggtataaggacgtgtctgatttgattcgttcagaatccatgttgcatctatccatctggattaaaaactatcccgaatatttcctcaaggttacatttttaaaatattttggctggctgctgagcgataactctgtatcagtcagattacaagttacgaagattttaccgcatttaataatccaaaatcataacagtaaatccactgataattccgctatacgccaagtatttgaacgcttcaaaactaagatcctggaagtggcaatccgtgacgttaatcttgatgtaaggatccatagtatccaagttctaacggaggcgtcatcattgggctatttagatgattctgagattcttatcatttctagtttaatgttcgatgaagagttcgacccatttaaaacatcctcattcaataaaagatccaaatttctatccacggtggccaaattcttagcaagagtaataaaagagaaatttgacgaattcatcaagacgcatgaagacttgcccaaagaagtcgacgggttagaagttggacccgttgttcaagtcggtatatttatcaagattctgaatgactctttaatttatcacttgaaggattgcgctgaagttgattcaaggacaaagatccgtatgctaacacaagcagcagagtttttgtctccttacatttccactcacttgaaaactatttgcaatctgctgatctctgacactgaatcaaatgaactgatccaaaagttacaaaactcggccaataataacagcgatgacgatgatgttgacgatgaggaattggacatcactccattgtttcccattgacagaaatagcactattttatatctgaacgtattccacggtctgtgtgcaggtgccaacaaccccaaaatccaaactaaggacagcgttaaggaaatagttttgcctttattctacgatttgttgaatgccgcatccatcgaatctgctgatattctgtgtcctctcctagagagctttatcacattttctctggatgattggatatctattgggtatgaaactgaattaaaaaaaattaccgacaaaactattaaagcatttatggattctacaatcgggaattcaaaagttgacatgaagtacgatatatttgctaaattcattcaccatatccatcattttgaaaaaaaggaactgcaggaaaattttttaaaccagatagctacattgaaaattcatttaaaaaaatttctacaggaaaaaatggatccaaataattctagggacgactacaaagatttaacttgttctttgtacgagctctacatcaataaactgacaattcttggcagggattacccaatcgaggttgatgaagagttgttgcaactgtttttgaacaattttgtttcccgtatccctataatgtttcaagattttgatgatagtaccgctcaagaaataaactttaaaatgctagtgttattagccacatggaatctggaaaaatggagagaaataatagagaaagtaagggattacgagaattctatttcaaaagatcttagatcagtttggaaaccaattgccgctataataggtcgtctaaacacactcgttatttcattggcggctacaaacgaaacatttgaaaacataaacagcttgttttacttaaaatggtcagcttgcacttcattaatggatataatcgttgcaataaaaatatttgagctcaaattgcctgcagacgctacaacatggagatatagtatgagtgaacaatttccattttaccttcacgataatgcttccaaagtgcttttgaaaatatttttatatttggagagtcttttcgctaagcaagttgacgtccaattagaaagggtagcagatgaagacgccaacctaaatgatttgccggaaaccgggtttttcgagaatattgaaactgaattccttttattcacagttaaattgaagggactaatgaaactgaatattttagatgaacgatttgcttcccgtgtggcactaaacaaagaaaagcttggcccgctgttcaaaaaaatcgtagatgataccataatggaaaatccagaacctaataaaaagaacatacagaaagcaaaatcaaatcaaacacagagggaaaaagcgcctttacaacccaacagtgaacgagaaaccgaccatgcaaatactgaaaataatgatccagatattcccatgacaatcgatctagaacctattgaagaaagttcgcaaaataattcagagttagcaccaattgaggaacacccaaccgtggtagatgctatagacaacagcgacgaaatcacacaagattaa

SEQ ID NO: 77160 - DNA, 375 bp, Saccharomyces pastorianus
atgacaaatatatatatttcaattttctcttttctatctagctatggtttagatatacatatttttaatagatttattccttttcacttatatcacaaggtgagcatctcatttcgtggaataatcatcgctgttagccgccgaggtacacaggctccaacagacaacggcaaaagatctggcattattactacttatgtaaaagaagaagatcaatttaaaaaaggaaaaggaaggggtttgcgtattggtacattgcaagcaactaaacgtctaatcgactcatcctacgaagctctgtttttaagcatttattgtctatcctcatcaaagcaaagtttcctaacgaaaaaaaaagcagcctgctaccgatag

SEQ ID NO: 77161 - DNA, 570 bp, Saccharomyces pastorianus
atgtccaattttctacttgtgatccctgaagacgtgatcaagggctgctccaaggcagataaactagttgttataggagaattcgataactggagacattccgattatgttctgcagtatgacggcagcacacagaactacagggtgcaaattcccagaagaaagggccaacgtagcaccatgttcaaagtggtgataaacgacaaaaaatgggtcactctcaactacttcgacactgtcacagacaagtcaggttacaccaataatattctccactttaaggacaatgaggccagtcaactcatggatatacctctatcaccacatacacggtccaacaccgcaaaagggaaacctgaagacgactctttaaatgattatgtcaacttgtcgtcacatagtgacctaagcagcacagaggagatagtgtgctggaattctgatatggaggacgaaaacatggatgcaaccatccagtgtgatttccatcaggcgttcaatagcaggaaagagtctctaaatgggctaatgtgcattgccaagaaagtcaagacgtactggaacaaatag

SEQ ID NO: 77162 - DNA, 1041 bp, Saccharomyces pastorianus
atgaaggcgtcgcagatttgctcttatttgctaagcattgcacccctagtggtgtcccatggagtacatcataatcgagatcatggccacgaggcaaaccatgagtccaagcaaagtttcttgattttgaagcaagaatcaattttttactctctagtttgctttctgcagaaccacctctttgtcctgggaccccgttataacgcgattgtggctatcctaatcatacaacttatgccgtgtcttttcgtactgcttgttcctgggctgcgcaagaacgatcgtgccagcttgacactgtccttactagtttccttttctctaggaacactcctgggtgatattttattacacgtgatacctgaaagtctcagcggcgtaactgatgtcacaatggttggaggagccatatttctggggtttataagcttcttgactctggataaaacgatgcgtattctgtcagggacgtccaacgatgacggcagcatacattctcattctcatagtcatactccacaacaaactgcagagaagaaagcgggctttaacatgtctgcgtatctgaatgtcatatccggcattgctcatcacatcacggatggcatagcgctggctacgtcattctatagttccacacaagttggcataatgaccagcatagctgtcactttccatgagatccctcatgagctaggtgacttcgccattctgctttccagtgggtttacgttcccacaagcgataagagcccaagcggtgacagctttcggcgccgtcgttggaacgtccattggctgctggatgaacgaaatcgggaacaacagccataaagcaacgtcttcatccgcgaacgcatctgaacttatgctgccgttcacggcgggcggcctcatatacatagccactactagcgttgtaccgcagatcttacatagctccgcacccgatagcaagcttcgagagtttaagaagtgggccttgcagctagtcttcatttttgtaggatttgccattatggcgctcatggatgagcattga

SEQ ID NO: 77163 - DNA, 1296 bp, Saccharomyces pastorianus
atgcacagatccacttttatcaggacgtccggcacgagctctaggacactaaccgcaaggtacagatcgcagtacacaggattactcgttgcccgagtattattctccacctctacgacccgtgcgcaaggtggaaaccctcgatcaccactccagattttccgcgatacattcaagaaggaatgggagaagtctcaggaactgcaggagaacataaagacgctgcaagatgcttcgggaaagttaggcgagtctgaggcctacaaaaaggctagggaagcatatttgaaagctcagagaggctccacaattgtgggtaaaactctgaaaaagaccggtgagaccatggaacatatagccactaaggcctgggagtccgaactcggtaagaacacaagaaaggcggctgccgccacggcgaagaagctggatgagagttttgagccagtgagacagacgaagatttacaaggaagtctcagaagtcattgacgatggggagagttcccgatacggtgggtttatcacgaaagagcaaaggagacttaaacgtgagagagacctggcctctgggaaaagacacagggcagtaaagagcaatgaagatgcaggaacagcagtggttgcgacaaatatcgagtctaaagaatcgtttggtaagaaagtggaggattttaaggagaaaaccgtggttggccgttctatacaatctttaaagaacaaattgtgggatgaaagtgaaaaccccttaattgttgtcatgaggaaaataaccaacaaagtgggcggtttctttgcagaaacagaatcctcccgtgtttacagtcaatttaagctaatggacccaactttttcgaacgaaagcttcaccagacacttaagagaatacattgttcccgagattctcgaagcgtatgtgaaaggcgatgtcaaagttctcaaaaaatggttcagcgaggcgccattcaatgtttacgccgcccaacagaaaatcttcaaagaacaggatgtttacgccgatggccgtatcctagatatcaggggcgttgaaatagtgagtgcaaagttattggctccccaagacatcccagtcttggtggtcgggtgtagagcacaagaaatcaacctttacaggaaaaagaaaactggcgagattgcggctggtgacgaagctaatatcttgatgagctcttatgccatggttttcaccagagacccagagcaaatcgacgatgacgaaacagaagggtggaagatcttggagtttgtgcgcgggggttctagacaattcacctga

SEQ ID NO: 77164 - DNA, 339 bp, Saccharomyces pastorianus
  modified_base (79)..(119): a, c, g, t, unknown, or other
atgaaaagcaaggttagcccttcctttcattttttcattttcttttttcttttttgtttgcttcgtactttagattatnnnnnnnnnnnnnnnnnnnnnnnnnnnnnnnnnnnnnnnnnaaagctttttttctcttattattttcggttcgttcacttgttttttttcctctattacgcccacttgagaactaccaagcattatcataccctcctgatccagtattacccatttgagatgcattggagtaaggatcttgctcagcgcccgtcatcattacgtcttcgttacttcccggcatatttgaagcggtgttgttatcacccgatgcaaaattaa

SEQ ID NO: 77165 - DNA, 339 bp, Saccharomyces pastorianus; identical to SEQ ID NO: 77164
  modified_base (79)..(119): a, c, g, t, unknown, or other

SEQ ID NO: 77166 - DNA, 786 bp, Saccharomyces pastorianus
atgacgaagtttattggttgtatagacctgcataatggagaggttaaacagattgtaggtggaacgttaacgagcaaagaggaggacgttccaaaaactaactttgtatcacaacatccttcttcatattacgctaaactttacaaagacagagatgtccaaggatgtcatgttatcaagttgggacctaacaatgacgacgctgcacgcgaggcactccaagagtcaccacaatttctacaagtgggcggaggaattaatgatacgaactgtttggaatggttaaaatgggccagtaaagtaattgttacgagttggctatttacaaaagagggtcattttcaattaaaaaggttagaaagactgacagaactatgtgggaaagaccgcattgttgtagacttaagctgtagaaaaacccaggacggtcgttggattgtggccatgaacaaatggcaaactctaactgatcttgagcttaatgctgacactttcagagaattgaggaaatatacaaatgagtttctaattcacgctgcagacgttgaaggtttgtgtggtggtatcgatgaattattagtttctaagcttttcgaatggaccaaagattacgatgatttgaaaatcgtttatgctggtggggccaaaagtgttgatgatttgaaattagtagacgaactaagtcacgggaaagtagatttgacattcggtagttccttagatatatttggtggtaacctagttaagtttgaagactgctgtagatggaatgaaaagcaaggttag

SEQ ID NO: 77167 - DNA, 2766 bp, Saccharomyces pastorianus
atgacggtggcttattccctagagaatctcaaaaagattagtaattccctggtgggagaccagttggctaaggtagattactttttggctccaaagtgccagatttttcaatgtttgttgtccattgagcaaagtgacggtgtagagttaaaaaatgcgaaattagatctgctatatacccttttacatctagaaccgcaacaaagggatatagtaggcacatattactttgatattgtgtccgcaatctataggtccatgagtttggcaagcagttttactaaaaataattcttcgacaaactataagtacataaagcttctaaatttgtgtgcaggagtttatccaaattgcgggttcccagacttgcaatacctccagaacgggttcatccagttagtcaaccataaatttttgaggagcaaatgtaaaattgatgaggtggtcacgattattgaattattgaagttgtttttacttgtggacgagaaaaattgcagcgacttcaacaagagcaagtttatggaggaagagagagaagtgacagaaacttcacactaccaagattttaaaatggcagaatcccttgaacacataatagttaaaatatcatcgaagtacttggaccaaataagcctcaagtatatagtgaggctaaaagtatccaggccagcgtcaccatccagcgtcaagaacgatccgtttgacaataaaggggtcgactgcacccgtgccatacctaaaaaaatcaatatctcaaacatgtatgattctagtttactctcattggcactccttctatatctaagatatcattatatgataccgggtgataggaaactgcggaatgatgcgacgttcaagatgttcgttctgggtcttttgaagagtaatgacgttaacattaggtgcgtggccctgaagtttttgttacaaccgtactttacagaggataagaaatgggaagatacgcgtacactcgagaaaatactaccctatttagttaagtcatttaattatgacccgttgccttggtggtttgatccattcgatatgctggattcattgattgtgttgtataatgaaattactccaatgaataatcctgtgctcaccacgctagctcatacaaacgttatattttgcattctatcccgttttgcgcagtgtctttctctaccacaacacaatgaagctactttgaaaacaactacaaaattcattaaaatatgtgcgtcatttgcagcatcggacgaaaaataccgtcttttactgttgaatgacacattgttgttaaatcatttagaatacgggttggaatcccacattactttgatacaggattttatatctttgaaagatgagataaaggaaacaactacggaaagtcattctatgtgtttacccccaatatatgatcacgatttcgtggcagcttggttactattgttgaaatcattctcgagaagtgtttcagcgcttaggacgacgttgaagagaaataaaattgcacagctgcttttacagatactaagtaaaacatatacgttgaccaaggaatgctattttgctggacaagattttatgaaaccggaaattatgattatgggcattactctgggtagtatttgtaacttcgtggtggagttctctaatttacagtcatttatgctgagaaacggtataatcgatataattgaaaagatgttaacagatccattgtttaactcaaaaaaagcctgggacgataatgaagatgaaagaaggattgcattgcaaggcatacctgtgcatgaagtgaaggcaaactctttatgggtactaaggcatctaatgtacaattgccagaatgaagagaagtttcagcttttggccaaaatcccgatgaatttaattttggattttattaatgatccatgttgggcagtacaagcccaatgttttcagttgctcagaaatttgacttgtaattcaaggaaaattgtaaatattcttttggaaaaatttaaagatgtagaatacaagatcgatcctcaaacaggtaataaaattagcatcggctcaacgtatcttttcgaatttcttgcaaagaagatgaggcttttaaatccattagacactcaacaaaagaaagcaatggaaggcatcctatatattatcgtgaatctagcggcagtcaatgagaataaaaagcagctagtcatcgaacaagacgaaatattgaacattatgagtgaaatattggtagaaacaacgactgatagttcaagttatggtaatgacagcaatctgaaattggcatgcctctgggtactcaataacttactttggaattcatcagtttcacattatacccaatatgcaattgaaaatggtctggaaccagggcattcaccaagtgattcagaaaaccctcaatctacggtgacaatcgggtataatgaatcagtggctggtggatattctagggggaaatactacgatgagccagatggcgatgatagcagtagcaatgcgaatgatgatgaagatgacgataatgatgagggtgatgatgaaggcgatgagttcgtccgcacccccgctgcaaaaggtagcacatcaaatgtacaagtaacacgtgccacggtggaaagatgtagaaaactcgtggaggtaggattatacgatctggttaaaaaaaatattacagacgaatcattatctgtcagagaaaaggccagaacgttactatatcacatggacctgcttttgaaagttaaatga

SEQ ID NO: 77168 - DNA, 315 bp, Saccharomyces pastorianus
atggacattgacatgaactatcccagtataactactttgatgagtaatgaatcagcaaacttattgattatttgggagaatgccacgcctgatattagctatctatcttatacaactaacccaatgttaggtgactatgttttaaatgtgtccgctataaatggctgcacggaggaattaatagcaactcatctagtgccaactttggagaatgcaacccagtgggtttatgatgcgggggagtactgggacaattattcctttactgatgaaagtacccctctgccaggactttcctggccatttaatgaataa

SEQ ID NO: 77169 - DNA, 1893 bp, Saccharomyces pastorianus
atgcttaaatcattaaaatccagaagactaatcttaaaacgattagtaacacggctgctctctttattcttttcttatctcattttctctgcgagtcggaatgttacatcatccaataaattaaacaaccatgcaagcgagaggacggctgttgaatcatctgcattcaattggattgaaaaacgacaacaccaagtgagatccgaaaacttaatgaacagattatctgcctactttttgccctttttgagtagaagttctcacaaagaacgtgtattgttgaggcaattaggaaataatgaaatagctaagagtgacaagtgccgttacatttttgaagtactatacaagattgatcccgactgggacaatgcgcaaactgcaaaattttataatgttgatggtgtagataacacgttggcctcattgttaggggagagattaagatcttatgattattgctttttatctggtcaattagatcctactgcaatatttgcaaattcaaccgtaaatcctcatgatttgcaaaacagaatgtttccatttctgaagaaaattaacgaagaatccaaaactgtaatgcggcctattatcacagacatgacaactggagaggcagttccggcacccgaggttgatatggaatcatcaaactttaatggtaacttttggtccaactggaataggttgagcaaaggaagaggttttgttttaactattgctgaaaaggatgttcctttatttttgaaacagttgaaagtgatggaatcttcaaaaaacgaattaccattccaaatagtatccacgggaaatgaactatcagcagagtctattgctaaaatttctgagaccgctaaagaaacggaacaaagggtctacttagtagactgctcgacagtgcttgacactaattttgctaatacatacatttctttttttcagaataaatgggtcgccactttgttcaacacatttgaagaatacattttgttggatgcagacgtagtaccgtttgtagggtctgattactttttcgactctccttcttacagggagagagggatacttttgttcaaggatagggttatggaaaacgagcaaactttccaatactgcatcgaaatgttaaatgaagtggaaccctctgcacaagaacgcagatttattggaagtaggttagtttttgattcgtcattaccgttttcttccgaaacttcagaagaagcatctgtgtattacaattttttcaaaaaattacgactccatcatgttgatagtggtttggttgtagtcaataaacttgagaaattaaatggattgttgatgtcttttatgttaaatttggatggaaaattgcagaggtgtgtgtatggtgacaaggaaatattctggttggggcaattatatgctggccaggattattctatcaatcccgttgatggcagtattattggacctgttaatgaagagcctgaaaatgatgacggacataaaagcgggatgtactacatttgttctacgcagattgcacacagtgactccaaaaatcgattactatgggtaaacggtggactgaagacttgtaaaatttcgaacagtgctgaagatgactttggaagagagccagagtattttaagagtagatatggggacatttcaaaattaaaaaggatatatgatgcttcgttgaacgtagagggactaatcgttcctgacgtttctgttcatccatggatgcaaatcaaggaatgttctaattatatgtattgtgcatatgctacgggtgacggacacacaaactctgaacttgacgaaggtcgtctaatcacgtttactgaaaaggaattacgatatatcaatgatatttctcgaacctggaatgctaattga

SEQ ID NO: 77170 - DNA, 4236 bp, Saccharomyces pastorianus
atgtctctttccaaatattttaatccaattcctgacgcttcagtcacctttgatggggctaccgttcaattggaagaatccctcggtgctgttcagaacgatgaagagtccgcatcggaattcaaaaacgtaggccatttagaaattagtgatatcacttttcgtgctaatgaaggtgaagtcgtcttagtactgggaaacccaacatcagcgctcttcaaaggtctattccatggtcacaagcatctgaaatactcgcctgaagggtccattagattcaaagacaatgagtacaaacagtttgcttccaaatgcccccatcagatcatttataataacgaacaagatattcacttcccgtatctgacggtggagcaaaccattgattttgcgttgagttgtaagtttcacattcccaagcaagagcgtattgaaatgagagacgagttattaaaagagttcggactgtcgcacgtaaagaagacgtatgtgggtaatgactacgttcgtggtgtctctggaggtgaaaggaaacgtatctccattatagaaacgtttattgccaatgggtctgtttacttatgggacaactcgacgaagggtttggactctgccaccgccctagaatttctttccattacccaaaagatggcaaaagctacaagatcggtgaattttgttaaaatttctcaagcaagcgacaaaattgtcagcaagtttgacaagattcttatgttaggtgattccttccaggtgttttacggaaccatggaggagtgtttaacccattttcatgacaccttacagataaaaaaaaaccctaacgattgtattattgaatatttaacatcaatcttaaattttaagttcaaggaaacgtctaattccattgttggtcttgacactccatctgttgtttctgaagaaaatcaagctttaaacatcaataatgaaacagatttgcatacattatggattcagtctccatactataaacactggaaggccatcacttcaaaaacagtgcaagaatgcaccagaaaagatgttaatccggacgatatctcccccatttttagtattccgctaaagacgcaactgaaaacgtgcactgtaagagctttcgaaagaatcattggtgacagaaactacttgatttctcaatttgtttctgttgtggtgcagtctttggttattgggtcccttttttataacattcccctgacaacaattggttcgttttctagaggatctttaactttcttttccatcctattctttacatttctttctctcgccgacatgcctgcttcctttcaaaggcaacccgtcgttcgtaaacatgtccagctccatttttattataattgggtggaaactttagcaacaaattttttcgactgctgctctaaatttatactggtggttatttttacaatcatactttactttttggcccatttacagtacaatgcagctaggtttttcatctttttgcttttcctttccgtctataatttttgcatggtgtcactatttgcattaactgctttgatcgctccaactctatcaatggcaaacctattggccggtatcttactgttagccattgccatgtacgcgtcctatgttatttatatgaaagatatgcatccatggttcatatggattgcatatttgaatcctgctatgtttgccatggaagccattttgagtaacgaattgtttaacctgaaactagactgtcatgaaagtattattcccagaggtgaatattatgacaatatttcattcagtcataaagcttgtgcctggcaaggcgctaccctaggtaacgattacgtcagaggccgtgattatttaaaaagtggattgaaatacacttaccatcacgtgtggagaaatttcggtattatcattgggtttctgtgtttcttcctattttgctctttactagcagcggaatatatcacgcctctgtttactagagaaaatttattgcgctggaataactatctcaaaagatactgtccctttctgaatagccaaaaaaagaataataaaagcgctattaccaacaatgatggcgtatgtactcccaagaccccgatagccaatttttccacttcatcctcttctgttccatcagtctcgcatcaatacgatactgattacaatattaaacatccagatgaaactgttaacaatcatactaaggaatccgtagctatggaaacgcaaaagcacgtcatctcctggaaaaatatcaattataccattggagacaaaaaattgatcaacgacgcttctggatatataagttccggattaactgccctaatgggtgaatctggtgctggtaagacaactttgttgaatgtcttgtctcaaaggaccgaaagcggggttgttaccggtgaattattaatcgatggacagcccttaacgaatattgatgcattcagaagaagtatagggttcgttcaacagcaagatgttcatttagagctcttaactgtgagagagtctttggaaatttcctgcgtcctaagaggtgatggggatagagactatttaggagttgttagcaacctattaagattgccttcggaaaaactggttgctgatttatctccaactcaaagaaaattattatctattggtgttgaattggtcactaagccttctctgttgttattcctagatgaacctacttcagggctagacgccgaagcagctttaaccatcgtgcaatttctgaaaaagctttcgatgcaaggtcaggctatcttatgcactattcatcagcctagcaaaagtgtcatcagctattttgataacatttatttactaaaaagaggtggtgagtgtgtctattttggttcattacctaatgcctgtgactattttgtagctcacgatagacgcctaacatttgacagagaaatggataatccggctgatttcgttattgacgttgttggtagcggaagtacaaatattccaatggatgatgcagagaagccaacctcaagcaaaattgatgagccagtatcttaccataagcaatctgattcaattaactgggcagaactctggcaatcctctccagaaaaagtgcgggttgctgatgatttgcttttattagaagaagaagcccggaaatctggtgttgatttcactacgtccgtatggagtccgccttcgtatatggaacaaataaagttaatcacaaagagacagtacatttgtaccaagagagacatgacctatgttttcgctaaatatgctttgaatgctggcgctggactattcattggattttcattttggaggacaaagcataatatcaacggtctgcaagatgctattttcttgtgcttcatgatgctttgtgtttcctcccctttgatcaatcaggttcaagataaggctttgcaatctaaagaagtatatatcgccagggaagcgagatctaatacttatcattggaccgttcttttgattgctcaaactattgttgaattaccattagccatttccagttctaccttatttttcctgtgttgctacttctgttgcggtttcgaaacctctgcccgtgtagctggtgtcttttacttgaattatattttattttccatgtattatttgtcatttgggttgtggcttctatattctgcccccgatttacaaactgccgctgtctttgttgccttcctctatagtttcacagcttcattctgtggcgttatgcaaccatactcgttattcccaagattttggacattcatgtacagggtttcaccatacacgtatttcattgaaactttcgtaagcttacttctccatgacagggaagtaaactgctcgacaagtgaaatggtaccaagccaacctgtaatgggtcaaacctgcggtcagtttatgaaaccctttattgatgaatttggtgggaaactgcacatcaataacacatacaccgtctgcgcctactgcatgtacactgttggggatgacttccttgctcaagaaaatatgagttatcatcacagatggagaaattttggttttgaatgggttttcgtttgctttaacattgccgccatgtttgtgggcttctacctaacctacatcaaaaaaatttggccttctgtgattgatggtataaagaagtgtatcccatcaatgaggcggtccaaaacatctcataatccaaacgaacaaagcgtataa

SEQ ID NO: 77171 - DNA, 795 bp, Saccharomyces pastorianus
atgtcttttactaaaatcgctgccttattagctgttgccgctgcctccactcaattggtttctgctgaagttgggcaatatgaaatcgtcgaatttgacgctattttggctgatgtcaaggccaatttggaacaatatatgtccttggcaatgaataatccagactttaccctaccatctggtgttttggatgtttaccaacatatgaccactgccactgatgattcctacaccagttatttcaccgaaatggactttgctcaaatcaccactgccatggttcaagtgccttggtactcttctagactggaacctgaaatcatcgctgctttacaaagcgcgggtatcagtgttacctccttaggtcaatccgtttccgaatctggttccgaatctgccactgcttcctcagctgcttcttcttctgcttctgaatcctcttcagctgcttcttcttctgcttcagaatcttcttctgctgcctcctcttctgcttctgaagctgctaagtcttctagctctgccaagtcttctggctctgccaagtcttctagctctgccaagtcttctggctcttctgctgcttcatctgctgcttcatctgctgcttcatctgcttcttccaaggcctcttctgcagcttcctcttctgcaaaggcctcctcttctgcagaaaaatctactaatagctcctcctctgctacctccaagaacgctggtgcagctatggacatgggcttcttctccgctggtgttggtgccgctattgccggtgccgctgctatgctcttatga

SEQ ID NO: 77172 - DNA, 648 bp, Saccharomyces pastorianus
atgggtgaagcactacgtagatcaaccaggattgcaacatccaaaagaatgttggaagaggaagagtccaaactggcccctatttcgacaccggaagtgcctaagaaaaaaatcaagacaggtcctaaacataacgctaaacaagcagtagttaaagaggcaaataggtcatctgatgttaacgaattagagataggcgatcctattcctgatttgagtcttttaaatgaagataatgactctatctccttgaagaaaatcaccgaaaataacagagttgtggtgttttttgtgtatcccagggcaagcacgcctggttgtactagacaggcctgtggatttcgtgacaattaccaggaactcaagaaatatgctgctgtctttggactgagtgcagattctgtgacatcccagaaaaagtttcagagtaaacaaaatttgccatatcatttactaagcgattcaaagagagagtttattgggttgctaggagctaaaaaaacgccactttctggttctattagatcgcatttcatttttgttgatgggaagttaaaattcaaaagagttaagatatcaccagaagttagtgtaaatgacgccaaaaaggaggttttagaagtcgctgaaaagtttaaagaagaatga

SEQ ID NO: 77173 - DNA, 2085 bp, Saccharomyces pastorianus
atgtccgaacaacactctgtcgcagtcggtaaagctgctgatgagcacgagactgcccctaggagaaatgttagagtcaagaagcggcccttaattagaccattgaactcgtcagcatctacgctgtatgaatttgccctagagtgtttcaacaagggcggaaaacgagatggtatggcttggagagatgtcatcgagattcatgagacaaagaaaaccattgtgagaaaggtagacggcaaggataaatccatagaaaagacatggctgtattatgaaatgtcaccatataaaatgatgacctaccaggaactgatctgggtgatgcacgatatgggccgtgggctggcaaaaataggcatcaagcccaatggagaacacaaattccacatcttcgcatctacttcccataaatggatgaagattttccttggttgcatatcccagggtatccccgtagtaaccgcgtatgatactttgggtgagagcggtttgattcactccatggttgaaaccgagtctgctgctattttcactgataatcaattattggctaaaatgatagtgcctttgcaatctgctaaagatatcaaatttcttatccataacgaacctatcgaccccaatgacagaagacaaaacggcaaactttacaaggctgctaaggatgccattaataagatcagagaagttaggccagacataaaaatttatagttttgaagaagttgtcaagataggtaaaaaaagtaaagatgaggtcaaacttcatccacctgagccaaaagatttggcttgtatcatgtacacctcaggctcgatcagtgcaccaaaaggtgtagtattgactcattataatattgtttcgggtatcgctggtgtaggtcacaacgtctttggatggatcggctctacagaccgtgttttgtcgttcttgccattggctcatatttttgaactggtctttgaattcgaagccttttactggaacggtattcttggatacggtagtgttaagactttgactaatacttcgactcgtaattgtaagggtgacctggttgagtttaagcctactattatgatcggtgtggctgccgtttgggaaactgtgagaaaagctattttggaaaagatcagcgatttaactcccgtactccaaaagattttttggtctgcctatagtatgaaagaaaagagtgtaccatgcaccgggtttttaagtcgtatggtcttcaagaaagtcagacaagccaccggtggtcatcttaagtatattatgaacggtgggtctgcgatcagtattgatgctcagaaattcttttccatcgtcctgtgtcccatgattatcggttacggccttactgaaacagttgcgaatgcttgtgttttggagcctgatcatttcgaatatggtatagttggagatcttgttggatcggtcactgccaaattggtggatgttaaggatctaggttattatgcaaaaaacaatcaaggtgaattgcttctaaagggtgcgccggtctgttctgaatattataagaatccaatagaaacggcggtctctttcacttacgatggctggtttcgtactggtgatattgttgaatggactcccaagggacaacttaaaattattgatagaagaaagaatttggttaaaaccctaaatggtgaatatattgcattagaaaagttagaatctgtttacaggtcaaactcctatgtgaaaaatatctgtgtttatgccgatgaaagtagggttaaaccggtgggtattgtggtacccaacccaggacccctatctaaatttgctgtcaaattgcgtattatgaaaaagggtgaagacatcgaaaactatatccatgacaaagcattacgaaatgctgttttcaaagagatgatcgcaacagccaaatctcaaggtttggttggtattgaactattatgtggcactgttttctttgatgaagaatggacacctgaaaatggcttagtcacatctgctcaaaaattaaagagaagagaaatcttagccgctgttaaatcagaagtcgaaagggtttacaaagaaaattcttag

SEQ ID NO: 77174 - DNA, 300 bp, Saccharomyces pastorianus
atggtaaacgtgaaagtggagtttctaggtggacttgatgctatttttggaaaacaaagagtacataaaattaagatggacaaagaagatcctgtcacagtgggcgatttgattgaccacattgtatctactatgatcaataaccctaatgacgttagtatcttcatcgaagatgattctataagacccggtatcatcacattaatcaacgacaccgattgggagctcgaaggcgaaaaagactacatattggaagacggtgacatcatctcttttacttcaacattacatggtggttaa

SEQ ID NO: 77175 - DNA, 663 bp, Saccharomyces pastorianus
atggaggaagaagaattaagtaaattgttggccaatgttaagatagatccgagcctaacatcaagaattagtcaaatagacagcttcaaactgtcggaattgatggttctaaagacagatattgagacacaactagaggcgtatttcagtgtgcttgagcagcaaggcatcggcatggactctgcgttggtgacgccagacgggtatcctcgttcggatgtcgatgtattgcaagtcactatgatcagaaagaatgttaatatgctgaagaatgatttaaatcaccttttgcaaagatcacacgtcttactaaaccagcactttgataatatgaacgttaagtcaaaccaagatgcaagaaggaataacgacgatcaagctattcagtataccatcccttttgcatttatcagtgaggtagtacccggtagcccttcagataaagcagacataaaggttgatgataagctgatttctattggcagtgtgcatgcggcaaaccactctaaacttcaaaacattcagatggttgtaatgaaaaatgaagacaggccacttcccgtccttctcttgagagaagggcaaatcctaaagacatcgctaacaccttcgagaaactggaatggtagaggtcttttgggttgtaggatacaagagctataa

SEQ ID NO: 77176 - DNA, 1122 bp, Saccharomyces pastorianus
atgacacagactgataatcctgtccccaactgtggtttactgcccgagcagcagtattgctctgcagaccatgaagagccactgttgttgcatgaagaacaattgatattccctgatcattcctcccaactgtcctcagcagatatcatcgagcccatcaagatgaacagcagtactgagtcaattatagggacgacgctgcgaaagaaatgggtaccactatcctcaacgcagatcacagctctttccggcgcatttgctggattcttatcaggtgtggcagtatgtcccctcgatgttgccaaaacgcgattgcaagcacaaggactacaaactaggttcgagaacccctactatagggggataatggggacattaagtactatagtaagagacgaaggcccgcggggcctctacaaagggctggtaccgattgtcctgggctacttcccaacctggatgatatacttctccgtgtatgaatttagcaaaaaattctttcacggcatcttcccacagtttgattttgttgctcagtcatgtgctgcaatcacggcaggcgctgcatctaccaccttgaccaacccaatctgggttgtgaagacaagacttatgctgcaatcaaaccttggtgagcaccccacacattacaaaggcactttcgatgcattcagaaagatattttatcaggaagggtttaaagcattatatgcggggctggtcccctcattattagggctatttcatgtggctatccatttccctatatacgaagatttgaaggtaagatttcactgctattctcgggagaacaacaccaactccatcaacttgcaacggttgatcatggcatcgtccgtctctaagatgattgcatcagcagtaacatatccgcacgaaattttacgaaccagaatgcaactgaaatcagatataccagattccattcaacgacgtctgttccccctcattaaagcaacttatgcacaagagggactaaagggattttattctggatttactactaacctagtacgaaccattccggcctcggcaatcactctagtgtcctttgagtatttcagaaaccgcctagaaaatattagcactatggtaatttaa

SEQ ID NO: 77177 - DNA, 882 bp, Saccharomyces pastorianus
atggaggaacaggagataggcgttcctgcggcctctttggcaggaataaaacatatcatattgatcctttccggaaaaggtggtgtcggtaaaagttcggtaacgacacagactgcgctgactctttgcagtatgggcttcaaagttggagttttagatattgatttaacagggccatccttaccgaggatgtttggcctagagaacgaatctatatatcaaggtcctgaaggttggcaacctgtgaaagtggagacaaactctactggctctcttagtgtaatatcattggggtttctactaggtgatagagggaacagcgtgatatggaggggtcctaagaagacttctatgataaaacaattcatctctgacgtcgcctggggtgaactggattacttactgatcgatacccctccgggaacgtcggatgaacatatatcgattgcagaggagctgagatattccaaaccagatggtggtattgtagtaactaccccacagagtgttgcaacagctgatgtcaaaaaagaaatcaatttctgcaagaaggtcgatttaaagatcctcggtataattgaaaacatgtcagggtttgtatgcccgcattgtgctgagtgtacaaatatcttttccagtgggggtggtaaaagattatcggagcaattttctgtcccataccttggtaacgttcctatagatccaaaatttgtagaaatgattgagaatcaagtttcaagtaaaaaaacgcttgtagaaatgtacagagaatcatctctttgtcccatttttgaagaaataatgaagaaactgaggaaacaagacactacaacccctgttgtggataaacacgagcaaccccagatagaatctccaaaataa

SEQ ID NO: 77178 - DNA, 210 bp, Saccharomyces pastorianus
atgactcgtgatacacccgaagatgtcagtactgcaggcgcaaaggatattttagatgttttgaacctactaaaaggaggagaagagaaaatctcggaagtcgaacttaagttggatgaaatggaaaagaaaatggactctctgttagttcagttagaagatctacacagggacaacaatgatttggcaaaaagttccagccaaaaatag

SEQ ID NO: 77179 - DNA, 2841 bp, Saccharomyces pastorianus
atgagactcttcatcggtagaagatcacggtcgattgtaatatcttccaacaactactgtttatccttccagcgtttgcgcagcataccaggtgccagttctcagcagcgtcaattaagtaaaactcctagcgtaacaatcaagtcctaccctgacacagatctttcaagtgatagtaactatctcgaagtcaaaagttgcatatttaatggattattagggctcgtttgtcttaatggtgatatatatgttgccgtcatatctggtgttcagaatgttgggtttcctcgatggaaactgatagatcatcaagttaggccttcggagagcatttataaagtattggatgttgacttttacagcttagaaaatgatgttttcgactacctcctctgcgagagatcagagcaaaactatgataaattgattcatgagcatccttgcggccccctgaaaaaactgtttagtgatggaacattctactattctagagatttcgacatctctaatatcgtgaaaaaccatggtttatcacataacttagaatataccgtagataatcaagatttatcatttatttggaatgctaacttagcaagtgaggtaatcaactggagaagcaagatttcaaatgaggagaaacaactttttgccaacgcagggttcttaacatttgtaattcggggttattgcaagacagcattaatagaagacggcccaaatacagcctctataaccattatttccagaatttcgactgagagcaagcaggatacgctagaattggagggtattagtgaagatgggagagtgtcgctatttgttgagacagaaattgtagtaaccacagaaaagtttattttttcttatactcaagtgaacggaagcattcctcttttttgggaatctgtagaaagtcaactgttgtatggaaaaaaaattaaggtaacaaaagattctattgaagctcagggagcttttgacaggcattttgataatttaacctcaaagtatggtgttgtgagtatcgttaatatcataaaacctaaaagcgaatcacaagaaaagttagcactgacgtacaaggattgtgctgaatcaaagggaataaaaataacaaatatagaatacagctcaagcgttctgacaaagtctccccacaaattactttatttattaaaacaggatatttacgagtttggagcgtttgcctatgatatctctaggggcatctactttgcaaaacaaacgggggtattaagaataagcgcatttgattcaattgaaaaacctaacacagttgaaaggttagtgagcaaggaggtacttgaattaaccacaaatgaaattgatgtatttgaattgacttccccattcttggacgcacatgataagctatggtcagaaaactattactggcttgatcgaacgtatactaagcacacgaagaattctggtaaatatacaaaggtttattcgaagttatttggttcccgagttagattatacgacccgctccatatctacatctctcagtatttaaagcaattaaggtcaaaatatacgtttgagaaagacatctcaatttttgcaggtacatttaatataagtggtaaaattccaaaagatgatataaaagattggatatttccaaaatcaatgtccaaggaggatgaaatggctgatctttatgttatcggattagaagaagtggtagaacttaccccaggtcatatgcttgctaccgatccatatgtccgacaattttgggagaagaagatattaacactattaaatgggcccggacgcaaaaaaaaatatatccgtttatggagtacacagttgggtggtattttactattattattcatgaatgaaacggaatattccaaggtaaagcatattgagggggatgttaaaaaaaccgggtttggaggaatggcttctaataaaggagctgtcgcggttagttttaaatactcagctacaagattttgcgtactagtatctcatttagcggcaggcttagaaaatgttgaacaaaggcataatgattataagacgattgcgaaaagcatacgattttctaaaggattacgaataaaggatcacgatgcaattatttggatgggcgatttcaattacagaatattgatgtcaaacgaagatgttagacgaaaaattgtttctaaagaatatgccagtctatttgaaaaggatcaacttaatcaacaaatgatcgcaggtgagtcttttccatatttccatgaaatggcgattgatttcccacctacctataaattcgacccaggaactaaaaactacgacacgagcgaaaaaatgagaataccagcatggactgataggattttaagtaggggagaagtactagaacagttagaatataaatgctgtgaagatatactattttccgatcatcggcccgtatatgccatatttagggctagagtgactgtagtggatgaacaaaaaaagactactttgggtacgcaaatctacgagaagattatggaaaggctagagggattggatgatgatgagaaaattgcagttttgagtgatgatgcatttgttatcgaaagttttgagggcagtgattcgatagctggccctacgcattctccgacaccaattcccgagcccaaaagaggtagaaagttaccaccacctagttcggatttaaaaaaatggtggattggaagtgggaagcaagttaaagtagttcttgacgtagacccggccgtttacatgattaatcctaaaagagatcccaatccattcgttgagaacgaagatgagccactttttatagaaaggtaa

SEQ ID NO: 77180 - DNA, 1542 bp, Saccharomyces pastorianus
atggcagataaattaatggacaaaaattttgaagaactgtgctattcatgccgcactggtgatatggacaatgttgatagattgatttccacgggagtaaatgtgaatagtgttgacaagtttgacaattcgccactttttctggctagcctttgcgggcatgaagcagtcgtgaaacttcttctacagagaggagccgtctgtgatagagacagatatgaaggagctcgatgtatttatggagcattgaccgatactatcagagatacccttttaagttatgatatatccaaggctgtagatgtcaagcaaccctttgctactcatatctcatcgatgtataatgacgaaggcttccttaaaagagatatcacattcagagtttcgaatggaaaactgttcacagcgcataagttcttattatgtgcaaggagcgaaattctagcagaaaaaatggtgaatgagtgggcaaagcatgaaattgtttctcttgaagtgcgcccagatatatttgacatatttttgaaatttctttacttaattccgatcctgcaccaaattgaaccgggacaatatgaagaacttatagagctatctagtaaatttgatattgagttattgcccgaatttttagacaaagcaaggcataccgccgatcctacggaaaagtcgaggttaatgtcagattaccaatataagtttaccgaggttgcaagaagtcaacttttaatatttgtgaacaattgtatctttagatctactgttgatcttgctaatagtgaacgacgagttttttccttgatgaactgtccagcttatccggatgttcaacttatggtaaaaaaccgaaatggagccattcgaatatacccttgtcacctggctgttttgaaccgcgcagaatatttcaaggtgatgttcacaaacgacttcaaggagaaagttacatatatcaaagccaagcacgttacaggaaagtataatcgtatcattccacagctgacactacccaattgtgagtttgaggttgccgaaattattctccgctacttatatgcagataatacagatattccttggatgtatgccgtcgatgttttgttacttgccgatatacttttagaagaccgcttaaaaactatcgcttctacaattataacacaatcaaaagagtttattcagcaatataatgtttttgacgtactctatttatcatgggaaataggagtggaacgcttagaacaatttgcagctaaatttatagctatacatttgcaagagttatataaagatccagagattaaaagggcaattatgttgagttcacaacgaatttctctccgccaggaaactgatactattgaactagtggatgacattaggtactatttgctccgaaaatattcttttgaaccggatgatgtggagctgttcgaaaaccaagacgatttagaatacctaaaacaagtagggtatttggagtacagaaaagatatgggtatgttagataatatcctagctgatctggaacttgatgtataa

SEQ ID NO: 77181 - DNA, 753 bp, Saccharomyces pastorianus
atgtcccaggaagagaaagtggatgctaaggcaaccttaaagactgaaatttcgaacaataaaaagaacgacaagcaagagctcgagctggatgaacttgtgggtaaactatctatcgagggcactccacaggtgtcgcaaaagctaagcaaggaggaaaaacacgctcatcaacttgaagctgactcgcgttctatctttgtcggtaacatcactccggatgtcaccccagagcaaatagaagaccatttcaaagactgtggccagataaaaagaataacacttctttatgataggaatacgggaacaccaaaaggctacggctatattgaatttgaaagtccggcatacagagaaaaagccctgcaattaaatggaggagaacttaaaggcaaaaaaattgctgtctccagaaaaagaactaacattccaggatttaataggcattacaactcgcaaaaccagtatttccaacaatggcaatggaattatcccttaatggcctaccccaatcccgataccttcccttattacccaccgtaccctccaaatcagtctccaaatcaaaatttcggatataataagaacaattattataggagtccttacaataacaagaatagaaccttccaaaaaaaacacttcaacagtgccaaagactctacaaaaaatattagatctacttcccaaaaacctgttgtcatgccgtctgacaacgttaaaagttctacccaagaaaaagattcgaaataa

SEQ ID NO: 77182 - DNA, 2982 bp, Saccharomyces pastorianus
atggctagtgcagatgattactttagtgatttcgaagatgacgagctggataaactgtatgaaaaggctatcaataaatctgtgaaggaaactataacgagacgtgctgtaccagttcaaaaagaccttcatgataacgttttacctgggcagaaaactgtgtacgaagaaattcaaagagatgtcagttttggacccactcatcatgagcttgattacgatgctttgtcgttctacgtgtaccctacaaattacgaggtaagggattatcagtatacaattgttcataaatcactgtttcaaaatacgttatgcgccatcccaacgggtatgggtaaaacgttcattgccagtacagtaatgttaaattattttcgttggaccaaaaaagccaaaataatctttactgctccaacaagacctttggtagcccagcaaattaaggcatgcttaggtataacaggaataccttcggatcaaactgctatattactcgataaaagcaggaaaaatagagaagaaatttgggccaataagagagttttctttgccacaccgcaagtagtggagaatgacttgaagaggggtgtattggatcctaaggatattgtatgtcttgtcatcgatgaagctcacagagctactggctcctctgcgtatacaaatgtggtaaaattcatagataggttcaattcatcatacagattattagcattgaccgctacaccagcctctgacctggaaggtgtccaagaagtggttaataacttagatatttccaagattgaaattaggactgaagaaagcatggatatcgtgaaatatatgaagaaaagaaaaaaggaaaaaattgaagtgccccttttgttggaaattgaagacataatcgaacaattaggtatggccgtcaaaccagtgcttcaacaggcaattgaactcggtatatatgaggaatgtgacccttcacaaataaacgccttcaaagccatgcaacaaagccaaaaaattattgctaaccctactatacctgaaggaattaagtggaggaacttctttattttacagttattgaacaatgtgggtcaaatgctaaagagattaaaaatttatggaataaggacatttttcaattacttccagaataaatgtacagaattcactacgaaatataatcttaaaaaatctactaataaaatttcagctgagttttattaccatccgattttgaaaaacatcaaaaatcaatgcgaaaattatttaagtgatccaaagtttgtcggtcatgggaagttacaatgtgttagagatgaactaatggacttttttcagaaaaggggttccgactcgagggttattatttttacagaattaagagaaagcgcacttgaaattgtgaagttcatagactcggtagctgacgatcaaatcaggcctcatatttttattggacaagctcgtgcaaaagaaggttttgatgaggtcaaatacacaagaaaacatgcgccaaagggaaggaagaaggtagagagattgcataggcaagagcaagagaaatttttggaagctgaacgaactaagagagcggcgaatgataaacttgaaagaagtgccagacgaacggggagctctgaagaggctcagattagcggaatgaaccaaaaaatgcaaaaagaggttatccataatttcaaaaagggtgaatataatgttctcgtttgtacatcaattggagaagaaggtttggatatcggagaagttgatttaataatctgttatgatactacaagtagtccaatcaaaaatattcagcgtatgggtagaacaggcagaaaacgagatggtaagatagtactactgtttagcagtaatgaatcatacaaattcgagcgtgctatggaagactattcaaccctgcaagcgcttatatccaagcaatgcattgactataaaaaatcagatcggataatccctgaagacattattccggaatgtcacgagacattgatcacgattaatgatgaaaacgaaataattaatgaaatggaagatgttgacgaagttattcgttatgcgactcagtgtatgatgggcaaaaaggtgaagccaaaaaaagccataacaaagaagaagagagttcaggaaaataaaaaaccgaagaagttctttatgcctgataatgttgagaccagtattgttagtgcaagcactttaattaataagttcttggtgaatgaaagtggcgggaaacaactagtaacgagtaatgaaaacccaagtaagaagcggaagatttttaaagctttggataatctggagaatgattcaaccgaggaagcttcctcctcattagaaactgaagatgaagaagtcagtgatgataataatgttttcattgcggaagggcagaatggatgccaaaaagatttggaaactgccattattcgcactggcgaaagtcttaccacactcaagccacttcataattttgaacgccctaatatggctttatttgtgaatgattgtggtcttccaactaaaatcgagaaaaatgtgaaagacatccgaggaaatcaacacaaccttgaaaaagaaaagaactgtactgttgacaagaataacatggtattgagtttggacgattggaattttttcagaaaccgctatatcccagaaggtgtttccttcgatgtggagcccaattttgtacaatacaccaaaggggtaaaagttccgcattgtcacaaagtttcaaaaatcattacgttatttaacgacgagagtaatgataataagaagaggacaattgatatgaactatactaaatgtttggcgagaggcatgttacgagacgaaaaaaaatttgtaaaagttaacgataaaagtcaagtcgataacaacagtgtcaaccatgattcatcccaatcttttaccttatcgaacgcagaattagatgacatactgggctcagattctgatttttga

SEQ ID NO: 77183 - DNA, 1299 bp, Saccharomyces pastorianus
atggttgttgatactgagtattacgatttgttaggtgtgtctaccactgcatcttccattgaaataaaaaaggcctatagaaagaaatctattcaagagcatcctgataagaatcccaatgaccccacggctaccgaaaggtttcaagcaatatccgaagcttatcaagttttaggtgacgatgatcttcgcgcaaagtatgataagtatggaagaaaagaagctattcctcagggcggctttgaagatgcagctgaacagttctctgtcatctttggtggagatgcgtttgcctcatatattggcgaactgatgctattaaagaacctacagaaaactgaggagctaaatgctgaagacgaagctgaaaaggagaaggagaatgtggaaacaatggaagaattacctgcagacggtaagacggatggcaccactaacgctgttgatgcagcattgggcaatactaacgaaaaagatgacaaaaataaggcgaggacaacttctggtaatttaactgtacacgatggaaacaagaaaaatgagcaggtaggagcagaagctaagaagaagaagacaaaattagagcagtttgaggaagaacaagaggtagaaaagcaaaaaagagtagaccaactaagcaaaacattgattgaaagattatcgatattaacagaaagtgtctatgatgatgcatgtaaagattcctttaaaaaaaagttcgaagaggaagccaatcttttaaagatggaatcatttggtctggacatattacacacaataggcgacgtttactacgaaaaagctgaaatttttcttgcatcccagaacctgttcggaatgggtggtatatttcattctatgaaggctaaagggggagtatttatggatacactaagaactgtttcggcagccatagacgctcagaatactatgaaggagcttgaaaaaatgaaagaagctagcacgaataatgagcctttgtttgacaaagacggaaatgagcaaattaagccaaccactgaggaactggcgcagcaagagcagctattgatgggcaaagtattgtcggctgcttggcatggttctaaatatgaaataacatccactttacgtggcgtttgtaaaaaagtactagaagatgactcggtaagtaagaaaacgcttatcagaagagctgaagcaatgaaactattgggtgaagtctttaagaaaactttcagaaccaaagtcgaacaagaagaggcacagatctttgaagaacttgtagcagaagctacaaaaaagaagagacatacatga

SEQ ID NO: 77184 - DNA, 447 bp, Saccharomyces pastorianus
atgaacaaaattcagcaaatcaacgataaagaactacaaagtggaattcttagcccgcatcaatcatggcataatgaatataaggataatgcttatatatatatcggaaatctcaaccgagaattaacagaaggtgacatattgacagtcttttctgaatatggagtccctgtagatgtaattcttagcagggatgaaaacacaggagaatcgcaaggttttgcatatttgaaatatgaggatcaacggtcaacgattctagcagtcgataatttaaatggatttaaaattggcggtagagccctcaaaattgatcatactttttataggccaaaaaggagtttacaaaaatactatgaagctgtaaaggaagaattggatcgagatatagtttcgaagaacaatgctgagaaactcattttggctaaaaaggaccaaccaaattaa

SEQ ID NO: 77185 - DNA, 2295 bp, Saccharomyces pastorianus
atgcctgccaaaatacacatttctgcagacggtcagttttgcgataaagatggcaacgagatccaattgcgtggtgtcaatttggatccgtcagttaaaatccctgcaaagccattcctatccacccacgctcccatagaaaatgacacgtttttcgaggatgctgataaagtcagtttcatcaatcaccccttagttcttgatgatatcgaacagcatatcatcagattgaaatcactgggttacaataccattcgtttacccttcacctgggaatctcttgaacatgctggtccaggacagtacgattttgactatatggattatatcgtcgaggtactaaccaggattaacagcgtacaacaaggtatgtacatttatttggaccctcaccaagacgtctggtctaggtttagcggtggatctggagcaccgctatggaccttatactgtgcagggtttcaacctgcaaacttcctggccaccgatgctgcaatcttacataattattatattgaccccaaaacgggcagggaagttggcaaagatgaagagtcctaccctaagatggtttggcctacaaactacttcaaactggcgtgtcaaacaatgtttacgttattctttggtgggaaacaatatgctcctaagtgcacaattaatggagaaaacatacaggattacttgcaaggaaggtttaatgatgcaatcatgacactgtgcgcaagaattaaagaaaaggctcctgagttgtttgagagcaactgcattattggattagagtctatgaacgagccaaactgtggttacattggtgaaacaaatctcgatgtgattccgaaagagagaaatttgaaattgggcaaaacgccaacggcatttcaaagctttatgctgggtgaaggtattgagtgcacaatagatcaatataaaaggacattttttggattttctaagggaaaaccgtgcacaatcaatcccaaaggcaaaaaagcttggctgagtgcagaggaaagagatgcgatagatgcgaagtataattgggaaaggaaccctgaatggaaaccagacacttgcatttggaaactccatggtgtttgggagattcagaatggtaaacgccctgttttactcaaaccaaattactttagccaacctgatgcaacggtatttataaacaatcattttgttgactattacactggaatttataacaagtttagggaattcgatcaagaattgtttattataatccaaccgccggtaatgaagccaccacccaatttacaaaattctaaaatattggacaataggacgatttgtgcatgtcatttttatgatggtatgacactaatgtataagacatggaataaacgaattggcatagacacctatggactagtaaacaaaaaatactcaaatcctgcctttgctgtagtgcttggcgaaaacaatatacggaaatgcattaggaagcaattatcagaaatgcaaaaggacgctaaatccatgcttggaaaaaaagtacctgtattcttcaccgaaattggtattccatttgacatggacgacaagaaagcatatattacaaatgactattcttcacagaccgctgcattggatgctcttggatttgcattagaaggaagtaatctttcgtacaccttatggtgttattgcagtattaattcacatatatggggtgacaattggaacaatgaagatttttcgatttggtccccggatgacaaaccactctatcacgatacccgagcaaaaactcctactcctgagccatctccagcctctactgtggcttcggtatccacttctacatctaaatcgggttcttcacaaccaccaagtttcataaaaccagataatcatttagatttggatagtccctcgtgcactttaaagagcgacttgtcagggttcagagctcttgatgctataatgagaccattccccatacaaattcacggaagatttgagtttgctgagtttaacttatgtaataaatcctaccttttgaaattagttggtaaaacgacacctgaacagataactgtccctacatatatttttataccacggcactattttacaccaagccggttgtcaattcgttcatcatcaggtcattatacctataacactgactaccaggttcttgaatggtttcacgagcctggccatcagttcattgaaatttgcgcaaaatcaaagtcaaggcccaacacccctggaagtgacacttcgaatgacttaccagcggaatgcgttatcagctaa

SEQ ID NO: 77186 - DNA, 1230 bp, Saccharomyces pastorianus
atgaccaattcagtaaagactaatgggccaagctcctcagacatggagtactactataagtcgctctatccattcaaacacattttcaactggctgaatcattcgcccaaaccttctagggatatgattaacagagaattcgctatggcgttcaggtcaggtgcttacaaaaggtataattcttttaactctgtgcaagatttcaaagcacaaatagaaaaagccaacccagacagatttgaaatcggtgccatatataacaaaccgccaagagaacgtgatactctattaaaaagcgaattgaaagctttagagaaggagttggtgtttgatatcgatatggatgattacgatgccttcagaacgtgttgctccggagcccaagtttgctctaagtgctggaaatttatatctttggcaatgaaaattatgaacacggccctaagagaggattttggttataaggacttcatttgggtattttcaggtagacgtggtgctcattgttgggtaagcgacaaacgggcacgggctttgacggatgtacaacgaagaaacgttttagattatgtcaacgtcattagagacagaaatactgacaagcgattggctttgaagaggccttatcaccctcatcttgctcgttctttggagcaattgaaacctttctttgtcagcattatgctcgaagagcaaaatccttgggaagatgaccaacatgctatccaaactttattgcctgcattatatgataaacaattgattgattcattaaagaagtattggctggacaatccaaggaggtcaagcaaagagaagtggaatgatatagatcagatagctacatcgctcttcaaaggccccaagcaagactctcacataattaagttacgtgaatgtaaggaagatctcgtattgatgactctttatccgaagctggatgtggaagttacaaagcaaacaattcatttgttaaaggcccctttttgtattcatcctgctacggggaatgtctgtgtgcctattgatgaatcctttgcacctgaaaaagcacctaagctaattgatcttcaaacagaaatggagaaaaataatgatgtttcattaacagctttacaaccttttatcaatcagttccaagcatatgtgagttctcttttgaaaaatgaactgggttcagtgaaaagagaacgtgaagatgatgatgaaccggcttctttagatttctga

SEQ ID NO: 77187 - DNA, 336 bp, Saccharomyces pastorianus
atggttgaaccagcaaggaaaaagcagaggattgatcacgatactcatcacgctgtggctgaaccagtaacggaagctaaaaatacgctgtacgtgagccagcttaatgaaaaaattaatatgcaacgactgcgagtaaacctttttttactctttgctacgtttggagaggtactgaaggttagcatgaatttcaagaaacagcggggccaagcctttatcaccatgagaaccatcgaccaggccagtctggcccagatttcattaaacggcgagcgattctttggtaagcctttgaaagttgagttcagcaagagtgaaactaaaacactatga

SEQ ID NO: 77188 - DNA, 1725 bp, Saccharomyces pastorianus
atgagtctggaacccacacaaacggtctccggtacgccgccgatgctgcatcaaagaacacacaaacaagtatacccattgcggatggaaactatcccaatattggaatccgactccaaggctactctacaaagcaacgagcccacccagaaagatgaggaggagaccgaatattttgagaataaacaatccgtgtcgaatttgagccccgatttgaaattcaaacgacacaagaataaacatatccaggggttccctactctgggcgaaaggctggataacctgcaagatataaaaaaggccaagagagtggagaatttcaattcttctgcgccaattgctgacgacaatcatagtggagatgcgactgcaaatgcgactgcaaatgcaactgcgaatgttaatgcaagtgcaatgcccgctccatatatgccttattactattactaccatccgatgaatgcaccaactcctgcaatgataccatatcctggatcaccaatgcattcgattatgcccaactcctcattacagcccttttattcgcaacccactgctgcaggcggtcccgatatgactactccccaaaatatatcttcatcacaacaattgctgccagctccgcaattgtttccgtacggatcattccatcaacaacaacttcagcaaccacactacattcaacgaacaagggaaaggaaaaaatcaatcggaagtcagagaggtagaagattgtctatgttagcatctcaagctaatgggggaagcactattatatctccgcacaaggatattcctgaagaggatttttacaccgtggttggaaatgcgtcttttggtaaaaatttacaaatacgacagcttttcaactggtgtttaatgagatctctgcataaattggagttgaaggctaaaaaccaagaggaagaaggggaacttgaacatctggccaaaaaatccaagctcgaatcaacaaaggcagaaactgattatgtggatcccaaacgtctggctatggtgataataaaagagtttgtcgatgatcttaaaaaagatcatattgcgatagattgggaagatgaggaaaaatatgaggatgaagatgaggagaagattctggataatactgaaaactacgatgacacggaactgcgacaactgtttcaggaaaacgacgacgacgacgacgacgacgacgacgatgaggtggactactcggaaatacagaggtctagacgtaaatttagtgaaaggagaaaagccctaccgaaagaaccaaaaaaactattacctaatagcaaaaacgtggaaaacacaaagaatcttagcattttaacgagcaaggtgaacgcgattaaaaatgaagtgaaagaatgggcagtcactttagacacttcgagaccagatcttgaatggcaagaattgacatcattctcatcacaaccactggaaccgttgtcggatacagaagagccagaccttgcgattgcagatgttgagacaaagttagaaacaaaagtcgatgagctaaggtaccagtcgcatatattaaactcgcactcactagccttaaacgaaataacaaattcaaaagtgaataaattgaacatagaaacaatgagaaagatctcaagcgaaacggacgatgaccactcacaagtgattaatcctcaacagctgttgaagggattaagtttatctttcagtaaaaaactggatttatga

SEQ ID NO: 77189 - DNA, 960 bp, Saccharomyces pastorianus
atgatggggtttgaatggggttttaaacccagcagtaaaataacacagagtacagtcagttcacaaggcacaggcaatgtaatgattccaactgctggagtgaaacaaaaaaggcggtatgccaacgaggagcaagaagaggaagaactacctcgtaacaagaatgtgatgaaatatgggggcgtctccaagaggaggcctcagccaggatcgctcatcagagggcagcctctgcccttgcaacgaggcatggaactaatgaacaagaaccaattacagcagttgttggtggatttgatgacaaaacatccagaaatacaacaaagcgtacatacgagagtcatcggattagacttcagtatacaaaagtgtctggacatgttgaaacaaaaatcagaagccgtttaccagagcataccttacaataggtcttatgagagtaataaattagatgactatgctttcgtgagaatgaaacctcaaattctggagttcttaaactgtttggtggatttcatactggataacattccaccacgtttggaaaatttgcacgcatcattaaaattcttagacatttgcacggaattagttatcaaattgcccagatttgaattagctagtaataattactactacgataaatgcattgaacaattgtctcacgtatggtgtacgcttattgaacatattgcccgtgacaggataattttattagcagataatagctccgtctggaaaagtcatatgacaagattacaggtatacaatgaacattcaaatgggttattggaacgcccactccagctgttcaaatctttagatatgggtagcccttcagcagcatcgtcatcaacattatcacttcaagaaagtattatttaccaccacgataccatgacagcaaacgaaaacaataacaatagtggtagcgctgctactgattcgccctttaactaa

SEQ ID NO: 77190 - DNA, 1296 bp, Saccharomyces pastorianus
atggaacctcaagaagagtttataactaccgaagaagttgagcaggagattgtgcccactgtggaggtcgaacaagacgttcccgttgatattgaaggagagaatgacgacgatgatgaaatgatgaatgatgatgaggaagctttggaggtcgacatgtccaacaactcgcttacctatttcgataagcacacagactccgtgtttgccattggccatcatcctaacctgccgctagtatgtaccggtgggggtgataacttggcacatctttggacatcacattcacagccacccaagtttgctggcactctaaccggttatggcgaatctgtgatttcatgttctttcacttctgaagggggcttcttggtcactgccgatatgtcggggaaggttcttgtacacatgggtcaaaaaggtggcgctcagtggaagttggcatcgcaaatgcaagaagtcgaagagattgtttggctgaaaactcatcccactatagcaaggacgtttgcgtttggtgcaactgatggatctgtttggtgctaccagattaatgagcaggatggttctttggaacagttaatgtctggttttgtacaccagcaagattgctctatgggtgaattcattaacaccgacaagggtgaaaatacgctggaattagtcacttgttctttggatagcactattgtggcatggaattgcttcactggccaacaattatttaagatcacacaggcagaaatcaagggattagaagctccatggatttccctatcattagctccggcaactttgaccaagggtaactcgggtgtcgtggcatgtgggtccaacaatggtcttctggcagtaattaattgtaacaatggcggtgcgattttacatttatctacagtgattgaactaaagccagaacaagacgaactagatgcctccattgaatccatttcttggtcatccaaattctcccttatggccattggccttgtctgcggtgaaatactcttatatgatacaagtgcatggagagtaagacacaagtttgttctcgaagattctgttacaaaacttatgtttgataatgatgacttattcgcatcgtgtatcaatggtaaggtttaccagtttaatgcaagaactggccaagagaagtttgtttgtgtgggccataatatgggggttcttgattttatattactgcatcctgtggcaaataccggcaccgagcagaagagaaaagtaataactgcaggtgatgaaggtgtatctctggtgttcgaggtaccaaactga

SEQ ID NO: 77191 - DNA, 366 bp, Saccharomyces pastorianus
atgtccactaagttgcctattgtgatttcaaacggaacagccttcaaaaaagtccccgttcaattgctgttgaatagcggatcagaggcacaacatggcctccctaggaacgctgactctcagcctgctcgaccaagaacgggcattactaggacatgtgggcaatgtggagagattaagacttcattacaatggagggagggccctaacggtgctgcttgcctgtgtaatgcttgtgggttgttttttagaaaattgattctgcgcttcggtagagcagctgctaaaagatacatggagcaaattaaaggtaccgggactaagagaaggatccccaaagaacttaccggaactgtcagattctga

SEQ ID NO: 77192 - DNA, 831 bp, Saccharomyces pastorianus
atggcttttctccagggaaagaaagggaagggatacttcaatgacgaaggcttagatgacaagctaatacagaaagggaaaggagcagggcatcggaaggaaatgttgcatttggaagatgacaatggacgacaaaggtcagtgatagcgaatttgcagaaattcgtttattgctgcctgtacttgaggtttatcaaagatggatcattattcttgatcctcctggggtggataatttcatcgctctgtgatttcattcaggaattgacactcaggtacctgaagaagaactacttagaggtgggccgcgacaatgatcaggaagatgatgaaagtcttgccatcagagggttagaaacacctattgtaagaatgataataaacaaagccatacgatattaccaaggcctaatacttctagaaacagcgtactgtatagtataccacattaggctagacgtatcgagagacatatgtcccaaaccgtacggatttgtgataatgcttttgataagggaatttacttgtccggtacccgcagggtttcctagcaagctacttctggtactactcgatattttattacttttctgccagattgtaataataaacggctcactgagttcgagtcttcagaacgtgaaacttattgtcaaggagttgaatgcagaagaagagggcgcactcaacattctcaaacttaatacctggcgcatggatgcaaccggaccggaactcatagtactcaagaatcatgacaagtcgattcctcaacaggcagacggggatgacgctacagagatcactcctctactgaatatcgccgaataa

SEQ ID NO: 77193 - DNA, 435 bp, Saccharomyces pastorianus
atgggcaagaaagcacacggaggaaagatgaaacctgagatcgacgaaaatggtactctgctagtaccgccaccaaggacgattgcgaaccaggaccatttccatagattaaactacctctaccaaatatccgcttaccaaacaagagcaagacagaaagcaagaacagacgcacatacgcctttggcacgcaattatatcaaatcaatggacctaattagtaagaaaaccaagacatcactgcttcctacgataaagagaacaatttgtaaaaaatgccatcggttgttatggaccccaaaaaaactggaaatcacatccgacggagcgctttcggtaatgtgtgggtgcggtaccgttaaacgttttaatattggcgccgatcctaattacagaacctactcagagcgggagggtaacctactaaattcttag

SEQ ID NO: 77194 - DNA, 801 bp, Saccharomyces pastorianus
atgagtggcacgaggtgtttgctaggcgtcggactaccagttgatgtgactgctacggaaaccttgactcatgatgaacaaggaccaggtgtagagccaggaccgtgttcgcgaggaagttctatagatggtctgctgccctcgttgctcggttcacatgatgacgtggatgacgattcggcggcttttcacaagtacatgacactatcgcgagatggcgcaggcgccatccatgctccgtcattagtcgaagacgcctcaaggaacgacgacgacgacgatgatgatgatgaagacgacgacagttccatgtcgcgagacctatccaaggctctagatatgtcatcgtcatcatcgtccagcccgcgcgttcaaagtcggcggcaccgtagttctgtgagcgcaatatctgcaatcttacaccaaggaaaatctggccgcgaagacataactggaagccttagcgttccggcagaacaagaaaaactcagttttcttgccaaagcctcgagtattttctttcgaaggaacagtatgcccagagacaaacatacacattcagtatgtcccgctagccgcccagattccgagagatttatcgtcacatctgcagccgcgcagtctttgcgccgccaacaacaactggaagacgctcagtacgctcgagttattacaaactttcgtactataggatggtgctctcccagcgagatagagtctgtggaatataaacggtccttgatcaatacggagtgggacgaaaagatctcgcttttgtctcacgcgcaatgttataaataa

SEQ ID NO: 77195 - DNA, 738 bp, Saccharomyces pastorianus
atggctctacctctgataaagcctaaggagtctgaggaaagccacctcgctcttttatccaagatccacgtgtccaaaaattggaaactgcctccaaggttgccccatagagcagctcagcggaggaaaagagttcatcgacttcacgaagattacgaaactgaagaaaatgatgaggagctacagaagaaaaaacggcagaatagagacgcccaaagggcctacagagaacgcaaaaacaacaagttgcaagtgctggaggaaaccatagagtcactgagtaaggtcgttaaaaactacgaaacgaaactaaaccgcctccaaaatgaacttcaagcgaaagaatcggaaaatcatgcccttaaacagaaattggagacccttactctgaaacaagcctctgtgcctgctcaggaccctatcctgcagaatttgatcgagaatttcaaaccaatgaaggcgatacctattaagtacaataccgctatcaagcgccaccagcactcgacagaactgtctagctctgtcaaatgcggcttttgtaacgacaacactacttgcgtttgtaaagaactggaaacagatcaccgtaaaagtgacgacggtgtggccacagaacagaaggatatgtcgatgccacatgcagagtgcaataataaagataaccccaatgggctctgtagtaattgtactaatatcgacaaatcatgtatcgacatccggtccatcatccactga

SEQ ID NO: 77196 - DNA, 303 bp, Saccharomyces pastorianus
atgacattctttcttaaaagaaaaattagcttttttttgtcaggcattgcacaaacttttttatttctgcctatactcttaaacagatcagtcattcatgttgtctttttaacgatcgtactgggacatcgcatgccttgggattccgtaattaggtgcaacaatacgggcacaactcattctgcgctatcttcacggacagaacttctattgcctatcggtggtgtgattaacaattggaagcgcagagcttggaatggatttccaattcaatggatttggaggtattcgtttgtttactaa

SEQ ID NO: 77197 - DNA, 735 bp, Saccharomyces pastorianus
atggaagggttttcctttaatgagactcttatgggagtcaattcgcaccagaaggtgtcaatgaattcaggattgcagacagctgcaagcaaacgagctttttcattggtaggagttacgtacactccttggcatttcgcgtatagtaggtgttctaggatgtttgattgcagtttacaattaaaatccaccaggtctgatcgctctctttctatagaaacaagattcgtcatattaggagatacaccaagaatcgatatgatcttttcagttgcaaacagtgtatcaacaggtagtaaactgatattctgtcttctgtcagtggcaaatgtactgtcaaagggtattttttgccaatcgaccaagctagtgttgaacttatcatcaacggtcatcttgcaaaaagaaaatgagtcgtttgtcaggaaaacactaaacaagttgactttgccatcttcaacgagacgacccctcaactgctcgaaaatgccacatcgagagaccaaaaaggttctcaatggcgtctttttagtgtcataccattcttttttactacctaggatcatcgacaatgattttagagttttaaaatttgctttgcggcaatacaaatctatagccgggatcaccgaccttgttatattcttcggagacatctttagagtaaccacagatattcaataccaacctatacttccattgctgcttgtctcacatctaaacttcgccgtttag

SEQ ID NO: 77198 - DNA, 1092 bp, Saccharomyces pastorianus
atgtctccgaagaatataacaaggtcggtgatcccggctatagatttgtattgccgcaaagcaaattttaaaactctaaaatcattgtcgatgatcctaggtagtaaaaaagaatggtatgacactaaaaagacgccattgagaacctttttggtctctcgatgtggcattttcgagcagttgaggggtcgtctcgttgaagatggcaaagtcaacttgtttagtgttttcctgacaaacgactcattttctttttgcaagatgaccgttgatgataagttcaacactagcttggtcgattggcaaaaaataccctttgacagtacatttgccactgacagaagacagaatatcagtttactacctgttgatacactgtttgcaactgaaaagatcatatcgattcttggtgtatctcctaatatgacgaatcttgtttctatagaaagagagcgatcagacctggtggattttaattgtaaactgcaatcaaacatcctagaacacctactatacgcgaaatgccaaggagtgtacgtaactcctaccaatgaaaaagctcgtttgcttgcagctgtctgcaatcctgaattcattgacaccttctggtgcgaattgactcccataagagtctcattaaaggaaaacccttccatttctgtacctcgagaatatcagatgtacgatccggtggtacgtgccactataaaggaggttgtcaccaagcgattgctgcgatccgccttcgataatgacatcgacccgctaatgtgtcttcatttggataaaggctggaaacttaaattccccatactatcctcgacaacgggcctaaacttctccctgaaggattgtctttccctggacacaggaaaagatgcatctgatatgacagaggtgtttctcgctactatggagtcgagtaaagttcttcgtacgtatagcaacctcgctgatattgtgatgaaggacaatggtaggttggactcaggcgtcctaaagcaattcaacgactacgttaagcaagaaaagctcaatctacaacattttcaggccggttcctcaaagtttctcaaaggcgcaaagatataa

SEQ ID NO: 77199 - DNA, 213 bp, Saccharomyces pastorianus
atgtcattctctgtcagctccaagacttccaagaccacgaagttgctggtatcttctatttcagagagcgctgttgctcttattattattaccatacgtatacttttttccattggcaaaagcgatttcaaaaaaataatcaccaaggaaataaatggtgcagaaacaatatactacagaaatataccggaaagtaaaccccaagggagttag

SEQ ID NO: 77200 - DNA, 213 bp, Saccharomyces pastorianus
atgtcattctctgtcagctgcaagactcccaagaccacgaagctgctggtatcttctatttcagagagccctgttgctcttattattattaccatacgtatacttttttccattggcaaaagcgatttcaaaaaaataatctccaaggaaataaatggtgcagaaacaatatactacagaaatataccggaaagtaaaccccaagggagttag

SEQ ID NO: 77201 - DNA, 504 bp, Saccharomyces pastorianus
atgaatctaagatttgaattgcagaaactactgaacgtttgctttttgtttgcatctgcttacatgttctggcaaggcttagccattgccactaatagcgcttctccgatcgtggtggtgctttcaggctccatggaaccagctttccaaaggggtgatatccttttcctatggaatagaaatactttcaaccaagtaggtgatgtcgtggtgtatgaggtcgaagggaaacaaatccccattgtgcatagagttttgagacaacataacaatcacgcggacaagcaattcctcctgaccaaaggtgacaataacgccggcaatgatatttcactatatgctaataagaaaatttacttgaacaagtcaaaggagattgtagggaccgtcaagggttactttccacaactagggtacattacgatttggattagcgagaacaaatatgccaagtttgcattgttaggtatgttggggttgagtgctctgctggggggcgagtag

SEQ ID NO: 77202 - DNA, 2895 bp, Saccharomyces pastorianus
atggaccctcaccaatcaccagctgataatgccgcatcgcctacgaagagcgtgaaggcaaccactaaaaattcgtccacgaataataatgtcaatagcaacaacagcaataataacagtaaccatgatatactgaattttaatgataactatactaccattctgcaacatttggcaaacgaccatcctaatatactgagggagaaaggaggatcacaacaacaacagcaacagcagcagcagcaacaacagcagcaacaacagagcctggatacccttttgcaccattatcaaagtttactctccaagagtgataatgcaatagcctttgatggcaatgttagtaacagcgcagatcataatggcagttatagcaacaataataacaacaataatgacatatctagtcccggtaatctgatgggatcttgcaatcaatgtagattaaagaaaacaaagtgcaactattttcccgacctaggcaactgtctcgaatgtgaaacgtcaagaactaaatgcaccttcagtattgctccaaattatttgaaaagaacgtcctctggggcaaacaataacatgccaacctcttcaaactccaaacgaatgaaaaattttgaagactattcgaatcgcttacccagtagcatgctctatagacatcaacagcagcagcaacagcaacagcagcaccagcgtatacaataccccagatcctcttttttcgtcggtccggcctcagttttcgatttgaacttgaccaagcatgtaagactagataatgttgaccaaatacagctatcaaaaactttatcattaagaaaggtgtctcctaccgcacagtttactcttcaggacgattttgacacgacccttcatagtaagcaagaatacgaagttgatttggtcgaaaatctggtacatccgcacggtcaccttttagtagagattttcttcaaattgattcatccttttcttccaattttacacgaacgtgtatttttggaaaaatattctagatcttatagagaactcactgcgcctttactcgcatccatttactcactggcattacaatattgggattttcatcctgcacttttggggttccctaaacccgatgcaactgctcaactaaacaatatcgcattggaaacattttatgctcgagttggaaggccaaaattgagcattatacaaacaggccttttgattttgcaatgccgtagtgaatgtcataacaactgggtcctctgctccagcgtagtggcccttgcagaggaattggggctcggggttgaatgtaatgattggaaacttcccaaatgggaaaaagatttgagaaagagattagcgtgggcagtttggttgatggataaatggtgcgcactaaacgaaggtagacaatcccatttaattttaggtaggaactggatgatcaagctattaaactttgatgattttcctctgaattcgccaactattttaaattccttgcaaaatgaccagtcggggtcttcaccctcgtcatcaaatgatgtgaaaaaccatcagatagcatttggtaacttgcccatatttaatataaaccccactttagaagatttcaagaatggaacgcttatgtttcaacaaatggtttccttgagtataattcttggggaaatcatggacacattttacactcagggatccatgacaataaacaaaagcattgaacaggtattgaaactggcaaagccgttgcaactgaaattaagagaatggtaccattccctacccaagaatttgtcaatgagttatgccacgccacaaaaattgaactcaaattcaactttaactctagcttattttgccacggaaattacgttacataggaaaattatctgtgccttgaatcctcaaactccaaaggaactggttcaagtatgcaggactgctgcaagaaccaggcttgtagcagcaattgaatttataagagatctaaaaaacgaacatattaatgctttttggtataactgctcaactggaaatctgatgctaattggaacatttgctgccctgctgtatgtgacttcagctacgaaggaagaggctatgattttcagagattatgttagaaattatacctgggtattgaagataggttccaaatactttgataaactatcgaatgctttgaataatatgcatttactatttgcacaaattcctggtcttctgaccgatgaaccggtggtcgtgagccctaactctaacatcagttccgttaacacacaaaggtcaggtgtacaatcgcaaatcccaatacaatttaacgtgggatcacctgccatgaccgagcaaggatctcctttaaaccagtggaagaatctgccccaggaaatcttgcaacaactaaactcctttcccaacggtacgaccagtacaacaacgccagtaaaccccacttccagacaaacacaactagaatcgcagggaagtccagccataaatagtgctaataataatagcaacaacacgcctttaccatttgcgccaaataagtcttctaaaaaaacttcacaatcttcaccaaatgttacgccctctcatatgagcagacaccccccctctaatacatcttcaccaagagtcaattccagcacaaatgtcaactctaatacacaaatgaatgcttctcccttgacctcaattaacgaaaccagacaagagtcaggtgacgctgcagatgaaaaaacagcaggaagagaaagaaccgccaacgaggaatcatcaacggaactcaaggacgataatccaaactcgaaccaggaaacaagcgcaactggtaaccaaactataaaaatgaatgatgataaaaatgtaacaattaacacaagggaaacccctctgtaa

SEQ ID NO: 77203 - DNA, 324 bp, Saccharomyces pastorianus
atgtgctattatttatattacagaggggtttcccttgtgttaattgttacatttttatcatcattcatttttatagtttggttaccagttgcgcttgtttcctggttcgagtttggattatcgtccttgagttccgttgatgattcctcgttggcggttctttctcttcctgctgttttttcatctgcagcgtcacctgactcttgtctggtttcgttaattgaggtcaagggagaagcattcatttgtgtattagagttgacatttgtgctggaattgactcttggtgaagatgtattagagggggggtgtctgctcatatga

SEQ ID NO: 77204 - DNA, 651 bp, Saccharomyces pastorianus
atgtttatggcaagacaagtgttaagaaatggtctatttttaagaagccttgctcccataaagataaccgctagaactgttgcatcagcaaatgcgggcattaagagaaagtcaagatttgataaaacaatgatcaaacctttacttttggtaatgatatttgggtcgatattaaacgcagtaatagccgagaaaaggaacactattgatatggaaaggaaatataatctgaaacttgataaattgaaagagctgatacggagggttcatgataataatggaaaggtagacttcgacgcaggtgatgaattgaaacttgtgaatttgcgtttaggaatcgtcggcaagaacgcaactgggatgaaggaagatgagactgatattgtggttcctaaggaagagtcattggaagagatctggcaaagtataatagacgaggcaaaaaaagaagtaatcgaaaaaactccagatgctggcgttaagaacaaagaagggattgtcactgatttgaatgttctaaaagatttagaaaagtcgaaaaaagaagatgaaaaggtttacctaagtggtgatgtccatatgatgatgaaccaaccaggtgatttgaatgaaatcgccaaagaacatgataaaatcccaaaatttctatag

SEQ ID NO: 77205 - DNA, 1104 bp, Saccharomyces pastorianus
atggcaagagcgttgagggatatatcattattcaatgatataagaaaggatcaaaattcggcaggagccaagcatgagagatataacatgagagatctccggagtaagaagaaccagcatgtaaatggcatagatgattatgaagatgattcgctcgacagatttataagaaggaagaaatccagagttgtaaaatacattccatcattgtcagcgtataatgtgttcaatgaatttccttactatcctacgtcagccagtcagttactagacggcaaattagatgaatttctaatgctgtcagaacaatacaaaagtagattacccaaaatacgcaaactaggatggaatagattcaaaccaataggcattaataaaactatgtacgaattagaaatgctaaggtctcgagcacgagctcaaaacgcggaagggaacaatgaggaagacttcaggcagcacgattctagagaagaggatccaagaaacaatggctctataggacgcgtgatactgcctcatattctacaggaaaatgaagatgatactggtgagggtgttacaggattgcgtagcatgccaaatgacagtatggccatacttgcgaataacagtgctaataattcgcaaaatgaggaagtatcagaggaggatgaaatatcatacgattatgatgcagagttcgatcatgttgtagatgaggatgataatgaggagggagaagtgccgggggaaggtgtggaaggtatagaagttcagagagagagaattgtgccggatgacttattaatgagacccacttcactgtcacgctccctacaacagtttgtggaagaggctcatcatttagatagaaacccatatgatattgacagtgataacgacggagaagattcaaaggtagaactggacatgaatccggattttgaagatgacgtgggaagagagcatgattataatagcgaatacagccaagagccgacttcttatggtgggattacacctgatctagcgagtaattggaggaattggactagggagaggataactagtttagatgaattaatggagagacgagccaggcagcaacgaggtcaagattag

SEQ ID NO: 77206 - DNA, 1095 bp, Saccharomyces pastorianus
atggctggaaatgcaaactcagcagacgaggaagttaccaggatattaggaggcatatatcttggcggaatccgtccaattattgaccacagaccattgggtgcagaatttaatattactcatattctttctgttatcaaattccaagtcattcccgagtatctaataaggaaaggttacacgctaaaaaacatacccatcgatgatgatgatgtgaccgatgtgctgcaatacttcgatgaaacgaaccgattcattgatcaatgcttgttccccaatgaagttgagtattcgcccagattagtagatttcaagaagaaaccacaacgtggtgctgtttttgctcattgtcaagcaggactctcgagatctgtaacattcatagtagcctacctaatgtatcgttatggattgtcactatcaatggccatgcacgctgtcaagaggaagaaaccgagtgttgagccaaacgagaatttcatggaacaattacatctctttgagaaaatgggtggagattttgtcgatttcgacaaccccgcctataagcagtggaagctgaagcaatctatcaagttagatccatcgggcagcgaattggtctccaattctggaatgtttaaagattcggagtcgtcgcaagacttggataaattaactgaagctgagaagagcaaggtcaccgcagtcagatgtaagaagtgcagaaccaaattggcgttatctacatctttcatcgcgcatgacccaccaagtaaggaatcatcagagggacacttcatcaagcgggccgccaactcccatcgtattattgatattcaagagtcacaagcaaattgctctcattttttcatcgaacctttaaaatggatgcaacctgaactacaaggcaagcaagagttagaagggaagttttcatgtccaggctgttcaagtaaagttggcggttacaactggaaaggatctaggtgcagttgtggtaagtgggtcatccccgctatccacctgcaaactagtaaagtggatcaatttcccttacaatccactgctttgcccaacatggttaattttgaatccgagaaagtaaatagataa

SEQ ID NO: 77207 - DNA, 1383 bp, Saccharomyces pastorianus
atgcctatcaatgccatcacttccgaccatgtcattatcaatggtgcaaataaacctgcgactattgtgtattcgaccgaatcaggcaagattctggatgttttagaaggctccgtggttatggagaaaactgagataaccaaatatgaaatacatacgctggagaacgtatctccatgtacaattctgcctggacttgtggactctcatgttcacttgaacgagcccggtaggactaactgggaaggattcgaaactggaactcaagctgctattagtggcggggtcacaacggtggttgatatgccgctaaatgctattcctcccacaacaaatgtggaaaatttccgaattaaattggaagctgctgagggccaaatgtggtgcgatgttgggttttggggtggactggtaccacacaacttgccagacttaattccgcttgtcaaagctggcgttcgcgggttcaaaggattcctgcttgattctggtgtggaagaattccctccaattggcaaagaatatatagaagaagccttgaaggtcttagccgaggaggataccatgatgatgtttcatgctgagttgcccaaggcacatgaggaccaacagcaacccgagcaaagccatcgtgaatattcttcgtttttgtcctcgaggccggattctttcgaaatagacgccatcaatttgattctcgaatgcttgagagccagaaatggaccagttcctcctgtacatatagttcatctggcatcaatgaaagcaattcccttgatcagaaaggcacgtgcgtcagggctaccagtcacaacagagacttgtttccactatttgtgtattgctgcagagcagatcccagacggagccacccactttaaatgttgtccacccatccgctctgagtctaatcgccaaggcctatgggacgctttgcgtgaaggtgttataggctcagtagtgagcgaccattcgccatgcacccctgagttgaagaacttgcaaaaaggtgactttttcgattcttggggaggaatcgcttccgtcggactaggtttgccattgatgtttacccaaggctgctctttggtcgatatcgttacatggtgctgtaaaaatacatcccatcaggtaggactatctcaccaaaaaggcactatagctcccgggtacgatgctgatttggtggtatttgatactgcaagtgaacataaaataagtaattcaagtgtctacttcaaaaacaaattgactgcctacaacgggatgacggtcaagggcacagttttgaaaaccatattaagaggccaggtggtatatacgaatgccaacggagtctcgaaaacaccattgggtcaaactttgcttgattctagacgttaa

SEQ ID NO: 77208 - DNA, 1908 bp, Saccharomyces pastorianus
atggctaacgacgctctaagtgctattttcagtaatccttcgaggaaaggtgtccaaccctccacatctattgtgtcatatacaaacaatgaagatgatattatagatgtggaaaatgggaagttcaacaagaacaagaatatcaacactaatgtgtatgtggacaactcctcaatagaggagagcgaagtcgtgcccttgcccgaaacaaagtccatctggagtaaaatatactacgatttcattgtgttagacaagacaactttgaatgtttcgttgaaagagtcgttcttgtataacagagacttgaaaccggttgaagaagaaagaaggtgttggtcctggttcaattacttatatttctggctggcagactgtttcaatattaacacatggcaaatagctggtacaggtctacaactaggtctgaattggtggcaatgttggcttacagtttggatcggctacacttttgcaggtatcttcgtagtattgaactcgagatttggttccgcatatcacttatctttccctattactgttagggcctcatttggtatattcttttctatgtggccgattataaatcgtgtcgtgatggctatagtatggtatgccgtgcaagcctggttaggtgctacgcccgtggcactgatgctaaaatctatttttggcaagaatctggaagatagaatcccaaaccattttggttctccaaatagcactacttttgaattcatgtgtttctttatattttgggtggtcagtataccatttgtcctagtggctcctcataaaatcaggcatttattcacagtaaaagcagttttgatccccttcgcagcctttggatttttaatctgggctttgaagaaatcgcacggtaaaattgagttggggacgctgaatgattattcacctcatggttccgaattttcatggatattcgttagatccctaatggcctgtgttgctaactttgccgctttgattatcaacgcccctgacttcggtagatttgccaaaaatcctcaagcgtctttgtggccacaattggttgccatcccattgttcttcgccataacatgtttgatcggtatcattgttactgcggccggttatcacttatatggggttaactattggtcaccactggatgtacttggtcaatttttggagaccacttacaccagaggtactagggctggtgtgttcttgatttcttttgtatttgccttagctcaactgggtacaaacatttctgccaactctctggcatgtggtgctgatatgacggctttgtttccaagatatattaatattagaagaggttctttattctgtgtggcaatggctctatgtatctgtccgtggaacttaatggccagttcaagtaagttcaccagcgctttgggtgcttatgcaattttcctttccagtattgctggtgtcatttgcgcggattatttcgtagtaagaagaggatatgtgaaattaacacatttattcctggcacagaagggttccttttacatgtttggaaacaaatttggtgccaattggagggcctttgttgcgtatatttgcggtatcgctccaaatttaccaggttttataggtgatgttggagctccaaaaattacagtttcagagggtgcaatgaggttatactatttaggttatccggtaggtttctttattagtgcggtgatatacctcatattatgttacttttttcctgtccctggtactcccgtaaccaattttctgacagagaaaggatggttccaaagatgggcttatgttgaggacttcgagcaagattggaagaatgagttacgtagggatgatctctgcgatgacacagtcagtatctatgatggcaccgaggaaaagatagtttactaa

SEQ ID NO: 77209 - DNA, 1032 bp, Saccharomyces pastorianus
atgaagttttttagtttggcagatgaggcagaatttaagtcaataatcatttcaaaaaacaaagcagtagatgttataggatctaagttaggtggtcaagtggtttctttttcagatgaatggtttgcttctgctgaaaatttaattcagccaactgctcctataagggatcctaccagatttgttcattcaggcgcatggtacgacggctgggaaacacgaagacataatgagatggaatacgattgggttatcatcaagatgggagtcgctgctgcccatattattggtggtgaaattgacactgcgtttttcaatggtaatcatgcaccatttgtatcaatagaggcgctctatgacgagggcgaagaaggtaatatagtggaagatgactcgcgttgggtcgagattgttgagaaatttgagtgtggtccttcgcaaaggcatcttttcgttagaggcaacggccttactaaagaaaggtttactcacatcaagctgaaaatgtaccccgatggaggaatcgccagatttagattatacggaagagttgttcctccagaactcaaaacgaaggatcatataattgacttggcttatgtttgcaatggtgctgtcgctttaaagtattctgatcaacacttcggttcagttgataatttgctactaccaggacgaggtcatgatatgtcagacggctgggaaaccaaaagatcgagacaaccaggtcatactgattgggcggtaattcaactgggcagggagtcttctttcattgagaagattattgttgatacggcacacttcagggggaacttccctcagttcattaccgtggaaggttgcttgaaggagtcagaatcaagtgagaacactggtgaaggaacatgggtagagctagttggtaagtcaaagacggggcctgacaaagaacatgtgtatgaaatacgtaagagtataagagtctcccatgtcaaattaacgattattccagatggaggagtgaaaagaataagagtttgggggtactga

SEQ ID NO: 77210 - DNA, 735 bp, Saccharomyces pastorianus
atggaaacaagaatacttgttgtgaatcctaatagttcgaagtcaatgacggtgtccttgcgggaaaccattgaaaagactttttcaatggaatcatgtaaaatcagttatttcacagggccagaaacgtcgccaccacaaattgatgggcaggaaacaagtattaaaagtatggaggcctgccttcccctcttaattgatgaccaggagtcggtatattactttcagaaattcaacgggatattaattgcctgtttttcagatcatcctttggtagcaaagataaaggatagagctgctaaagaaaaagcagatgtttctattgttgggttattagatagtagtattaattattgcaatttggttggaaagaagttctctattattacctcaaataaagaatggattccaatattgaataactctgtggaatcgaaattcttgacagggaatacagttaacaaaaatttatggaaaggtacggtatctactgatttacaggtcctcgacttacatagtccagaaaatttccagcagatagcagaaattatatatcgcgaaaatattagaaagcttgattcagatattgtaatattaggttgtgcaggattctcgggattgcaaaataaactggcgaaaacattccaaagggatggcacgctgtttctggacacgattgagatcggcttacagattctaatcactatgataagatttgtcaactcacaaaaataa

SEQ ID NO: 77211 - DNA, 384 bp, Saccharomyces pastorianus
atgagttcaatttgtcataccttatcaggccttatcagctcaaatttgattggattatgcgttaaaacagcgcctaaaattcttcgaatattcgtcaggttatgtacgtatacattctataatttacttaagtcaactggtttggcacttggcttaataatttcatcatacaataaagtggtcaagaagtcgctaaagattttaccagtgacttcaggcaaaaaatacttggctgccaaggcaaacttgttcttttcacccagcggacttgctgaagccaattttgcagtctcttcatttaatatcttagcggtcaattctggagttactttgtcaccggtatcacttaagacaacaccatgtttaacccactggtacaattga

SEQ ID NO: 77212 - DNA, 1665 bp, Saccharomyces pastorianus
atggtgaagataagcttggacaacactgctctatacgcagacatcgacacgactcctcaatttgaaccttccaaaactactgtagctgatattttaacaaaagatgccttagagttcattgttttgctgcatagaactttcaattcaacacggaaacagcttttagccaacagaagcaatttacaatcaaagttagactctggtgaataccgatttgatttcttgccggaaaccgaacaaatcaggaacgatcctacatggcaaggtgctatcccagcccctggtttgatcaacagatccagcgagattactgggccaccattgagaaatatgttagtcaacgctttgaatgctgaagtaacgacatatatgactgatttcgaggactcttcatctccaacttgggagaacatgatttacggacaagttaatctttatgatgccattagaaatcaaatcgatttcaagacaccaagaaaggagtacaggttgaaggatgacatttcaagactgcccactttaattgtcagacctcgtggctggcacatggtggagaagcacctttacatagatgatgaaccgattagtgcttccatcttcgattttggtttatatttttaccataacgctaaagagttagttaaaattggtaaaggaccttatttttacttaccaaagatggagcaccatatggaggtaaaactatggaatgacatattctgtgttgcacaagattttattggaatgccccgcggtaccattagggccactgttctgattgaaactttgccagcggccttccaaatggaggagattatctatcaaataagagaacattcaagcggtttgaactgtggtcgttgggactacatattttcgaccattaaaaaactgagaaacttgcctgaacacgttttgccaaatagggatctagtgactatgacttcaccttttatggatgcttatgtgaaaagattgatcaatacatgtcaccgtagaggggtccatgcgatgggtggtatggctgcccaaatccccataaaagatgatccaaaggctaatgaagctgcaatgaacaaagttcgtaatgacaaaattagagaaatgaagaatgggcatgatgggtcatgggtagcacacccagcattggcaccgatttgtaatgaagttttcagtaacatgggtacagcaaatcaaatatattttgtcccggatgtacatgttacatcatctgatttattgaatacgaagattcaagatgctcaagtcactactgagggaatcagagtaaacttggatattggcctacaatatatggaggcttggttaaggggatctggttgtgtcccaattaatcatttgatggaagatgccgctactgcggaagtatcacgttgtcaattgtaccagtgggttaaacatggtgttgtcttaagtgataccggtgacaaagtaactccagaattgaccgctaagatattaaatgaagagactgcaaaattggcttcagcaagtccgctgggtgaaaagaacaagtttgccttggcagccaagtattttttgcctgaagtcactggtaaaatctttagcgacttcttgaccactttattgtatgatgaaattattaagccaagtgccaaaccagttgacttaagtaaattatag

SEQ ID NO: 77213 - DNA, 588 bp, Saccharomyces pastorianus
atggtgacagtggtggcggagacattgacgaaagagtccttcgaggagtatgggacgataatttcgccagatgaagagatttcaaggatgcaaaaccttgaaaaaggtgcaaaccagggaacagcgatcaaattgcttcaagtaagccaggtagagaataaatctaccagtaaagttcccaattggaacctattccgttgctttccacagccgcacctgaatagagtattcactcaaggctccaatcaggcgatttctcattctatcaaagtcctcgaaaagcatccgtgtagtacgcagacgtttgtgcctatggggagaacgtcagcggaagtagcatacttggtagtagtcgctaaagaaattggaaataagccagacttgtctacgttgagggcttttacatgtttgggtaatcaggccgttacctatggcttaggtacctggcatgcgcccatgatagtacttggcaaggaagaacatttggatttttcagtcttaatctacgaaagtctggaccctgacaggcccgagaaggactgtgtggaagaacactacagcgatggcgacgtttgtattatcatctaa

SEQ ID NO: 77214 - DNA, 3342 bp, Saccharomyces pastorianus
atgcagcagaacagtgagttcttaacggaaacacctggaagcgaccctcatatatctcaattgcacgcgaatagcgtaatggaatcacagctcttggacgatttcctcctgaacggatctcccatgtaccaggatgatagcatggcgcatattaatatagatgagggtgctaatttccaaaattttatcaagacagatgagggtgattcgctcaatctgttgtctttcgaaggtatcggtaacaatactcatgtcagccaaaacgtgtccactccactggaggaggaaatggaaagtaacagagccttgaaggaggaagaagaggacgagcatgaaaataaggtttttaatgaaaaaaatataggcaaccctgctcatgacgagattgtatttggaagaaaggagacgattcaatctgtttacataaatcctttagattaccttaaagtgaacgcagcgcagctacctttggatgtagaggtctcaggtttgccacaagtatctagagtggaaaatcaactgaaactgaaagtgaaaattacgtctgaaacaccactaaaccaaagcatgctttacttgcctagcgattccatttcaagagaaaagttttatttaaaaaaaaatatcgaggatttttcagaagacttcaagaaaaatcttctgtacatcaatgcgtttgttctatgtgcggtcagcaacagaacgacaaatgtttgtatcaagtgtgttaagcgagaacaaagaagagccgctagaaggaaatcaggtattgcagacaatttactctggtgtaataatattaatagaaggttagtcgtgttcaataacaaacaggttttccccataatgaaaactttcgataatgttaaggagtttgaattaactaccaggctagtttgttattgcaggcaccataaggcaaataatggctttgtcatattattcactataacagattggcaaaatagactgttgggtaagtttacgacaacacctattatgatcacggatagaaaaccagcaaatatggataccaccaagtttaataacactactacctcgtccagaaggcagctaacggaagaagaatctaccacagaatattattcaacggataacaaccaattgagcaaagacgaaaatatgccatttcaatatacttatcaacacaacccatatgataatgacagtcaaatgaataatattccactgaaagacaaaaacgtaccattcccatattccatctctcaacagacagatttgcttcagaataataacttatcactgaacctttctctgcccaatcagcatattccatcaccaacatctatgagcgaagaaggctcagaatcatttaactatcatcatcgcgataatgacaatcccgtccgtactatctctttgacaaatattgaacaacagagtcaattgaaccaacggaaaagagcacgcaataatttggaaaatgacattggtaaacccctattcaagcattccttttcaaattcaatcagtgcaacaaatacgatgaatccagctttacattcaatgcaagatttctcaatgaaaaacaacaacaataatttgccatcaattaatcgcgttataccttcacaaggcccaatcaatggtggtatcgaagttacattactgggttgtaacttcaaagatggtctttctgtaaagttcggctctaatcttgccctttctacgcaatgctggagtgagaccacgatcgtcacttatctccctcccgctgcctacgcgggtcaagttttcgtctctattactgatacgaataacgaaaataataacgatgaccttccccaagaaattgagatcaatgacaataaaaaggccatatttacttatgttgatgatactgataggcaactgattgaattagctttgcaaattgtgggattaaaaatgaatggtaagttagaagatgcaagaaatatcgcgaagaggattgttggcaatgattctcctgatagcggtacaaatggcaacagctgttcaaaaagcacaggtccctctccaaaccaacacagtatgaatctgaacacaagtgttctttactccgatgaagtcttgatacaaaaagttataaaatcattgaacataaattccaatatttccatatgtgattcattagggagaactttattacatcttgcctgtttgaaaaattactcaagccttgtgtatacattgattaaaaagggtgctcgtgttaacgatattgattcctttgggctaactccattacattttgcttgcataagtggtgaccctaaaattataaagatgcttttaaattgtaaagtaaattattcactgaggtcacacaacggattaactgcaagagaagtattcatagcaaaccacattcattcagaggaagtggacaaaaaacaagaaaacagagacaatcataagtttgttcataatgacacttatatcagcgaagtattgtcattgtttgaagaattccaaaacggtacgaagtttaccgatagtgtagaaacagacagtaattattctattagcaggaaatattcacaatccagtttcaattcaagcctgctagacaatgaatctttgaatgagaacttattcgaaagccaaagcatgataaatcccacttctatggagattcagcatccaaccttgcaactatttgagaattcaagttactctgagtacgaccaaagtgatttcgaagaagacggtgatgaagatctgttcgtcactgacgaagtagaaaaaccaggtgttgcatgcagggaggaacaaagcgaactccttgatattggatctagcgccaacgaacccgaagaggataatggtagtacatctctctggaatagagttttacatcgaattaatgatgacttaccaaaatatgaggatctgttcccgttgtcttggggtaaagatgataaattgaaaaccacaaatcaagacagtattgtggagcagtcagcatctaatattgaaaactctgaaaattcagaggaagaggattatgaggaagaggaagaatttttgaaaaaacagtttaacagattcttccaaaacaaacaaaacttccgaaatgataaaatgttaatatttttctggatacccttaacactactacttttgacatggttcatcatgtacaaatttggcaaccaagatagttccatcaatcatataagcgaattaatctcagagtacttgagaattgcattagcaaagttcttgctgggaaatgaaaggatgaaaactgcattcaggtcaaaattatcaaacctgcaaacaacaagaatgttgaacgatttaattgtcagttag

SEQ ID NO: 77215 - DNA, 1122 bp, Saccharomyces pastorianus
atggctgccgtcacattacatctaagagctgaaactaaacccctagaggcacgtgctgccttaacacctaccacggttaaaaaactgatagctaagggcttcaaaatatatgtagaggacagtccacaatctactttcaatattaacgaatatcgtcaagcaggtgccattatagtgcctgcaggttcatggaaaaccgctccacgcgacagaatcgttataggtttgaaggaaatgcctgaaaccgatactttccctctagtccacgaacacatccagtttgctcactgctacaaagaccaagctgggtggcaaaatgtccttatgagatttattaagggacacggtactctatatgatttggaatttttggaaaatgaccaaggtagaagagttgctgcctttggattttacgctgggttcgcaggtgcagcccttggtgtaagagactgggcattcaagcaaacgcattctgacgatgaagacttgcctgcagtgtcgccttaccccaatgaaaaggcgttggttaaagatgttaccaaagattataaagaagccttagccaccggcgccagaaagccaaccgtgttaatcattggtgcgctaggaagatgtggttccggtgccatcgatctgttgcacaaagttggtattccagatgctaacatattaaaatgggatatcaaagaaacttcccgtggtggtccctttgacgaaattccacaagctgatattttcatcaattgtatatatctatcgaagccaattgctcctttcactaacatggagaaactgaataatcctaacagaagactaaggaccgtggtggacgtatcagcagacactaccaaccctcacaaccccatcccaatatacactgtggctactgtgtttaacaaacctaccgttctggtacctaccactgtcgggcctaaattatctgtcatctctattgatcacttgccttctttgctgccaagagaagcttcagaatttttctctcatgatcttttaccatctttagagctcctacctcaaagaaaaactgctcctgtctgggttagagccaagaaattgttcgatagacattgcgctcgtgttaaaagatcttcaagattgtag

SEQ ID NO: 77216 - DNA, 765 bp, Saccharomyces pastorianus
atgggtaaagttattttagttacaggtgtttccagaggtatcggtaagtccatcgtggatgttcttttcagtttggacaaggacacggttgtttacggtgtagccaggtctgaggcacccttgaagaagttgaaagagaagtatggcgacaggtttttttacgttgtcggtgatattaccgaggattccgtgttgaagcagttggttaacgctgctgttaagggccacggcaagatcgactccttggttgccaacgctggtgtcctagagcccgtgcaaaatgtcaacgagattgatgtcaacgcttggaagaagctgtatgacatcaacttcttcagcattgtttccttggttggcattgcgttacctgaattgaagaagaccaacggtaacgtggtattcgtcagttcggacgcctgtaacatgtacttcagcagttggggagcttacggttcttcaaaagccgctctgaaccacttcgccatgactctggccaacgaggaaaggcaagtgaaagccattgccgtcgccccaggtattgtggacacagatatgcaagttaacattagggagaacgtggggccttcctccatgagtgcagagcaattgaagatgtttagaggtttaaaggagaataaccagttgctggatagctctgtgccagctacagtttatgccaaattggcccttcatggtattcctgacggtgttaatggacagtacttgagctataatgaccctgccttggcggactttatgccttga

SEQ ID NO: 77217 - DNA, 792 bp, Saccharomyces pastorianus
atgggcaaggttattttgattacaggtgcctcccgtgggattggcctgcaattggtgaaaactgttatcgaagaggacgatgaatgcatcgtctacggcgtagcaagaacggaagctggtctgcagtctttgcaaagagaatacggtgcagacaaatttgtctatcgtgtcctcgacatcacggacaggtctcgaatggaagcgttggtggaggaaatccggcaaaagcatggaaaactggacggtattgtcgcaaatgcggggatgctagaaccggtgaagtccatctcccagtccaactccgaacacgacatcaagcagtgggaacggctgttcgatgtgaactttttcagcattgtctctttggtggcactgtgtttacccctcttgaagagctcgccatttgtaggcaacattgtcttcgtcagctctggagccagtgtgaaaccatataacggatggtcggcgtacggctgctcgaaagccgcattaaaccactttgccatggacattgccagtgaagagcccagtgataaagtgcgtgccgtgtgtattgcaccgggcgtcgttgacacgcagatgcagaaagatattagggaaacattgggtcctcagggcatgacacccaaggctctcgagaggtttactcaattgtacaagacttcgtcactgctggacccaaaggtgcctgcggcggtactagcgcaactcgtcctgaaaggtattcccgactctttgaacggtcaatatctccgctacaacgatgagcgactggggccggtgcagggctag

SEQ ID NO: 77218 - DNA, 402 bp, Saccharomyces pastorianus
atgcttttgccggatttcctccaccaacgcttccattcgagacctgtccgtgatgtcgaggacacgatagacaaatttgtctgcaccgtattctctttgcaaagactgcagaccagcttccgttcttgctacgccgtagacgatgcattcatcgtcctcttcgataacagttttcaccaattgcaggccaatcccacgggaggcacctgtaatcaaaataaccttgcccatatcccttctttgacagattataagttgtttctcttgttgctgttcgcgacagcccttatttcctgtattccttcttctttttctgcattatcatttttagccactttacgaaaaaggtcaaaaagtgaaaaaaagagggaaaaatccatgaggaacagtatgctcccttaa

SEQ ID NO: 77219 - DNA, 492 bp, Saccharomyces pastorianus
atgtcagaattctataagctagcacctgttgacaagaaaggccaaccattccccttcgaccaattaaagggaaaagtggtgcttatcgttaatgttgcctccaaatgtggattcactcctcaatacaaagaactagaggccttgtacaaacgttataaggacgaaggatttaccatcatcgggttcccatgcaaccagtttggccaccaagaacctggctctgatgaagaaattgcccagttctgccaactgaactatggcgtgactttccccattatgaaaaaaattgacgttaatggtggcaatgaggaccctgtttacaagtttttgaagagccaaaaatccggtatgttgggcttgagaggtatcaaatggaattttgaaaaattcttagtcgataaaaagggtaaagtgtacgaaagatactcttcactaaccaaaccctcttcgttgtccgaaaccatcgaagaacttttgaaagaggtggaatag

SEQ ID NO: 77220 - DNA, 705 bp, Saccharomyces pastorianus
atgtcgttgccaattatcaaagtccattggttggaccattccagagcgttcagacttttgtggttattagaccatctgaaccttgaatatgaaattgtcccttataaaagagatgctaacttccgtgctccaccagaattaaagaaaattcacccattaggaagatctccattgttagaagttcaagacagggaaactggtaagaagaagatacttgccgagtccggtttcatcttccaatatgtcttgcagcattttgaccattcacacgttttaatgagcgaagatgctgatattgcagaccagattaactattatctgttttatgtagaaggttccttgcaaccacctttaatgattgagttcattctttcaaaggtgaaggattctggtatgcccttccctatttcgtacttggcaagaaaagtggcagacaagatcagtcaggcatactctagtggtgaagttaagaaccagttcgactttgtggagggtgaaatttccaaaaataacggctacctggttgatgggaagttgagcggtgccgatatcttgatgtctttccctttgcagatggcgtttgaaagaaagtttgccgcaccagaggattatcctgccatttccaaatggttaaagaccataacctcagaggagtcgtatgctgcttctaaggaaaaggcgcgtgctttaggtagcaatttctaa

SEQ ID NO: 77221 - DNA, 1614 bp, Saccharomyces pastorianus
atgcaattgttttccatcctctctttgttgtcatcattgatgtgttcattgaccgttttagggtcttccgcaagttcctatgttaagtttcctgttcaaaagttggctgatattataaatataggcacacaggatgtttctaccgtcttcaaaagaaatgaggttcttaacaccacagtgataaatggaataggagtgtatgttgtcaagatggaaatcggaacgcctccacaaacgttgtacctacagttagatactggctcttcagatatgattgtgaataatgctgacattgcctattgcaaatcgatgtctgacggatctgactacgcttcaactgataattacgagctcacggcaacgttcaatgggcttccttcgactaccatctcatcagaagcttataacactctctgctcttattggggtacattcgatgcaagcaactcatctacttttgagaataatgcgacgtttttcaataacacatacggagatggtacgtattatgcagggacttatggtacggatgttgtctctttcgaaaatattactctaaatgatttcacttttggtgtatcaaatgatacaataggcaatccaagtggcattttaggcatatcgcttcccattgcagaatttacagatggtatcgaatacgcattggcattgaacagaacacctttcatatatgataactttccaatggaattaaaaaatcagggaaagattaataaaatagcgtattctttatttttgaatggacctgatgcacacttcgggagcatcttgtttggtgcagtggacaaaagtaaatacacaggacagctttacaccctgcctatgctgcaggcattcaatacccttggctcaaatcctgggatgattattactgcacaaagtgtggcaattttggatagtgaatctggcaataaaactgtttcggatattcaatttccagtgatgttggattctggcacaactttctcctatttacccaccgaaattgcagaagcaatcggcaaaagttttgacggagagtacagctctgacgaccaaggctacatctttgattgttcaaaagtgaacgatactttactgtccgtcgactttggaggatttaatatatcggcaaacatatccaatttcgtaacatcagctaaggatcgttgcgttttaaatgttaagcaatccgagtccacttatatgctgggagatgctttccttgtcgacgcatatgtagtctacgatttagaaaactacgaaatttctattgctcaggctagctttaataatcaagaagaagatattgaggttatctccgatactgtcccaggtgccacccctgctcccggatactttagtacatgggtatataagcccggtagtcccatcggaacaggagattttattaatgtcagctggacctcgtattcggaattttcacagtacaaatcattgcttgccaccgcagcccaaagcgatgatgctagttctttctcaagtagtggcggctctagcgaaagtaccactaaaaaacaaaatgcaggttacaaataccgttcttctttctccttttcattattgtccttcatatcttattttcttttataa

SEQ ID NO: 77222 - DNA, 333 bp, Saccharomyces pastorianus
atggagatgctcttgtttctgaacgaatcatacatctttcatagacttcgtatgtggagtactgttttatggcactcatgtgtattcgtatgcgtagaatgtgagaatgccaattatagggtgccgaggtgccttataaaacccttttctgtgcctgtgacatttcctttttcggtcaaaaagaatatccgaattttagatttggaccctcgtacagaagcttattgtctaagcccatattcagtctgctctaaacggcttccatgcaagaaatatttctatctcttgaattcgtacaacattaaacgtgtgttgggagtcgtatactgttag

SEQ ID NO: 77223 - DNA, 453 bp, Saccharomyces pastorianus
atgtgtcttttcgatcaaggcaaagcagtcctcgttcgtaccgtaggttggccagaccttttcgtagttggcaatatcgtaacccatatcatcttgtggcgagtcgtaaaatggcgagatccaaatggcatcggcgccaagctccttgatgtactccaacttggaggcgatacccttcatatcactccaaccatcgttgttggagtctttgaaacttgcgggataaatttgagagattgtggcctctttccaccacttgggttctgtttctggatgtgcagaagaaatagtcattgtacgttgctttcttttctttatgaaaaaactttcacttttgtttgtgtgtttggattggtgaatggaacatatattctagtacagctaattcctcgagtgaagaagtcttccttacttatatatgtctgtggacgtcttacgaatgatcgaaaataa

SEQ ID NO: 77224 - DNA, 1704 bp, Saccharomyces pastorianus
atgtccggtgttaataatacatccgcaaatgatttatccactaccgagtctaactctaactcagtagcaaatgcaccatctgtaaaaactgagcataatgactctaaaaactccctcaacctggatgccactgaaccacctattgacttacctcaaaaacccctctctgcatataccaccgttgcaatcctgtgtttgatgattgcatttggaggcttcatctttggttgggataccggtaccatttctggttttgttagcctttctgactttatcagaaggttcggtcaaaaaaatgacaagggaacctactacttatcgaaagtaagaatgggtttgatcgtctcaatattcaacattggctgcgccataggaggaattgtcttgtcaaaagtcggtgatatatatggtcgtcgtattggattgattacagttactgccatttacgttgtaggcatcctaatccaaataacctccataaacaagtggtaccaatacttcattggaagaattatttctggcctaggagtgggaggaattgctgtcctttccccaatgttgatatctgaagttgctcccaaacatatcaggggaatcctggtccaattgtaccagctgatgggtacgatgggtatttttctaggttactgtaccaattacggtaccaagaactatcacaacgccactcaatggagagtcggccttggtctttgctttgcctgggctacattcatggttagtggaatgatgtttgtaccagaatcaccacgttacctgattgaggttggtaaagatgaggaagcgaaacgttcactatcgaaatccaacaaagtctcagttgacgatccagccttgttagcagaatatgacactataaaggcgggaattgaaattgaaaagttggcaggtaacgcatcatggtctgaactactctccactaaaacaaaggtctttcagcgtgttcttatgggagtgatgatccaatcgctgcagcaattaaccggtgacaactacttcttttactacggtaccaccatcttcaaatctgtcggtctaaaggactcctttcaaacttcgatcatcattggtgtggtcaattttttctcttcattcatagcggtatacaccattgagaggtttggacgccgtacgtgtctattgtggggtgctgcttccatgctgtgctgctttgctgtctttgcctccgtttgtgtgacaaagctgtggcctcaaggaagcagtcaccaagacattacttctcagggcgccggtaactgtatgattgtgtttactatgttcttcatcttttcgtttgccaccacctgggcaggcggctgttacgttattgtctcagagacgtttcctcttagagtcaaatcaagaggaatggcaatcgcaacagctgcaaactggatgtggggtttcctgattagtttttttaccccattcattaccggggcaatcaacttttactacggttatgtattcttaggctgtctggtttttgcatacttttatgtctttttctttgtcccagaaacaaaaggcttgacgctggaagaggtaaatactatgtggctggaaggtgtgccagcatggaaatcggcctcatgggtgccaccggagagaagaaccgcagattacgatgctgatgcaatagatcatgacaatagaccaatttacaagaggttcttttccagctga

SEQ ID NO: 77225 - DNA, 591 bp, Saccharomyces pastorianus
atgggcgtattagaaaatatagtacctggtgagctttatgatgcgaactatgatccagatcttttgaaaattagaaaagagactaaaataaaattgcacgaatacaacacccttagtcccgctgatgagaataaaaagagccaggtaataagagaattacttggtagttgcactgataactttataattgaaccgccgttttactgtgattacggaagtaacatctatatcggagacaacttttacgccaatcacaatcttgttatattggatggggccaaagtagtcatcggtgacaacgtatttatcgcccctaatgttggtatttatacggcaggtcatccaattgacgtggaaagacggcttcaaggattagagtatgccatgcctgtgaccattggagacaatgtatggattggaggtggagtgtcaataattcctggagtaaatataggtaaaaactccgtgattgccgccggtagtgttgtgattcgtgacataccagaaaatgtagtggcagcaggtaatccttgtaaggtgataagaaagatcactgaaaaagatagtacaactacaaactatcgaaaatga

SEQ ID NO: 77226 - DNA, 597 bp, Saccharomyces pastorianus
atggtcgaatctaagaatactgaattatcgcaaggaacatggctcaataagccaaaatctgtttttcaagaggcaggaaaagtcactctggaaacagatgaaaaaactgacttttggcgtgaaaccttttacggatttacccgtgatagcggtcattttttgggagtagagacagatagtgcttttactgcacaagtccgtgttcaggggagctacgagagtctttatgatcaggctggtatcatggttcgtatagatgatggacattggctcaaagctggcatagaaatttctgatggccacgcaatgctaagcagtgttttgacaaatggcaaatcagattggtcaactgctgtttatggcggaaatgctcgcgatttctggcttcgtgttactgttgaaaagggcgttttgaggcttcaggtgtcttttgataaaaaaacatggccgttagtacgtttggctccatttccaacttctgaccattaccttgttggaccaatggcttgcacacctgagcgtggcggattgaaagttactttctcggaatggagtcttacagctcctttaggaaaagctttacatgatttaagttag

SEQ ID NO: 77227 - DNA, 2400 bp, Saccharomyces pastorianus
atgagtaccatttatagggagagcgactcgttagagtcggagccctcgccaacgccaacaaccattcctatccagatcaatatggaagaggaaaagaaagatgctttcgttaagaatattgacgaggacgtcaataatctcactgcgactactgatgaggaggaccgcgatccggaaagccaaaaattcgacaggcattccatacaggaggaaggtctcgtttggaagggcgaccctacatacttgcccaattctccatatcctgaagtgagatcggcggtgtccatcgaggatgaccccaccatccgcctcaaccactggagaacgtggttcttgaccacggtgtttgtggtagttttcgccggtgttaatcaatttttttccctgagatatccatcgctagagatcaacttccttgtcgcacaagttgtttgctatccaattggtaggatactggctctcttgcccgactggaagtgttctaaagtgccattttttgatttaaacccgggcccatttaccaaaaaggaacacgccgtggtcacgattgccgtggcgcttacttcctccactgcatacgctatgtacattttgaacgtccagggaagcttttacaatatgaaactgaatgtcggatatcagttcttgttggtttggacatctcaaatgattggttatggtgctgcgggtcttaccagaagatgggtcgtcaaccctgcaagctctatctggcctcagactttaatttcagtgtccttgtttgattcgttgcactcgagaaaagttgaaaagacagtcgcaaatggttggacgatgccccgttataggttcttcttaatcgtccttatcggatcgttcatctggtattgggtacctggattcctctttaccggtctgtcctatttcaacgttatcctatgggggtcgaagacaagacacaatttcatcgctaacacaatctttggtactcaaagtggtctcggtgcgttgccaattacatttgactacacccaggtttcccaagccatgtccggctctgttttcgccacaccattctacgtctctgccaacacctatgcatcagtgttgatattcttcgtcatagtgctgccatgtctttattttacgaatacctggtatgccaaatacatgcccgtcatttcaggttctacttatgacaacactcaaaacaaatacaacgtaacaaagattctaaacgaggattattccattaatcttgagaaatataaggaatactcaccggtattcgttccattttcctatcttttggcgtatgctttaaattttgccgctgttatcgccgtttttgttcactgcatcttataccacggtaaagatattgtcgccaagtttaaagaccgtaaaaatggtggcactgacattcacatgaggatctactccaagaactataaggattgtcccgattggtggtatttacttttgcagattgtcatgatcggtttaggatttgtagcagtgtgctgtttcgatactaagttcccagcttgggcatttgttattgcaatattaatttcccttgtaaattttatcccgcaaggtatcttggaagcaatgactaaccaacacgtaggtttgaatattatcacagaattgatctgcggttatatgctgcctttaagaccaatggcaaacttattattcaagctatacggatttattgtcatgagacaaggcttgaatttgagtagagatttgaaattagccatgtacatgaaggtttcccctcgtttgatctttgccgtccaaatctatgccactatcatatcaggtatggttaacgttggtgtccaggaatggatgatgcataatatcgatggcttatgtaccaccgatcaaccaaatggcttcacttgtgctaatggtcgcacggttttcaatgcttccattatctggtctttgccaaagtatcttttctcatcagggcgcatttataatccgctgatgtggttcttcttgattggtttgctattcccactagccgtttatgctgttcaatggaaattccctaaatttaaatttgctaagcacattcatactcctgtatttttcacaggcccaggcaatattccaccaagcacaccttataactactcattattttttgcaatgtcattttgcctaaacttaataagaaaaagatggagagcttggttcaataagtacaatttcgtcatgggggccggtgttgaagcaggcgtggcaatctccgtcgtcatcatcttcttgtgtgtacagtacccaggtggtaagctcagctggtggggaaacaacgtttggaaaagaacgtatgataatgattataaaaaattttataccttaaagaaaggtgagacatttggttatgataaatggtggtaa

SEQ ID NO: 77228 - DNA, 444 bp, Saccharomyces pastorianus
atgtgtgatcttcttccacacgtaccctgccaagacagtgacgacatacaaggtgcgtttcctgcactgaaaagccacgccactgagtgcggatccatacgtacagctagagccatagtgtggcaggaacctcgtcgcgcacataaacacaactgtgttcagtgccaactcccattcctctttgtgttcactcgtattgaatgctgcattgaactcggaccaaaactgtccatacaattctttatcaagcgctatcgagtcgagctgtgcaactcgagacatgctgcgttgcctttagattacgtcttctcagttatctcggcaatctctcctcgttatgctttccctccgtcttcactcatcccttataatgcgtttcccaccaaccttatcgatagaatggaggggaaatcgcatccgttccactcctcggatcgatactaa

SEQ ID NO: 77229 - DNA, 816 bp, Saccharomyces pastorianus
atgtctcgagttgcacagctcgactcgatagcgcttgataaagaattgtatggacagttttggtccgagttcaatgcagcattcaatacgagtgaacacaaagaggaatgggagttggcactgaacacagttgtgtttatgtgcgcgacgaggttcctgccacactatggctctagctgtacgtatggatccgcactcagtggcgtggcttttcagtgcaggaaacgcaccttgtatgtcgtcactgtcttggcagggtacgtgtggaagaagatcacacatattatttttaatgggccgcactgtgggaaccagatgatgtggctgaagctgtacaaatgggttaatttattgtatcacggctgtgatgtaaccaacttcctgaggtttctagcagcggaagggcccaatgcgagggcgtttttgtcgccgttataccgggcttttaatgtccattccacaaggttgattcgggatggttctgcaattgcctctgaattttattcgaactctgtattcgctgggttagaataccagaatagacaattgctatggaatgcactattagaactcttttccaatacactacttacgaaaagaggactcttgacctttgttaaaaaaccaccaaggtctcgttctacgactacttataagacagtttgcccccgttgcggcggttttccaaccaacccataccagatcgcttgttgtcgtgcgaactactgttacgtgtgcgttgtaaaggcgttggagtggtctatgtgcgatgcctgtggatcctctgggagactgaccgcctcaccagtgtactaa

SEQ ID NO: 77230 - DNA, 1965 bp, Saccharomyces pastorianus
atgtttttacctcgtctcgttcggtacaggaccgagaggtttataaaaatggtacctaccaggaccttgcgacgaatcaaccacagcagcagggatccaattcaaaaacaggtcttggctcttatcaaagcaaatgcgaatttaaatgacgatgacaagttgaaaatacggaaatattggtctgacatggcggactacaaaagtcttcggaaacaagaaaatagcttactggaaagctctatattacacgaggtcaagatcgaagatttcatcagtttcatcaatcgcacaaaaacctcatctatgactacaagaggaatttatagaagagaatgtttgtaccaatgcaagaaaaacttggatctagtcaatcaagtggtctcccaagtttcatccgtaagacatcaaaagcccttgactacgcaattggatactatgcgctggtgtgttgatgatgccatcggcacaggagacatagttatggctgccgaccttttcctgctgtactacagattatttacagatgataaaaagctagacgaacaatatgctaagaaaataatatcagtattagcgtacccaaacccactgcatgatcatgttcatctagtcaaatatttacaactgaactctctgttcgaaagtataaccggaggcggaataaagttaacgaggtttcaattagagactctttctaataaggccctcggcttaagtaatgaagccccgcaattatgcaaggctatactgaacaaactgatgaatataaactattctttgactaacgatttgaagcttcgggatgatcaagtgctgcttgcgtacaagtccattgatgaaaattatggaagaggaaatgttgcaagtgtgtattctatttggaacaaaatcaaagagcactatgtttccatttctgcacatgattccagaatcatttataaagtcttcaagatttgtacccataatagagcctatagatctatatgtagcgaaatgttttggcaattaactccagagtactattgtaataaccctttgatattaccggcaattattgacttcattacaaagcaagactctttaacaatggccaaggaactcatgcagaacattaacagatacactttacccgaaaaccatcatattgtctggcttaacaagagatgtctttcttcattgctaagaatgcatttgaaatttaacgattctaacggtgtagatagggttttgaagcaaataacaacaaatttcagggcgctttcgcaagaaaattatcaagcaataattattcaccttttcaaaacacaaaacctcgatcatatcgctaaggcagtcaaattactcgatactataccccccggacaagcaatgttagcctatgggtcaataattaacgaagtagttgattggaaattggcttcaaaggtcaagttcaccgataatttgatggcacttgtaaacgatttgttgacgaaggcacatgattttgatcctaaccacagaaactctctttggaatgtggtttccgctttatacattaaaaaactttgtcattataaaaagcgagatggtaaatttgttgccaatgccaaggaggatatcgatttggcaaaactactttatataaatgctgcaaagagaagtaaaacatactggacaaaatcgaactgtaacccattcattgcatcctccccatgtgatgtcaaattaaaagtgaataatcaaaacaggtttactattttaaggaatattgcattaagcgcactgcagataggaagaacagacatttttctttgggcgtgcgcagaattataccagaacggtatgacgattgaggaattgaagttagactggaatttcatcttaaaacatcaaattagaaattcagagttcaaaacaaacaaggagatcatacaagatattaaaaagcatggtgtgtcggctgtcaaacgttacttaagatga

SEQ ID NO: 77231 - DNA, 990 bp, Saccharomyces pastorianus
atgtgcagtaggatactcttgtccggtttagtcggactgggtgctggtactggcttaacctatcttcttttgaacagacattctccaacgcaaatcattgagacaccttatccacctacccagaaacctaatagtaatattcaatctcactctttcaacgtcgatccttccgggttcttcaagtatggttttcctggtccgattcatgatctgcagaaccgcgaagagtttatctcatgttacaacagacaaactcaaaatccttattgggtcctcgaacatataacgccagaatcattggctgcaaggaatgctgacagaaaaaattcctttttcaaggaagatgaagtaattccagaaaagtttagaggtaaactaagagactattttaggtcgggctatgatcgaggccatcaagccccagctgcagacgcaaaattttctcaacaggccatggatgatacattctacttatccaatatgtgtcctcaagtaggagaaggttttaatagagactattgggcgcatttggagtacttttgtaggggattgactaagaaatataagagtgtaagaatcgtgactggtccattgtatctacccaaaaaggatcccatagataataaatttagggttaattatgaagttattggcaatccacccagtattgctgttccaacgcacttttttaaattgattgttgcagaagcaccaacagccaatcctgctagagaggatattgctgtcgcggcatttgtattgccaaacgaaccgatatcaaatgagacgaaattgactgactttgaagttcctatagatgctttagagagaagtactgggctagaacttctgcaaaaagtaccaccttcaaagaagaaggcattatgcaaagaggtaaattgtcaaattgtagtgagagatttctctaacgcggcgatcaaacagtcgaaagatgtgaaattgttacctcctccaaaaaaaaggaattga

SEQ ID NO: 77232 - DNA, 2277 bp, Saccharomyces pastorianus
atgacgccgaaagaatctggaaagcctatttcgtgtgcaatgaagaagttgaaaggcaagagatctaagattttggttttatctagagatgcgggcaccaacgaattgaagccaacgaaaggaagagcacatcgagcttgcatagcttgcagaaagaggaaagtacggtgtagtggtaatataccatgtagactttgccagactaatagttacgaatgcaaatatgatcgccccccacggaactcatcggtatttgatagggaagtaagcgatgatagttccttatatgcacagagagcttcccacgaacgggaagatagcaagggccctataagttccattgattacaaaaaggttgtagagacgatctttccacctgaaacactccgtcaaatacttgcttcttcttcttttaacagccagaattttttggacactattaaaacgtgtctacttcaaggacaattaaatgttaatcaggtaatacgtcaaagtctaccaaaagatacgccttggcacatgcaaacaagtgttccattaccacccagagagattgccttgaaatttattcaaaagacctgggattgtgcctgtgtgctatttaggttctatcacagacctactatcatttctatcttggactcgatatacgaagcagaaaaacatggcaagcaatatactccagaacaagtgaaaacacaacctttaatttattctgttttagcagtcggagcccttttttctaaggaagatctcagcaaggatagtaaagcaactagggaattttacactgatgaaggctacagatactttttagaggccaaaaactctttggacttttctaatattactgacatctattccattcaagctatatttatgatgacgatctttttgcaatgttcagcaaacttgaaggcttgctattcgttcattggtatcgctctgcgtgctgcgttaaaggaaggtttacacaggcggtcttccatagttggtcctactccgattcaggatgagacaaaaaaaaggctcttttggtctgtgtacaaactagatctgtacatgaattgtattcttggttttccaagcggtatcgacgaatctgatatcgaccaagagtttcctctagacgtcgatgatgaaaatatatctactattggaataaagtttcaagattggcgaacgataagttcctgtggaatgaataataagcatacaaagcttattttaatcatgtctcggatctacaagctaatgtactctttgagaagaaaaccattagaagaggattctaggacgcagattgtatcgttgaacgatcaattagataattggtatgcccaattaccagatattttgaaggttgacacaatacgctatcgtcaaacgcaaccacctctaactgtttccgcaaatgatagtagttctccatacactaaacctaagaaattattatatctggacttccttctatccaaaatcgtactctataaaccattctaccactatatttctatagacccgttagatatcccagagttccaatttcaaattcacatggcggaaaactgtattgaagttgccaaaaaagttattcaattatcttatgaaatgattacgcaaaaccttttgagtggtagctactggttttccattcatacaatcttttttagtgttgcttgcctcaaattttatgtctaccaaacagaaaagggcctgatacgaaatgggaaggttgattcggatatttataacgctacgcagcttggcagtgaaatattatcacttttgaagggtgcttcaaatgcgagtaaacgtacttttgaagtattgaaccaattgttcaaagagtttaacgagaagacctctgtattatctgaacaacttttgaatatagttaaattgcaacggcaagaaagtagtggagctttagtgccccagttgcagacaaataataattttacgaagtgccaaggagaattacatcatggacagcagcatcaccaaactccagccacgagtcttcgttccattctgaatcttccacaaggggaagctgatctaaagtttcagaataccaataatgagagccatacaacgacagctgcacaagaagaatacttagataaacttctagcagaatttgaggaatttgactactcaattaacagagtattacctgatgtcatcgatttttcagcactaattggccaagattcttctgccaacaatcaaatattttcctcagaattcagctctgacccaacagtaaattga

SEQ ID NO: 77233 - DNA, 2523 bp, Saccharomyces pastorianus
atggatgatctgctaaaagttcccgagattgtaaccaatattgcctcatatttatctactgtagattatctgagttttcaacaagtgaataaacgggtttatgcaatcattaacggcaaaaatgattcaaagtattggtcattgaaattgactagaatgggtctccaacaggtgcattcaaatgaagaagaagaaattacgttgctggatgaaaatgatgatcaaaattcccttcgcatcttcgaaatatacaaatctttcactgctcaaaattctaaaaatatctttgtgaaattttaccgttgttataactcatacgctaggaaactatataataataatctagcaaatttctttcctacttcatattccaacgatccgttgaaacaaacaaaaattctaaattttatcaaaaagtacaatttctcgaataaaaatgatatagaaacatttactaggattgaaactaatttcaacattcttagggaaatcttcattaattctgttctcaaagagtcagaattgaattaccagtctaataatttagctgccgtcgctcgtttcatgaaaattttattgatatctaatgaggaaagcaatgctatcgaatttttcaagtcaaaggctgatttgcctcccagtttaacggttttgccgtctaatgatgaattattttgggccgaacaaccaagggaagaggacagcggtgggagtaccgtgatatttaattctaaaaatttagatacgtttctcaatcagctaagggatttcctcaacgaaaagattaaattagcggacattttattcaaagatgagttccctgtaatattacagttcatcgagtcctttatccaagatattttattagatattttaaacaatatcttattaagctatagtgaatttttaaaagaaaatggaaaggatagtaaagccaattatgaatgcgtacccgaactttatttcacatttataaaaaagtttgatactgaattaaacgactcagtaaacgcaggcgcaaatttccgtaaagttgttcgtgaccttttaaacctgtatctcgagccctttgttgtcaactatatgaatcagacaactagagtatttgaatcattgatcaactcacaattagctaattatgacacacaagttcaagacaagcagcgtgagcaaaacgcaaaaatttataacactttaaaagatcaaacggatgcttcgagtgcaagtaacaatgaattgccgaatgacctctcaataattactgaaacctccaaaactgtcccagaagcggattcaaaaccaagtacgatccatcaatcagttcattcaactgatatttctaatgataaactagactttctaagttccttcaccaagattttcaagttctcgaacaatgaaaatcaaaggctaaagcaacaactacaactagcctacaacttaaatttaatttccaataacttgcaaaacattaaatcgttaataagtctcgatttatgttacaaaattttacaggaaacaagcgaaaagacggatcaaatttacaaatttcatacgattgaaagtttgctaccattgatcaagctacgctgtcaagagattttcaaaattttaattacacaattgaataaaaatcacgttaaacctgcatttgaaaaggcaatcctgctactacaaaaatataatcctaacgaaatagaacaaatagaaataaaattcaattcactttcgccagccaatactcaagtcgaacctttagtacaattcactgaacttatcaatataggtgacataatattacaaatgatttccattttttacaagaacgaattgattcccaaaaaaattatcgataaaaataaagattttcttaatgatgttatccaattaaaaaaaaattttgagacttctatcgatgattttgtagccgaaggtttaaatatcggtataaacaaactaatggatgaaatctcatttgtattcaagactcttcaattgcctgacgattataatccaccgccaccctctaggaattctccaataagggatataaagccaaccaaatgtgctatcagggtagtcgagttactttctaatcattgctttctactgactggtgccacagacaagggtactattgacgtgtaccaacaagaaattggcgagagattctttaatgaaatcgtcaaacatctgaagaagtgcttcatatctacggagggcgcaatttggttaatctgcgatttaaattacttttacgattttattgctaacaaattaaaacaaaaaaatgttgttccctattttgttgggcttaagtctattggccagttatacatcatttcaggcaaggactcgaaagagttgggaaagcttatatctgatcttgggaaattcaatggcatttttacgcaagaggaaatttatgaatttgttcagaggagaagcgattgggttcgtgtacggaaagacgttgaaaaggtaatgtacggcctaggcatacgagattgctgcattatgtaa

SEQ ID NO: 77234 - DNA, 843 bp, Saccharomyces pastorianus
atggaaccagaagatacccagctgaaagaggacattaaaaccacagtaaattacataaagcagcatggtgttgagtttgagaacaaactgctagaagatgagagattctcattcatcaagaaagatgacccactccatgaatactacaccaaactcatgaatgagtcaacagtcactgtcagcggtgaagataatgacagaaagagtgaacgagagatagcaaggccaccggattttctgttctctcaatacgatactggaatatcccgaagagacatggaagtaatcaaattgacagcacgctactatgcaaaggataaaagtattgttgaacagatgatttcaaaggatggtgaagccagattaaactttatgaacagctcacatccgctacataagacattcactgattttgtcgcccagtacaagcgagtatattcttttactggtcaagaaatcaagaaaagtaagagaaccattttagataattgttttgagagagcacagtattgggaatttgagaaagataaaaaccgggaacatgataagctcgtagagttgtgcaaaatacaatttgcagccattccatgggataaatttactcaagtggcaaaattttctatccctgaagacacagaaatcttcgaaggctctctagatttagaacagatgaggctgcgaagagtacaaactggtattaagttattcgatagtatcaagccgacaaatgaagaagaaaagatagtatccgaccaaggtaagcaaaaaggaggagatagtaagggcaaaaagcgtaaaattagagctgtgggagagacaaggttaaagaaaagtaagaaataa

SEQ ID NO: 77235 - DNA, 348 bp, Saccharomyces pastorianus
atgaaaaaacgccaaaatacgtacgccgttaatagtgatacatgtgctcaattacggtccatcatcaacctttacatacttctagctaactttgattttcatgaggcttatttcttacttttctttaaccttgtctctcccacagctctaattttacgctttttgcccttactatctcctcctttttgcttaccttggtcggatactatcttttcttcttcatttgtcggcttgatactatcgaataacttaataccagtttgtactcttcgcagcctcatctgttctaaatctagagagccttcgaagatttctgtgtcttcagggatagaaaattttgccacttga

SEQ ID NO: 77236 - DNA, 2370 bp, Saccharomyces pastorianus
atgctatcttcagctaataggttttatataaagaggcatttggcaacacatgccaatatgttcccctctgtatctaaaaattttcaaacaaaagtgccaccttatgcgaaacttttgaccaacctagacaagatgaaacaaataacaaacaatgctccattgacactagcagaaaaaattttatactcgcatctttgcgatcctgaagaatcgattacttcttctgatctgtccaccatccgtggtaataaatacttgaagctaaacccagaccgtgtagctatgcaggacgcttctgcccaaatggcgcttctacaattcatgaccaccggtctaaatcaaacatctgtcccagcatccatacattgtgatcatttaattgtaggtaaggacggtgaaactaaagatttaccctcttccatagctaccaaccaagaagttttcgatttcttggagagttgcgcaaagagatatggaattcaattctggggcccaggttctggtatcattcaccagattgttttggaaaatttctcagctccaggtctaatgatgctaggtactgattcccatacaccaaatgcaggcggtctgggagctattgccatcggtgttggtggtgcggatgcagttgatgccctcacaggcactccatgggaattaaaagcaccaaaaattttaggtgttaaattgaccggaaagttaaacggatggtccactcctaaagatgtaatcacaaagctcgctggtttactaactgtcagaggtggtaccggttatatcgttgagtacttcggcgaaggtgtatccactctatcttgcacaggtatggcaaccatctgtaatatgggagctgaaatcggtgctacaacgtcaactttcccttaccaagaagctcacaagcgttatttgcaagcaactaatagagcagaggtcgctgaagcagctgatgttgctttaaacaagtttaacttcttaagagccgacaaagatgctcaatacgataaagttattgaaattgacttatccgcaattgaacctcacgttaatggtccatttacaccagacctttcaaccccaatatctcaatatgccgaaaaaagtttgaaggaaaactggccccaaaaagttagcgctggtttgattggatcatgtaccaattcatcttatcaagacatgagtcgtgttgtcgacttggtcaagcaagcttccaaagccggcttgaaaccacgtatccccttctttgtcacccctggttcagaacaaattagagctaccttggaaagagatggaatcatcgatattttccaagaaaatggtgccatagttttagcaaatgcatgcggcccttgtatcggacaatggaatagggaagatgtctcgaaaacatcaaaagaaacgaacactatttttacatcattcaatagaaatttcagagctagaaacgatggtaataggaatacaatgaatttcttaacatccccagaaatagtaacagcgatgagttattctggagatgctcagttcaatccgctaactgactcaattaaattgccaaatgggaaggatttcaaattccaaccaccaaagggtgatgagttaccaaaaagaggatttgaacacggtagagacaaattttatcctgaaatggatccaaagccagatagcaatgtagagattaaggtagaccctaattctgatcgtttgcaattattagagccattcaaaccttggaacgggaaggaattgaagacaaacgtgcttttgaaagttgaaggtaaatgtacaacagatcatatttccgctgcgggcgtctggttgaaatataaaggccatctagaaaacatttcttacaatacattgattggtgcacaaaacaaagaaaccggtgaagtcaacaaggcttatgaccttgacggaactgaatatgatattcctggtttgatgatgaaatggaaatcagacggtagaccatggaccgtgatagcggaacataactatggtgaaggttccgcaagagagcatgctgctttgtcaccaagatttttaggcggagagattcttttagttaagtcttttgcaagaattcatgagacaaacttgaagaaacaaggtgtgttgccattgacttttgccaacgaatctgactatgataaaatatcaagcggagatgttttagaaacgttgaacctagttgacatgattgctaaggatggtaataacggtggtgaaattgatgttaaaattactaaaccaaacggtgaatcgttcaccatcaaggcaaaacatactatgtctaaagatcaaatcgattttttcaaagctggttcagcaatcaattatattggtaatatacgaagaaacgaataa

SEQ ID NO: 77237 - DNA, 327 bp, Saccharomyces pastorianus
atgtttaaggtgtcagcatgtggggtgaggataatgagtggcatatcagaaatttggattggcgaacttagagattacaagtacgctttacgtcttgatagagaagagtatccagcggtgcttgtttacgagtatgactcgtcttctactaggaactatctttttaccataaagtacagcgatcagaggccaaactggcagctcattactcgtgacgcagctttaacagcttacgatttacttaacagaggtggcgagttcacaactctcagctttccgggagccactattcaccgttcagtcagtgagctgtcccgattgcattaa

SEQ ID NO: 77238 - DNA, 2646 bp, Saccharomyces pastorianus
atgagattttcacacttcttgaagtacaatgctgtcccagaatggcaaaaccattatatggactacagcgagctgaaaaatcttatttacacgctacaaacagatgaacttcaggttggtgataacgaagaaggaattggcgcaggaaagagctctaacattacagataggttcaaaaacaagttttcttttaaaaatgcgaaggaggatacgtcttccggtatgaacaaagatgcaggcatcgttgaggaaaccatcgagttgcgagagttgcctactgctcagacggtcgctgccaaaccttctcctttcagaagaatgaaggaaaagatattttacaaaagaaggtcgtcttccgcatcgtccgtctcctccacggccaacgaaaatctgcaattagacacttatgatacgtttgttggtgatttaacagctgaaaaacagaaagtagatgatttttataagaggacagaagcgaagttctacgacaaatttgacgcgctggtgaaggacctgaagaaaatcggagttatagaatacgatatcgacgatgatactctgtttaacgaaccgattgccagcacaaatgacgaagttcccccactggacttggatgatgacgaagacgacgacgaattttacgatgatcaatctaatattgaagataatactgctttgctgcatcattcgcagtataacatcaagtctcagaaaaaatcgctgttgaagaagtcgatcgtgaacctatatatcgatctttgccagttgaagtcgttcatcgaattgaaccgcattgggtttgcaaaaattacaaagaaatcagacaaagttcttcatttgaatacaagaaccgaactgatcgaatcggaacagtttttcaaagacacatatgcattccaggcagaaacgatcgaattgctaaattccaaaatttcccagctagtcacattttatgcgcgcatcactgaccagcctcataatatttcgcatagcaagcaagagttgaaatcctacctgcatgaccacattgtttgggaaagaagtaacacctggaaagacatgttgggactgctatcgcaagcagacgagttgacaccaaaggaaacagaatataatacaaataagctggttggcaagttagatttggaatattacagatggccactacccaggccgataaacttaaaattcactagtataaacaacgttgcactaccgaaactatttttcaccaagaaagcatacaagatttactttattattctagtcactggactcttgttaggaataaagaccttcaacgacgctgctcagcaccgctgcatggcccttgtcgagtgtgtcgcctttttgtgggctagtgaggccatcccattacacattacagcattccttgtaccactacttgtagtccttttcaaagtcctaaaaacctccgacggggctataatgagtgctgcaagcgcttcatcagaaattttggccgccatgtggtcttctacaattatgattctgctggcaggttttactttgggtgaagtacttgcacaatataacatcgccaaagttcttgcctcgtggttgttggccttcgctggttgtaaacccagaaacgttcttttaatggcaatgtgtgtcgtgttcttcctatcaatgtggatttccaatgtcgcagcacctgttctaacatattcgttgttatctcccctattggatgccatggatgcggatagcccatttgcgcaagcattggtgttaggtgtagcgttggctgcaaatatcggtggtatgtcttcaccaatctcttcacctcaaaacatcatttccatgtcgtacttgaaaccctatggtattggctggggccaattctttgctgttgcattgccatctggtatcctggccatgcttttggtttggattttattgttcactactttcaagatgaataagaccaaattggaaaaatttaagcctattaagacgaaattcacagttaagcagtattatatcattgctgtcactgtggccactattttgttgtggtgtgtggaaagccagattgaaggtgcttttgggtcatcaggtcaaattgcaatcattcccatcgttttgttttttggtaccggattactatcaacacaagatttaaatgcctttccgtggtcaatcgttattttggcaatgggaggtattgctttggggaaggccgtctcatcctcgggtttgctatcaaccattgcaaaagcattacaaaagaaaattgagaatgatggtgtttttgccattctatgtattttcggtatcctgatgttggttgtgggtactttcgtctcgcatacagtatccgctattatcatcattcccttggtgcaagaagttggtgacaagcttggcaaccccaaagctgctcctatccttgttttcggttgtgcattattgtcatcctgtggtatgggactagcttcttcggggttccccaatgtcactgccatctctaaagtagatagaaagggcgatcgctatttaagtgtcatgactttcttaacgagaggtgttccagcctctattttggctttcctatgtgtcattactctaggttatggtatcatggcatctgttgtcaagggtaacgcaacctctgcgtaa

SEQ ID NO: 77239 - DNA, 3765 bp, Saccharomyces pastorianus
atgggttcttcagatgtttcaagtcgtgaatgttcattggtttataatgaagatcccgatttcaccgatagcacaacaccatgtgatcggttgggagtggacttgatgaatgttctagatgacaaggatgaaataaagcaagagtctgtcccagtctcagatcgtgaaattgaggatacggaatccgatgcttccgctgtttcttcatttgctagcgctaatgagttaatagctgagccacacgctgcaagtgaaactaatcttggaactaatggtcaagatggaagacatgtcttagaacaacaaagagacgtggttgctagactaatagaagaaaacaaggaaacgcaaaaagagggtgataaagtctgtattgtccccaaggtttggtacgataaatttttcgaccccgatgttaccgatcctgaagatataggccctattaatacacgcatgatttgcagagactttgaaaattttgtgcttgaggattacaatagatgtccgtatctgtctattgcagagcctgttttcaattttctatcagaaatttacggcatgacaagtggctcttacccagtggtaactaatttggttatcaaccaaaccacaggggagttagagacagaatacaataaatggtttttcagactacattacctgaccgaaaaacaagacgggaggaaaaggaggcatggccaggacgattcagtaatgtacctctcgatgtctgcgttgaatttagtacgtgatttggttgaaaagagtatgaatctgttttttgagaaagctgatcatctagacgttaatgcggtggattttaaaatttggtttgtgtcagagggatctgatattgccacagatagcaatgttagtacttttttgaattcttcatatgaaataactccgcttcaatttctcgaactaccgataaagaaactactaataccagacatgtttgaaaaccgtttagacaagataacttcaaatccgagtgaccttgtcatagaaattaaacctatagaagggaatcaccattggccttcaaactattttgcttataataaactcgaaccagcatcaggtactactggtttggtcaatttgggaaatacatgttacatgaattctgcgttgcaatgcctggtacacattccgcagttgtgtgattatttcctttatgatggttatgaagacgaaattaatgaagaaaatcctcttgggtaccacggctatgtggctagggcatttagtgacttggttcagaagttgtttcaaaacaggatgagcataatgcaaagaaatgctgctttccccccttcaatgttcaaatccactatcgggcactttaattcgatgttttctggttatatgcaacaggattctcaagaatttttagccttcctgttagacagtttacatgaagatttgaacaggataataaagaaagaatacacagaaaaaccatcattatctcctggtgatgacgtgaatgattggaatgtagtcaagaaactggcagacgatacttgggagatgcatttaaagagaaattgttccgttataacggatttatttgtcgggatgtacaaatcaacgctatattgtcccgaatgtcaaaatgtttctataacgtttgacccgtataatgatgttacattgccacttccggttgatacagtgtgggataaaactataaaaatttttcccatgaactctccaccacttcttcttgaagttgagttaagcaaatcgtccacttatatggacttgaagaattatgttggtaaaatgtcgggcctagatccaaatacactatttggctgtgagattttcagtaatcaaatctatgttaactatgagtcaacagagtcgaatgctcaatttttaaccttgcaggaattgatcaaacctgctgatgacgttattttttatgaattaccagtaacaaatgacaatgaggtaattgttcccgtattgaataccagaattgaaaaaggctacaaaaatgcaatgttatttggagtccctttctttattacgttaaaagaagatgaattgaataatccaggtgcaataagaatgaaattgcaaaacaggtttgtccatttaagtggtgggtatatcccatttcctgaacctgtaggaaatcgaaccgattttgctgatgcttttccattattagtagaaaaatatccagatgttgaatttgaacaatataaagatatactacagtatacgtctattaaggtgactgacaaggataaatcctttttttccatcaagattctgtctgtagaaaaagagcagcaatttgctagtaacaaccgaacagggcctaatttctggacccctatctcccagttaaaccttgacaaagctacagatatagacgataaacttgaagatgtggtgaaggatatctacaattattcatccttagtagattgcgctgaaggggtccttatgcaagtggatgatgagggagataccgagggtagtgaagcaaagaatttttccaagcccttccaatcgggagatgatgaagaaaataaagaaactgtaacaaataatgaaaatgtaaataatactaatgatcgggatgaggatatggaactaacagatgatgttgaagaagatgcaagtacagagccagaattaacagataagccagaggcgttagataaaattaaggatagcttgacttccactccgtttgcgattctttctatgaatgatattattgtttgtgagtggagcgaattgggttcaaatgaggcattttccgatgataaaatatataactgggaaaatccagctactttgcctaacaaagagttggagaacgctaagttggaaagatctaacgctaaggaaagaaccataaccttggacgattgtctccaattattttccaaaccagaaatactaggattaaccgattcgtggtactgccctacatgcaaggaacatcgtcaggctaccaaacaaatacaactttggaatacaccagatattctgctaattcaccttaaaaggtttgaaagtcaaaggtcttttagcgataaaattgatgccacggttaatttccccattacagatttggatctgtcgaggtacgttgtctataaagatgatcccagaggtttaatctatgacctgtatgcagtagataaccactatggtggtttgggtggtgggcactataccgcgtacgtaaagaattttgccgacaataaatggtactattttgatgattctcgagtaacagaaactgcgccagaaaatagtatagctggatcggcttatttgctattttacatttgccgtcataaagatggcaatggattaggcagctctaaactacaggaaataatccaaaagtcacgccacggatatgatgagcgtatcaaaaagatatacgttgaacagatgaagttgtatgaatttaataagactgacgaggaggaagatgtttctgatgatatgatagaatgtaatgaagatgtgcaggcccctgaatatagtaatcgtagtttggaggttgggtatattgaaactcaggactgcaacgacgaagatgacaatgatgatggtgagaggacaaattcaggtaggagaaagttaagattgttgaaaaaagtctacaagaataattcaggcttgggttcatcgagtacgtctgaaatatctgagggatgcccagaaaacgaagtcgctgatttgaatttaaaaaatggtgtgacactagaatcgccagaataa

SEQ ID NO: 77240 - DNA, 282 bp, Saccharomyces pastorianus
atggaaaaaaaggatttatccttgtcagtcaccttaatagacgtatactgtagtatatctttatattgttcaaattcaacatctggatatttttctactaataatggaaaagcatcagcaaaatcggttcgatttcctacaggttcaggaaatgggatatacccaccacttaaatggacaaacctgttttgcaatttcattcttattgcacctggattattcaattcatcttcttttaacgtaataaagaaagggactccaaataacattgcatttttgtag

SEQ ID NO: 77241 - DNA, 933 bp, Saccharomyces pastorianus
atggtaagtgattggaaaaatttttgcctcgagaaagcctctaggtttcgcccaacaatagataggcctttttttaatatttatttgtgggactatttcaatcgtgcggttgggtgggccactgcaggtcgcttccagccaaaggattttgagtttaccgttgggaagcagcctttgagtgaacctcgtccggtactgctttttattgccatgtattatgtggttatatttggcgggaggtccctggtaaagtcatgtaaacctctcaggttgagatttatttctcaagtccataacttgatgttgacttctgtttcctttttatggttgattttgatggtggaacagatgctacccatagtgtatcgccatgggctgtattttgctgtttgtaatgttgaatcgtggacgcaaccgatggagacattatattatctcaactatatgacaaagtttgtggagttcgcagacactgtcttgatggtgttgaaacatagaaagttgactttcctacatacataccatcatggtgctacagctttactgtgctataatcaattggttggttacacagcagttacatgggttcctgtcaccttaaacttagctgttcacgttcttatgtattggtattatttcctttctgctagcggaattcgtgtttggtggaaagcctgggttacaagactacagattgtgcagttcatgcttgatctcattgtcgtttattacgtgctttatcagaagattgttgctgcatatttcaaaaatgcttgtactccacagtgtgaggattgcttaggttcaatgacggctattgctgctggtgcagccattcttacatcctacttgtttttgttcatctctttctatatggaggtttacaaacgtggaagtgctagtggtaagaagaagatcaacaaaaacaattaa

SEQ ID NO: 77242 - DNA, 702 bp, Saccharomyces pastorianus
atgttttttatttgcaatgttgggccattcagatcttggaaggaatcgaaaatcttctggaaaatggaggacggctctcccaacgatatacaattaatactggttaccgccacggattctagccttccgtcgggcaattcaaaccaggacaaattctgcaagttcggattcgtatgtctcagtacgtccttcgagcgtggcgtggagagcgacaatgggagggactggaacttctgtcttataatcatatcaagctgggcagtcttgccagtgccaggcggacccgtgatgtacagtgaatcggacctgtgttcagaaattgccttcgccaaaaaattcataacttgttcgtactctgctgtccttgctggcaatgcaccatcgctgctattcaagttgactagctcagatgacttctgcaaaagtgcctttgtcctcaaaaaaatagactgtgagccaaactgcagtttttctggggatgattctggtgtaacatctgtgaactgcaacttttttcttttcaaaggtcgtggaggcgttgctggagcatcgtcaaatagatttcttctgatacgcttagttggagttattggtatagctgacatgaacgtatatggtactattgatgaaaatagtgcagcgcagtgttctgaatattccaaaattgttcttccagagaatatacctctactatataaatga

SEQ ID NO: 77243 - DNA, 1542 bp, Saccharomyces pastorianus
atgtcagctataccaataactccaactaagcgtatcagaagaaatctatttgacgatgctccagcaacgcctccacgacctttgaaaagaaaaaagttgcagttcacagatgttacaccagaatcatccccagaaaaactgcagtttggctcacagtctatttttttgaggacaaaggcacttttgcagaagtcatctgagctagtcaacttgaatagcagcgatggtgcattgccagcaaggacagcagagtacgaacaagttatgaattttttggcgaaggcaatttctgaacacaggtccgattcactgtacatcacgggtccgcctggcactggcaagactgcccagcttgatatgattataagacagaagttccagtccctcccattgtcgctctccacgccacgctcgaaggacgtactgagacatacgaatccgaacttgcagaatttgtcctggtttgaattgcccgacggaaggctagaatccgtggcggtaaccagtattaattgtatatcgttgggagagccgtcctccattttccagaagattttcgattccttccaagatctgaatggcccaacattgcaaataaaaaacatgcagcatctacagaggttcttagagccttatcataagaaaactacgtttgtggttgtgttggacgagatggacaggctattgcatgctaacacgagcgagacacaatcagttagaactattcttgaattgttccttttggcgaaattgcctactgtgagttttgtgttaatcggtatggctaatagtctagatatgaaagataggtttctttccaggttaaatttggacagagggttgttaccgcaaactatagtttttcagccatacactgctgagcaaatgtatgaaatcgtcattcaaaaaatgtgtagtctgcccactattatcttccaaccgatggccatcaaattcgcagcaaagaagtgtgctggaaatacgggtgaccttcgaaaactttttgatgtcttaaggggaagtatcgaaatctatgagttagaaaagcggtttctgctttcaccaacaagaggatcattgaactctgcgcaagttcctttgacgccaactacttctccggtaaagaaatcgtatccagaaccacaaggtaaaataggcttgaactacatagccaaggtcttctcaaaattcgtgaacaataattctacgagaacgaggatagccaaactaaacatccagcaaaaattaattctttgcaccataattcaatcactgaagctaaattccgatgctacaatcgacgaatcgtttgatcattatatcaaagcgataacaaaaactgatactttagcaccattgcagagaaatgaatttttggaaatctgtacaattttagaaacttgtgggctggtttcaatcaaaaagacaaagtgtaaagggaaaaccaagagatttgttgataagattgatgttgatctcgacatgcgagaattttatgatgagatgaccaaaatttcaattttgaaacctttccttcactag

SEQ ID NO: 77244 - DNA, 1209 bp, Saccharomyces pastorianus
atgtttcaacagctgtcggcatccattaggcacaatgcacacataatttttttatgcataagttggtattttatttcatcgttggcatctcaggtaacgaagcaggtactaacggtttgcccattaccactttttttgggtgagtttcagttcatttatactgctgtgctagcatggtttacgtgttatattgcatatagtttcccaggattttatcgcatatttcctaatggtacttttccggaatattatatcgacgacagagaaactagccgtgcagctaggaaagaatcaaaactatcctccctcattataccgccctctaatccaatcctgcaaacagttctacctttaggtcttttccaatttgtagggaaatattttggacatacagctacctctttggtgcctgtttccacggttgcaagtataaaaacgctatcccccatgtttatccttttgctccaaaagattttgaaaatatccactttgaaaattactttaactcttatctttagtttatgcactttagttcttggagtttggattatagttcaagaagataatcgttcaccggcctcttccaatgagctgagagaattctctaaatacggcgtaatatgcgctatgatatcaatgttcatttttgtcttgcaaaatatatatggcaagaccgtgttcacgtacagatctcaaacagatgaatctcaaagtaattctggattctcacggcaagaatcacctttacccttatatgaaaagttggatgagaaacttgttgcgaaaaagaaacctaaatcatatgacaaattgactttaatgatttatatttcccttgttggattttgtttatcgtttggctggtttatcactctagaatttcctgtactatttaggtatttttttcaaattaacagctcttctacagtaataaaagcttttccagtctctttatttttactgaacgggacattccacttcattcaggcaatgattacatttcatttactgggtgaggtctcaactttaacatattcaatagcgaatctgatgaagcgctttgccattattgcggttagttgggtctttattggaagaagaattacttggctgcaagtgttcggtttggttctgaacacattagggttattcctttatgaaagatgcacatcacaatcgaaaataaaagcgaaaatacgtcctgagtag

SEQ ID NO: 77245 - DNA, 705 bp, Saccharomyces pastorianus
atgttttcacagattgttcttttgctcagtgcatttatttatgtcgtcagtgctacggccaggagagggaccattaagggtcgcttagacttagcagcaagtaacatcaccggctttgtttcaactagaacaagtttcaaactttatcagatcggcaatttttcgacagaatatccttacacatctacgaccatgtttcaagatgacgaaggcaactttgaattcgctaatctccctttaaacgacggtgttaatgaaacgacatactatgtgatgtacccagcatctatggacttcaatctgaagccaaacagaattcttattgaattcaagaatttagagaatggcaccttacaattgaacgcgttcaagaacttttttggaagagaatatttcccatccaaagatataacgtacccagaaaaattacaatctatgaaggtgcacccttatattacagtggagcttttacataaggccccgattagatcttatttacaggctagaaacgtcagtatcttttctacaggtattgtgggtaatattttgaactcacgttggaaactggcgggcgttattaccttaattgcccttgtcgttttcccaatcatagtagaaaagttggaccccgaaacagctcgagccatcagagaggaggcaaaaagaaaacaaagagaaaagtatgctgccgttgcctcaaagtag

SEQ ID NO: 77246 - DNA, 393 bp, Saccharomyces pastorianus
atgaccagatcttccgttttagctgatgctttgaatgccattaacaacgctgaaaagaccggtaagcgtcaagttttaatcagaccatcctccaaggtcattatcaagtttttgcaagttatgcaaaagcacggttacattggtgaatttgaatacatcgatgaccacagatctggtaagattgttgttcaattgaacggtagattgaacaagtgtggtgttatttccccaagatttaacgttaagattggtgacattgaaaaatggactgccaacttgttgccagccagacaattcggttacgtcatcttgaccacctctgctggtatcatggaccatgaagaagccagaagaaagcacgtttctggtaagattttgggtttcgtttactaa

SEQ ID NO: 77247 - DNA, 2460 bp, Saccharomyces pastorianus
atgagttctttggacgaggatgaagaggacttcgaaatgctggacacggagaacctccagtttatggggaagaagatgtttggcaaacaggccggcgaagacgagagtgatgattttgctatagggggtagcaccccgaccaataaactgaaattttatccatattcgaacaacaaattgacaagaagtacggggaccttgaacctgtcattaagtaatacagctttgtcagaggctaactccaaatttcttgggaaaattgaagaagaggaagaagaggaggaagaaggcaaggatgaggaaagcgtggattctcgtattaaaaggtggtctccgttccatgaaaatgaaagtgttactactcctattacaaaaagatctgcggaaaaaacgaacagtcctatttctctcaaacaatggaaccagcgatggtttccgaaaaatgatgctcgcactgaaaatacatcctcatcctcttcatatagcgtcgctaaacctaaccaatcagcctttacgtcttcgggcctcgtatctaaaatgtctatggacacttcgttataccctgcgaaattgaggataccagaaacaccagtgaaaaaatcacccttagtggagggaagagaccataagcatgtccacctttcgagttcgaaaaatgcatcgtcttctctaagtgtttcccctttaaattttgttgaagacaataatttacaagaagaccttttattttcagattctccgtcttcgaaagctttaccttccatccatgtaccaaccatagactcatccccactgagcgaggcaaaatatcatgcacatgatcgtcacaataaccagacaaacatcctgtctcccactaatagcttggttaccaacagctctccacaaacattgcattctaacaagttcaaaaaaatcaaaagagcaaggaattcggttattttgaaaaatagagagctaacaaacagtttacaacaattcaaagatgatttatacggcacggacgagaatttcccacctccaatcataatatcaagtcatcattcaactagaaagaaccctcaaccttatcaatttcgtggacgctatgacaatgacactgacgaagagatctccactccaacaagacgaaaatctattattggggcaacatctcaaacacatagagaaagcagaccattgtcactctcctctgccatcgtgacaaacacaacaagtgcagagacgcattccatatcttccaccgattcttcgccgttaaattccaaaaggcgtctaatctcttcaaataagttatcagcaaatccagattcccatcttttcgaaaaatttacgaatgtgcattccattggtaaaggccagttttccacggtctaccaggttacgtttgcccaaacaaacaaaaagtatgcaatcaaagccattaaaccaaacaaatataattccttgaaacgcatattactggaaattaaaatactaaacgaggtaacaaaccaaattacaatggatcaagaagggaaggaatacatcatcgattacatcagttcctggaagtttcaaaattcatactatattatgacagaattgtgcgaaaatggtaatttggatggatttttacaagagcaagttatcgcaaagaaaaaaaggttggaagattggagaatttggaaaatcatcgtagaattaagcctagctttacgattcatccatgattcttgtcacattgtgcatctggacttgaaacccgcaaacgtcatgatcacatttgaaggtaacctaaaactaggtgactttggaatggctactcatttaccgttggaggataaaagttttgaaaatgaaggtgacagagaatatattgcaccagaaatcatttctgattgtacgtacgattacaaggcagatatcttttccctgggcctgatgattgttgaaattgcagcgaacgttgtgttacctgacaatggcaacgcatggcataagttgagatcgggtgatttatcggatgcaggaagattaagttccacagatattcattctgaatcattattttcagacactacgaaagtagatacaaatgatttatttgattttgaaagagacaatatcagtggtaatagtaccaacgctggcacctccactgttcataacaatagtaatatcaacaaccctaatatgaataatggcaacgataataataatgtcaatactgccgctaccaagaatcgtcttattttgcataaaagttctaaaattcccgcatgggtaccgaaatttcttattgatggtgaatcacttgagagaatagtacgatggatgatagagcccaattatgagagaaggcccacggcaaatcaaatcttacaaactgaggaatgcctgtatgtagaaatgacacgcaatgcaggtgctattatccaagaagacgactttggacctaagccaaaattttttatatga

SEQ ID NO: 77248 - DNA, 1761 bp, Saccharomyces pastorianus
atgctgattaggttaaagaagagaaaaatcctgcaggtcatcgtgagcgcagtggtgctaattttattcttttgttctgtgcataatgatgtgtcttctagttggttatacggtaaaaagcttagattgccggttctaacaaggtcgaaccttaaaaacaatttttacacaatactggtacaagccatcgcggaaaacaagccaacagattcgtctccggacttgagtaagttgcatggggcggaagggtgtagctttgcaaataacgttgctgcacatgactccggacacgatagtgacttaagttacgagagcttgagtaaatgctataatttgaataaaacagtacaagaaagcctacgagaagtgcacagtaagtttacagacaccttatcagggaaactgaatttttccatcccacaaagagaggcacttttctcgggttctgaaggcattgtcaccattggaggtggaaagtattctgtgctcgcgtatacgatgatcaaaaagttgagggacacgggtactacattgcctattgaagtcatcattccgcctcaggacgaaggcgaggatgatttttgtaaaaactggttgccgaaattcaatggtaagtgcatttatttctcagatatcgttccttcaaagccattaagcgatttaaaactcacacacttccagttgaaagtctttgggttgataatttccagtttcaagcgtattatcttcttggacgcagataactatgcggtgaaaaaccttgaccttgcttttaacactacatccttcaacgatactggcctgatattgtggcccgatttttggagacgtgtcacccctcccgccttttacaacattataggatctagcattgacatcggcaaaagagtccgttttgttagtgacgatatttcccccgtgtcacgttatgatccatttgttagtaactcaaacgattacactccaaaggagagacaggagcatttcctgaaacatgttcccttacatgatctggacggcacgatgccagacttgagctctgaatcaggccagatggtgattgataagattcgccatttcaacactctattactggcgctatactataatgtttatgggcctacctggtattataagatgatttctcaaggcactgccggtgaaggtgacaaagacactttcgtcgctgctgcccatgccttgaatatgccatactatcaagtgaggactaaatttgaatttgatggtttcttctatcaaaaagatgattacaagggtctcgccttgctccagcatgattttgaacaagattacaagcaataccaaaaggcgcagcagaaagttaaagccaacattgaggaattttccaaactggatccagattatactttggacaatggtttcttgaaaactttgatggttaatgatgacggttctgatttggatatcatgttcattcatgccagtttctacaaggcagatccatggactctttatcatgaaaacagatttatcggtccaaatggcgaacaagtacggggcttcaggaagccgcatcgctatggaatggattttgaattgtttttattcaatgatatgagggggtccttctgtaccactccgaaaagccaagttattaaattcaagtattttaccgataaagttaataccccagaatgggatgcaatgtgtgagtatttgaccaatcatgttaattatctggagagcacacacaaagaagctatgggggagaaaaactaa

SEQ ID NO: 77249 - DNA, 882 bp, Saccharomyces pastorianus
atggcatctgtgaacaattaccaggttgattgcgggtcaaggtctgcttgcattcaacccagaattaataacggcattcacgatgaagaatcgctatttgaagtcctggaactctcagaagaggaatttgagctagacttccatagattaaagtcattcaatgatgtaagggttatcaataacccagatttatctccagaatgtacaaatactgccattagtcgcgatgagacactggaatctgcaagtagtgccttcgaagttccttctgacgaaattgctatactgtcgatatccagtgacagcaataaaaattctccgccctcagagcagccggcgcccgctcttcgtaacattcgatcgtctagtaactctgaccggatcgatgagtggtgtttgggcagccatttatttaatgagctgcatcaaaatgtccctcaatcaagcgacggtgtcaatcatggatttcccgtttattcctttaaggaaagagaactttatacctctgcgaaattaaagaaacttacaaatgcccaaagaattgctgtgcagaaactatcaagagacttgtatccaattctaagaacatgctaccgcgagaaaactcgccggcaattattgacataccatcatgaaagaatatttgacgatataccatcttttttcccccagcgtgactttattttcaattactactcgatgcctcttgaattcgacaggttttcagacgtagatatagattcgtcatcgcggtcacgatttacagatgagagcactggagaaacattaaaccgttcaccaagcgcagcgtcttcgtcgttggaaaacacatcttggtttggctggactttactttctaggtttttggacagagaatggtag

SEQ ID NO: 77250 - DNA, 372 bp, Saccharomyces pastorianus
atgaaactaccggtagcacagtacagtgcaccagatggtgtggaaaaaagttttgcaccaatacgcgatgaccctcgatacatgaccacagagggaaggacaactgggcccagtgaccatgtgctaaacgctggccaaatcgatagagacaaaccttcagaaccggaacgcacgaaagatggctcacaactgacatacttaggccagctgcgcacgcagctgacggggctacaggacgatataaacgagtttttgacaggaagaatggaattggcaaaaaataagaagaaagccggcgcagacgagaagcggatccaggaagagattaatcagctattagatggtggtgatggtgacgaagatgctgtttag

SEQ ID NO: 77251 - DNA, 1269 bp, Saccharomyces pastorianus
atggcaatcaaaccaagaacgaagggcaaaacgtactcctcaagatcggtgggttcgcagtggttcaacaggcttggtttcaagcagaacaagtacggaacttgtaaatttttgtcgataataacggcctttgtttttatcctctatttcttctccaatcgcttctatccaatttctcgttccgccggtgcatcatattctccatcccatgggctgtatattaacgaaattcctgcctccagccggttgatttatccacatgtagaacatgtgcctgtgttaaaacaaatgaccgttaggggcctgtatattacgaggctagaagtggatggcagtaaaagattaattttgaaaccagaagagaatgctttgacagatgaagaaaaaaagaagactactgatcaaattctattagtgaagcactcgttcttagaccatggtaaattagtgtatcggaagagcaatgatgcacctgaagtggtcgtagtaaccctgatagattttgaaaactacgaattagaaacaattattcaaattgttcaaaatagggttgattacgctcaaaagcaccaatatggtgtatacatccgttggatacaggagtttttgcctgttcttgaaaatcagaatttggctgaaagctacgaattcattaagccattggtgataagagccgccatgcatgctttcccaactgccaagtatattcattttgttgatcaagatgctttattgatgaatctcgatctttctttacaaaaatacctgttagatccaaagattatggatttggctctattaaagaacgtccctgttgtggcgaattcgaacatcaagacgtacaatcattttgaatatagttcggcaaagattatcattccacatgatgcggatggtaatattgatgcgtcctcatttgttattgccaatgacttttatggtaaagctctgatagactacttgaatgatccgttactgagaaatttcccatgggataataccggtgataagttgagtgctgctatcggtcatattttacagtggcatcctacattactgggtaagacggcaatcgtcataccaaaagttttggcaagtcagtacgatgcatccttggatcaagaaggtgagtctggaaacggtgcttctaatggcgatgtttaccattataatgaaggggacttggctgcctccttcaagggatgtagatcaagaggtacgtgtgctagtgaaataggtcacatgtaccagaaaatcaagaaatcttag

SEQ ID NO: 77252 - DNA, 1836 bp, Saccharomyces pastorianus
atggagatattcaaggaagaagaagaagaagctttttcggtgatagaaggtataatatatgcctgtgaggtgtatgaccctgtaccccgtcatttacataaaagcaaaacaaagatcatcaatgccgctaaattaattatagaaacgcatctttcatactatacaatactcaataacatttcagatatacaagcctatctttttacttggcttagggatcttggaacgacaggttcataccaaacaattctttcagaaagtatttctctcatgtttgaccgcactgtatctatcttcaggaaatgtacgatagagggaggttttccacatttgatcgcacggctttatctcagattgaaaagctaccagaagctcttaaacgatgcaggattaaagatttttttttcaagctacgattatgctttcggggctgcatacaaccttgtaaattgctctgaatacaggtatgacgaagttcattacatatcgaacggcactcactcattagttgcatcgatgaagatagatcctgctgaagtcattaaaagggaacattttaggcttacaattccgaaatttaacatatctaatatattaattgaaatttttcatttgctcgatggattagcattttttaaggtgaaccctgatagtttatctatatctactgcttcagcagaaacaatctttcacagtatctccgaaggtaatcatcaggtcctagaattggggagaagtttaatgtttccattgttgaggactggagattttgaaatctgtcgtactgacgacgcgggagctgtcataacatttacagaagcgaaggatgtaaaactagaaataatcagtctggatgaagtttcctgggtaatgcagtggaaatcttgtcttcaaaattatgagagaaagacagcaaatgacagttcatttatcaaaacacacctacaatttaagaaggccaacaatttcaatgaagataataatgggctaggactaattgtagacagaaatattccaacagatgattttatgctagcttctacaaaccgtcaaagtcccccgccttcaaatactggttgttcattacacaggtctaaacccttgcatatccctttatcatctgttattcgtgaagacttttatgatagctctctaaatgagcgtatatctaaagacggagatagcagttctgaatccttcagtggtgccgaaagtatcttatcagactacgattttcatgataatgaattttttaacaaccagtcacctcattatttttcagaacacatagacaataactcgagagaggtggtaataacagatgaaaatacgataatatctttggaaaatacccaagtaagtcggtggtcaaattactcatggcaaaaaatttcaccgcatcaattacaggtctctattatccaactgcgcatgggaaacttcattgtggcttataattctgatcataaccttcatcagttcaaaattcgtttgtgtgacgatataaaatgtatacaatccacagagcaagacatacaaatacgtgtcccgctcggagcaataatgtgcagcgtcactggtatcttgaatattaggacgaaggacgctgacaagttacttcgggtattaagcttttataccactgaccacacggaagctgtatcgcactcaaacaatcaaggtgctactgcaagtccactttcgtcagtttcatcagcaatggatctcaagcattcattacagaaatgttcctctacaataatgccccaagagttgacgcaggacgtcatcggttcaaaatcagacctaatcagtaatattcgtcaaaaaatataa

SEQ ID NO: 77253 - DNA, 978 bp, Saccharomyces pastorianus
atgctgccatcattaaggaagggatgcttcattgtgaattccataagattgaaattgccccgattctactcattaaatgcccagccattggggacagacaacaccattgagaataacactcctacggaaacaaatagattgagcaaaacttcacagaagttttgggaaaaggtgtcactaaatagggatgttgagaaaggaaagattgctctacaattagatggcaggactataaaaactcctctaggaaatggaattatagtcgataatgcaaagtctctcttagcatacctattaaaactggagtggtcgtccctatccagtctttccatcaaaactcactctttgccactaacttcattagtggcaagatgcatagatttacaaatgacaaatgagcctggctgtgaccctcaattagttgcaaagattggaggcaacagtgatgttataaaaaatcagttgttaagatatttagataccgatactttattggtcttttcccctatgaatgagtttgaaggaaggttacgcaatgcgcaaaatgagttatatatacccatcatcaaaggaatggaagagtttttacgcaacttttcatccgagtctaatattcgactacaaattttagatgccgacatccatgggttacgaggtaatcagcagtcggatatcgttaagagtgcagcaaaaaattatatgagcagcttatcaccatgggatcttgcaattcttgaaaaaactgtattaaccacaaagtccttcatttgcggcgtgctattattagaaaataaaaaagatactgcgaacttaattcctgccttgaaaactgatatggataatattgtacgtgccgccaccttagaaacaatcttccaagttgaaaagtggggagaggttgaagatactcatgacgttgacaaaagagacatcagaagaaaaattcatactgctgcgattgctgcttttaagcaataa

SEQ ID NO: 77254 - DNA, 330 bp, Saccharomyces pastorianus
atgtcacagatagcacaagaaatgacagtgagcttaagaaacgccaggacgcaattggatatggtcaatcagcagctagcatatttggacagacaagaaaagcttgctgaattgacaaagaaagaactagagtcttatccaacggacaaaatatggagatcttgcggtaaatcgtttatcttacaggataaatccaaatacgttaatgatttatcacatgacgaaactgttcttctggatcaaagaaaaacattaaagataaaaaagaactatttagaaactactgttgaaaaaacaatagataatctaaaggcattgatgaagaattaa

SEQ ID NO: 77255 - DNA, 831 bp, Saccharomyces pastorianus
atgcgtttacaaagaaattccatcatatgtgctttggtgtttttagtctcatttgtgctgggagatgtgaatattgtttcccccagctccaaggcaacattcagtccaagtggcggtactgtctctgttcccgttgaatggatggataatggggcatatccctcgttaagcaagatttcaactttcacgttcagtctttgtactggtcctaataacaacattgactgtgtggccgtacttgccagtaaaattactccaagtgagctaacacaagatgataaagtttactcttacacagctgagtttgcttcgactttaactgggaacggtcaatattacattcaagtttttgcccaggtggacggtcaaggttacactatccattatacaccaagattccagttgacttccatgggcggtgttacggcttatacatatagtgccacaactgaacctactccccagacttctattcaaacaaccactacaaacaacgcccaagccactactattgacagtcgttcatttactgttccgtacaccaagcagactggtacgtcgcgtttcgctccaatgcaaatgcagccaaatactaaagtgaccgctaccacatggacaaggaaatttgccactagtgctgtgacatattactctacctttgggtcattgccagagcaagcaactacgataactcctggctggtcttatacgatatcatcgggagtaaactacgctactcctgcatctatgccttcagataatggtggttggtacaaaccatccaagagattgtctttgtctgcaaggaaaatcaatatgagaaaagtatga

SEQ ID NO: 77256 - DNA, 369 bp, Saccharomyces pastorianus
atggccagcgaaacaccaagagttgaccccacagaaatctccaacgtcaatgctcctgtgtttaggataatagcgcaaatcaaatcacaacccactgaatctcagttgattttacaatcgccaaccatatcatcgaaaaacggcagcgaggttgaaatgattacgttgaacaatattcgtgtatctatgaataaaacatttgagatcgactcgtggtatgagtttgtttgcaggaacaatgatgacggcgagctaggatttttgattctagacgctgtactatgcaaattcaaggagaacgaagatttaagcttaaacggtgtggttgctttacaaagactatgtaagaaatacccagaaatatactag

SEQ ID NO: 77257 - DNA, 1731 bp, Saccharomyces pastorianus
atgatcgccttaccagtagagaaggcccctagaaagtccctatggcaaaggcacagagcctttattagtggaatagttgcccttattatcatcggcaccttcttcctcacttcgggtctccacccagcaccacctcatgaggcaaagcgtccacaccatggaaaaggtcccatgcactcacccaaatgtgagaagattgaaccattaagtccatcattcaaacattccgtcgacacaattcttcatgaccctgcctttagaaacagctccattgaaaaactgtccaatgctgttagaatccccactgtagtccaagacaaaaaccccaaccccgcagatgatccggatttctataagcatttttatgaattacacgactattttgagaagactttccctaatattcacaagcatttgaaattggagaaagtcaatgagctgggtcttctatacacatgggaaggttctgatcctgatctaaaaccattattgttaatggcccatcaagatgttgtacctgtaaacaacgaaactttatcatcctggaagttccctccattttctggtcactatgatccagaaacagattttgtttgggggcgtggttctaacgattgtaagaacttgttaattgccgagtttgaagctatcgaacaactgttgatagatggattcaagcccaacagaactattgttatgtcgcttggttttgatgaagaagcaagcggcaccctcggtgctgccagcttagcctcatttcttcacgaaagatatggtgatgatggtatttacagtatcattgacgagggtgaaggtatcatggaagtcgacaaggatgtctttgttgccactccaatcaacgctgaaaaaggctatgtcgacttcgaagtcagcattctaggccatggtggtcattcctctgtcccacctgatcataccacgatcggtatcgcttcagaactgattactgaatttgaagccaacccatttgactacgaatttgagtttgacaatccaatctatggattgttgacatgtgctgctgaacattctaaatctttaagtaaggatgtgaagaagacaattttgggcgcaccattctgtcctagaaggaaggacaagcttgttgagtacatttccaaccaatcacatttgcgcagcttaataagaacaacacaagctgttgatatcattaatggtggtgttaaagctaatgctctgcccgaaactaccagattcttgatcaatcacagaattaatttacattcttctgtggctgaagtctttgaaagaaacatagaatatgcgaaaaagattgctgagaagtatggctatggtttatctaagaacggtgacgattacattatccctgaaaccgacttaggtcacattgacattactctcttgagagaattggaaccagcaccactttcgccaagttcaggccctgtttgggacattttggcaggtactattcaagatgtttttgaaaacggtgttctacaaaacaacgaagagttctatgtgactactggtttattctctggtaacaccgatactaaatactactggaatttgtccaagaacatttataggtttgttggctctatcattgatattgatttactgaagacattgcattcggttaatgaacacgtggatgtcccaggtcatttatctgccattgcctttgtttacgagtatatcgttaatgttaacgaatacgcttaa

SEQ ID NO: 77258 - DNA, 369 bp, Saccharomyces pastorianus
atgtataaagaaataaacggtaaagacaaaaaaaattacttattacaaatcgcaattacaattaaagtacaagacttcctttgggacagaaaacgtgaaacaagccccaactatgcatgtctggttaattatgatgatgttgaaggtggaggagaagacatccttgttgatgctgatgataatgccaacgcctttttttgcttcttcttgaggataatcttatccatgtatgaatttatgaattctttaactttatgccttttttctttggttaagtcatcaggcggcgctcttgaagaatcttttttgagttcctttgtagttaggattttcacgatgtctttagcacattgtttaatgttttcatga

SEQ ID NO: 77259 - DNA, 2202 bp, Saccharomyces pastorianus
atgtcgaagaaccaaagtgtgagtgcgtcggaagatgaaaaagaaatactgaataacaacgctgagggccataaacctcaaaggctttttgatcaagagcctgatctcacagaggaagcattgaccaaatttgaaaacttggatgactgtatatatgcgaacaagaggatcggaacatttaagaataatgatttcatggaatgtgactgttatgaagaattctcagatggcgtcaaccatgcctgtgacgaggattctgactgtatcaatagacttacgttgatagaatgtgtcaacgatttgtgttcatcttgtggtaatgattgtcaaaatcagagatttcaaaagaagcagtacgctccgatagccatatttaaaacaaagcataaaggttatggcgtaagagccgaacaggacatagaagccaaccagttcatttacgagtacaaaggtgaggtgatcgaggagatggaatttagagataggttaatagactatgaccaacgtcatttcaagcatttttattttatgatgttacagaacggagaattcattgacgccacaataaagggttcgttggccagattttgcaatcactcttgcagccccaatgcatatgttaataaatgggttgttaaggataagctacgcatgggaatatttgctcaaagaaaaattttaaaaggtgaggaaatcacttttgattataatgtggatcgttatggtgctcaagctcagaaatgctactgtgaggagccaaattgtattgggtttctcggtggtaagactcaaacagatgcggcatctttattgccccagaacatcgccgatgccttgggagtgactgtttccatggagaaaaaatggctaaagttaaagaaattaagcggtgagccaataataaagaatgaaaacgagaacataaatattgaatttcttcaatcattggaggtccaacctatcgacagcccagtggatgtgacgaagatcatgagtgtattactacagcaagataataagataattgcatccaaactcttgaagagactttttactatcgatgatgactctcttcgccatcaggctatcaaactacacggttacacctgttttagcaaaatgcttaaattgtttatcacggaacaacctcaggtagatggaaaaggaaacgagactgaagaagatgatataaagtttataaagggaattttagattttttgttggaattaccaaagacaactcgaaacggtattgagtcgtcacaaattgataatgtagtaaaaactctccctgcaaagtttccatttttaaagccaaactgcgatgagttattggagaaatggtcgaaatttgaaacatataaaaggataacgaagaaagacataaacgtcgcagccagcaaaatgatagatttgagaagggtgagattacctccaggctgggagatcattcacgaaaacggtcgcccattgtattataatgcagaacagaaaacgaaactacactatccaccttcgggatcatctaaggtctttagttcaaggtcaaatacacaagtaaattctccgagtagcagtggaataccaaaaacgcctggcgctttagactctaagaaacataagctgagtgacgaagaatatgagaggaagaaacaaaaaagactggaatacgaaagaattgcgctagaaagagccaaacaagaagaattggaaagcctgaagcaaaagctaaagcttgagaatgaaagaaaaagcgttttggaggacattatagcggaggccaacaaacagaaggagttacaaaaggaagaggccaaaaaactagtggaagcaaaagaggctaagcggttgaaaagaaaaacggtctcccagtcccaaagactagagcacaactggaataaattctttgcatcttttgtacccaacttaataaaaaaaaccccacaaagtaaacaatttgatcatgaaaacattaaacaatgtgctaaagacatcgtgaaaatcctaactacaaaggaactcaaaaaagattcttcaagagcgccgcctgatgacttaaccaaagaaaaaaggcataaagttaaagaattcataaattcatacatggataagattatcctcaagaagaagcaaaaaaaggcgttggcattatcatcagcatcaacaaggatgtcttctcctccaccttcaacatcatcataa

SEQ ID NO: 77260 - DNA, 1059 bp, Saccharomyces pastorianus
atggcttcagaaaaagaaattaggagagagagattcttgaacgttttccctaaattagtagaggaattgaacgcatcgcttttggcttacgatatgcctaaggaagcacgtgactggtatgcccactcattgaactacaacactccaggcggtaagttaaatagaggtttgtccgttgtggacacgtatgctattctctccaacaagaccgttgaacaattggggcaagaagaatacgaaaaggttgctattctaggttggtgcattgagttgttgcaggcttacttcttggtcgccgatgatatgatggacaagtccattaccagaagaggccaaccatgttggtacaaggttcctgaagttggggaaattgccatcaatgacgcattcatgttagaggctgctatctacaagcttttgaaatctcacttcagaaacgaaaaatactacatagatatcaccgaattgttccatgaagtcaccttccaaaccgaattgggccaattgatggacttaatcactgcacctgaagacaaagtcgacttgagtaagttctccctaaagaagcactccttcatagttactttcaagactgcttactattctttctacttgcctgtcgcattggctatgtacgttgccggtatcacagatgaaaaggatttgaaacaagccagagatgtcttgattccattgggtgaatatttccaaattcaagatgactacttagactgcttcggtaccccagaacagatcggtaagatcggtacagatatccaagataacaaatgttcttgggtaatcaacaaggcattagaacttgcttccgcagaacaaagaaagactttagacgaaaattacggtaagaaggactcagtcgcagaagccaaatgcaaaaagattttcaatgacttgaaaattgaacagctataccacgaatatgaagagtctattgccaaggatttgaaggccaaaatttctcaggtcgatgagtctcgtggcttcaaagctgatgtcttaactgcgttcttgaacaaagtttacaagagaagcaaatag

SEQ ID NO: 77261 - DNA, 285 bp, Saccharomyces pastorianus
atgggtcctccaagcggtaaaacttacatgggatggtggggtcacatgggtggtccaaagcaaaaaggtataacctcatatgctgtgtctccatatgctcaaaagccattacaaggtattttccataacgctgtattcaatagttttagaagatttaagtctcaatttctatatgtattaatacctgcgggaatttattggtactggtggaagaacggtaacgagtataatgaatttctgtacagcaaagctggtagagaagagctggaaagagttaatgtttaa

SEQ ID NO: 77262 - DNA, 2568 bp, Saccharomyces pastorianus
atgggagatgagaagctttcacgccacacatctttgaagagggccagatcgctctccgaatccattaagggtctatttaagccttcagggatatcaggcagtaataatgctgcggctccttcatctcgtcccggtcaggaccaagcacattctcatcaaacagcaagaataataactagcaacgtatcttccccgtctatatcccccgtacatagccctgttctacaagcggctcctaagcatcacaagctgggcgtccctaatattgcaaaactctcgttgtcacctagtagggaaccatctttgaattcagaaaatgaaatgttttcacaagaatctttcataagtgaaaaagatgaagatgaagccaatttgttagagagagaggatcttcaaaataaaaaggaagagaaagctcgtgcaaaacatgtacgttccaaggaagcttatgtgcctcatcaccgctatacagttggtagcgatgaggttgaaagacaaccaagggaaaggctgaaaaacttcccacaaaacgcaggttcttcaaaccctgcaaatagcaatgccaaccatgttttggatcaggagaataacttttctattgatgctatgcttgattatgacgaagaatcaaaacttagaaggagaaacagtctgggcgtacgtaatcatagcaatcgtacaagaagtaggaagaacagtttgtccacaccaaggtcaccaccaatgaaaaatggaaatgatggaatgaactcaaatgccaccaacaatgttggtaatggtacaggaaatagaatatacatgaggggaagaaatcactcagactctatcagtgcttccagcttaccaaaatttcaagaaatcgaatgtaaatgtattttggatttaggtcatttcaaagtctttgaaaacggataccacgaacattctttgagagtgctgccaattattacaaacaataaaaatgtggatagtggcgatgaaaaggatgctgacgcctctgtaaacagcggcgatgatggtgacaatgacagtgaggcaaatatgcataaacaaaaatctgtgttttctttaagtggactattcaaatctcataaggatggaaaccaacaacagcagcaacagcagcaacaagaagaaaacggcgaacaaatcaatctagaaaaagcattttcaataataccatcccagagattcatcaaatcacagactttaaaaaaatcgagaacgagtaaccttaaaaatggcaataatgatgaattgatgaaaaacgatggtaaaaatattccgcaaatcgtgaatcctaacgctgctgtaggtgctgaagagttgaagctaatcaatgcattatcggaaaaaatacgaaagggcctcaaaagtgaaaatacaaaaggcaacaatggcgaaggcagaagcaatagcaataaacaggaggattctgatgacacagagggcaaggcaggaacaaccaatgacgatacatcccataaaccttgttcacaaaaatacggaaaatctattggggtcgtcggtgcaggtgcatacggggtggtcaaaatttgcgcaaggtgcaagactgctaaagatgtcctaccatacagtacctactctaatggaaaaaaactattctttgccgtcaaagagctgaagcccaagccaggtgaccaaattgataaattttgcacgagattaacctctgagttcattattggacactcactgagccatccgcattttgaggcaaatgcgatgatagcaggaaatgtttcaagaacaactccaccaaaacatgtcttcaatgccccaaacattttgaaaattttggacctaatggaatatagcaattccttcgtagaagtgatggaattttgtgcttcaggtgatttatattcgttgctaacaaggaacaacatctcaaatgaatcgaataacgggagttcaagattaatccaaactgttaaagaaggttctgggagtccattgcacccattagaggcagactgttttatgaaacagcttttgaatggtgttcaatacatgcatgatcatggtatagcacactgtgatctgaaacccgaaaatatccttttccaacctaatgggttgttaaaaatttgtgattttggtactagttcagttttccagactgcctgggagaaacacgtccacttccagagtggagccatgggttcagagccatatgtggcgcctgaagaatttataagagatgcggaatacgatccgcgtctggtagattgttggagttgtggtattgtttactgtacaatggtcatgggacagtatctttggaaaatcgccattcctgaaaaggattctctttttaaatcatttctcagtgaaattaaagatgacggacagttttatctatttgaggaattaagacatgttagtagcgaactgaataggttgaggaaaattgcactatatagaacgttccaggtcgaccccacgaagagaatcaccattgaacaattactacaaagctcctggatgaggaaaacaaaatgctgtgtagtttatagacccttacataccaaggttagtaaataa

SEQ ID NO: 77263 - DNA, 1194 bp, Saccharomyces pastorianus
atgtcgactgaagaacaaaatggaggtggtcaaaagtctctagatgatagacaaggtgaggaatcacaaacaggtgagactagtgaaagggaaacaacagccacagagagcggtaacgaaagtaagtctgtagaaaaagagggtggagaaactcaagaaaaaccgaagcagccacatgtcacttattacaatgaggagcagtataaacagtttattgcccaagcgagagttacaggtgggaagtatagtttacaagactttcagatattaaggacactgggtacgggttcttttggtagggtccatttgattagatcaagacataatggcagatactacgccatgaaagttttgaaaaaggaaatcgtggtaagattgaaacaggtggagcataccaacgacgagcgattgatgctttctatcgtaacacatccgtttattattagaatgtgggggactttccaagatgctcagcaaattttcatgattatggattatattgaaggtggagaattgttttctttgttaaggaaatcccaaagatttcccaacccagttgctaaattttacgcagcggaagtttgtttagctttggagtacttgcatagcaaggacattatttatagggatttgaaaccggaaaatatcttgcttgataaaaacgggcatataaagataacagatttcgggtttgccaaatacgttcctgacgtcacatatacattatgcggtactcccgactacatagcacccgaggtcgttagtactaaaccatataataaatctatcgattggtggagtttcggtattctgatttacgaaatgctagcaggatacacgccattttacgactctaacacgatgaaaacctatgagaaaatcttgaatgccgaattgagatttccaccatttttcaacgaagatgtaaaggacctgttgagtagattgatcacaagagacttaagtcaaagactaggtaatttacaaaatggtacagaagatgtcaaaaaccacccctggttcaaagaagttgtctgggaaaaattattatctagaaacatagaaacgccgtatgaaccgcccattcaacagggacaaggtgacacctcacagttcgataagtacccggaagaagacatcaactacggtgttcaaggtgaagacccatatgctgatcttttccgggacttctaa

SEQ ID NO: 77264 - DNA, 1668 bp, Saccharomyces pastorianus
atgtcaaacgaggatgaaacaactcgtttaatgtcttcagatgagatggactatttattggaaacggctgggatcaacgccttggaagaaatcattagtcaaaatgacagtactggaataaatttggatactaatgaaacagctcaggacagtagctatgactctatccggcgctcccccagtattttgagtgttgccaaaagcgttgagggagagcatggacgtagaaaactattatgcctttacggccttgttatgattatctgtattgcggagtctatttctatgactgctacaataccgttggtgatggacaaggtagcggaaggaatttcagatgagaatggacattatgattccgtggctgtacagacaatagtttccagcatttcttcatccactatgatgatagcaggggcaatcagtattttcatggctggtaagtggggagaattatccgatagaataggaagagtgcgtgttttcaaatacatgagcggcatcagggtcatagggcttcttacgcacgtctttaccctatcatcgaaaatgaagtatcacaaatgggctattgttcttactgcgtgtatcgtaccatcattcggtggcttgtttgcgctagtggcgaatggaaatagtaccgtttcagatatagtgaaaactgagcacagaatggtgacaataggaataatgatgagttgtatatatgccactatgggcgtaggcccaatgtttgggtcctttctggtgaagtggactcatggaaacgggttcattcctatttacacatcaatagcgtttgttatactggcgcttataatatgtgagacaatcatggtggaaccgcgccatgaaacccagatggcccattcacaatcaacttatacaaagaggagagagaaactaagatcacaatcgggttctgacgatgcaagaaattaccaatccgttacttatggaaaatttcaaataatgaggttaatggacctgctcgctccagtaaaaaagttatggctgaagcccgacagtgcagggtctttagtaccccggcataccgtaatattactcattgtactcgatatactatttgtctgcggaacgacatcgtgtatgccagcattgattttgttttctacatatgagtacaaatggcatgcagtagagctaggttatttcatatcgatactgggtatcggaagaggtgttgtgttactggtcgtatcacctacattactgtacacgctaaagaggatttatcaacacttgaaccattcgatagacaagatagacatcttttgcatacagttttctatgattgttataacactgagtctctttgtcatgatacgatttggcgagaaaactcccacatccatgataatattcgcccttttacaggcattgagcgcgttttgttcaccaactttgcaatctggtatcataaagtacacctctaagaaacatacaggcgagatgttcggagcaatggctttggtaaggtcctgtgttatgcttgtcatccctcccatcctccttaagctatatggaagtactgtctccgttaatcctagtctgtttatgtatataccgttctcaacaagtattgttgccatcttgttgacattcttcctaagaatttacaagaaccctccgctggacgggccttaa

SEQ ID NO: 77265 - DNA, 543 bp, Saccharomyces pastorianus
atgctatacacaaggttgttacgtcacaactcacaattcaccaagttttcaggcacatcgcccaatcttggctcaaaacctttattttcgaagggtaatttgtacactagtcttttagtgacaacactgtatgggacaggtctggcatgcctatatctagaatcaaatagcttgaataagtccaaagagcaagaagatccccatgccatcgcagaagacgacattgtaaatatagtccatgacgctcccaatagaatattcaagccagcacttgatacctatcaagagaaagagcttgacttacaaaagagtgacctccataaagtacttcattctttgacgtacagtgatgtctctcaattttcgattgtttgggggtttctcattcaactttcgagcctaataggcaattccaccttaggcaaaaaatccattctttataagggaagtgtcgttagtgttttagggtttccaccgttgatttatatggcacttaaacttaggatgaaacagctggaaaaagctggagtgcgctttgagtaa

SEQ ID NO: 77266 - DNA, 684 bp, Saccharomyces pastorianus
atgcaattcaaaaacgtcgccctagctgcctccgttgctgctctatccgccactgcttctgctgaaggttacactccaggtgaaccatggtccaccttaaccccaaccggctccatctcttgtggtgctgccgaatacactaccacctttggtattgctgttcaagctattacctcttcaaaagctaagagagacgttatctctcaaattggtgacggtcaagtccaagccacttctgctgctactgctcaagccaccgatagtcaagcccaagctactactaccgctaccccaaccagctccgaaaagatctcttcctctgcatctaaaacatctactaatgccacatcatcttcttgtgccactccatctttgaaagatagctcatgtaagaattctggtaccttagaattgaccttgaaggacggtgttttgactgatgccaagggtagaattggttctattgttgctaacagacaattccaatttgacggtccaccaccacaagccggcgccatctacgctgccggttggtccattactgaagatggttacttggctttgggtgacagtgacgttttctacccatgtctatccggcaatttctacaacttgtatgatcaaaacgtcgccgaacaatgtagtgccattcatttggaagctgtttctttggtcgactgttaa

SEQ ID NO: 77267 - DNA, 2493 bp, Saccharomyces pastorianus
atgaagacaccaacaagagtttcgtttgaaaagaaaatacacactccaccaagtggagatcgtgacactgaaagatcaccaccgaagaaatttctaagaggtttatcgggtaaagtttttagaaaggcaccagaatttaagaagcaacagatgcccacatttgggtatattgaagagagtcaatttactccaaatcttggcctaatgatgtccaaaagaggcaatattcctaaaccactgaatctttccaagcctatatctcccccaccaagtttgaagaaaacagcgggatcagtagcatctggtttttcgaaaacaggacaacttagcgctttacaatcgccagtaaatatcacaagtagcaacaaatacaacatcaaagctacaaatttaactactagtttactccgagagtcgatctctgattctaccactatgtgtgatactttgtcagacatcaatttaacggttatggatgaagattatcgcattgacggcgattcatattacgaagaagattcaccaactttcatgatcagcctggaaagaaacataaaaaaatgcaattcacaattcagtccaaaaaggtacataggtgagaaatgtttaatttgtgaggaaagtatcagttccacatttactggtgaaaaggttgtggagtctacgtgttcacacactagccactataactgttatttgatgctatttgaaactctttatttccaaggcaagtttcctgagtgtaagatatgtggcgaagtgagcaagccaaaggataaagacattgttcctgaaatggtatccaaacttctaacgggcgcaggcgctcatgatgatggtccgtcatccaatatgcaacagcaatggattgatttgaaaacggcgagaagcttcacaggtgaatttcctcagtttacaccacaggagcagctcattcgtactgctgatatttcatgtgatgggttcaggacaccacgcttatcgaatagcaatcaatttgaggccgttagctatcttgatagcccatttttaaattcaccattcgttaataaaatggcaactacagacccttttgatttaagcgatgatgaaaaactggactgtgatgatgaaatagacgaaagtgctgctgaagtgtggtttagtaaaacgggtggtgaacatgttatggtcagtgtgaagtttcaagaaatgcggaccagtgatgatttaggggtcttgcaagatgtgaatcatgtggaccacgaagaactagaggaaagggaaaaggaatggaaaaagaaaattgatcaatatatcgaaacaaatgtggataaggatagagaatttggcagtttgatcttgtttgacaaactaatgtattctgatgatggcgaacaatgggtagacaataaccttgtaatattattctccaaatttctagttttgtttgattttgaagaaatgaagatcctgggtaagattcctagagaccagttttaccaggtaatcaagttcaatgaggacgtactactttgtagtttgaagagcactaatatacctgaaatatacttgaggttcaacgaaaactgcgaaaagtggttgcttcccaaatggaagtattgtctagaaaattcttcactggagacattaccattaagtgagattgtttctacagtgaaggaactctctcatgtgaatataataggcgctttaggagcgccgcctgatgttatatcagcacaatcccatgattctcgtctaccgtggaaaagattgcacagtgatacgccgctgaaacttattgtatgtttgaatttgtcgcatgctgatggggaactgtatcgcaagagagttctgaagagtgttcatcaaatattggatggattaaacacagacgatttactgggaatagttgttgttggaagagatggatccggtgtagtaggcccatttggcaccttcatcggaatgataaataaaaattgggacggatggacaactttcttggataatttagaagtggttaatccaaacgtcttccgcgatgaaaagcaacagtataaggtaacattacaaacttgtgaaagattagcgtcaacaagtgcatacgtggatacagatgaccatattgcaactggatacgccaagcaaatcttggtcctcaacgggagtgacgttgttgacattgagcatgatcagaaattaaaaaaggcctttgaccagttatcttaccattggagatacgaaatttcgcaacgccgcatgactccattgaacgctagcattaagcagtttttagaggagctgcacactaagcgttatctagatgtaactcttcgtctaccacaagctacattcgagcaagtatatttgggggatatggctgcgggtgaacaaaaaacgcgtctaattatggatgaacacccgcattctagtttgatagaaatagaatattttgacctggtaaagcagcaaagaattcatcagaccctggaagttcccaacctctag

SEQ ID NO: 77268 - DNA, 1359 bp, Saccharomyces pastorianus
atggggtacagtactatttccaacgataatgatatcaaagtatgtgtgataatggttggactaccagctagaggaaagtcttttatttcccaaaaaattatcaggtacttatcgtggttatccataaaagccaagtgttttaatgtgggaaattacagaagagacgtgagtggaaatgtcccaatggatgctgagttttttaacttcgaaaatacagataattttaaactcagagaattggctgcccaaaatgccataaaagatattgttaatttttttactaaagaagacggatctgtggcagttttcgatgctactaatagtacacgtaaaagaaggaaatggcttaaagatatatgtgaaaagaataatattcaaccaatgtttttagagagctggagtaacgatcatgagctaatcataaataacgctaaggatatcggtagcacatctcctgattatgagaactttgaacctcatgtggcggaagctgattttttggaaagaattagacaatatgaaaaattttatgaacctttggacccccaaaaagataaggatatgacattcattaagttagtcaatattattgaagaagtagtaattaataagatcagaacctatttggaaagtaggattgtattttatgttatgaatattcgtcctaaaccaaaatatatctggctctctcgtcacggcgaatcgatctataacgtagagaaaaaaattggcggggattcatcactgtctgaaagaggctttcagtacgctaaaaaattggagcagttagtgaaagagagcgcaggagaagtaaatttgaccgtgtggacttccaccttaaaaagaacacaacaaacggcaaattatcttccctataagaaactgcaatggaaagcacttgatgaattagacgctggcgtttgtgacggaatgacgtatgaggaaattgaaaaagaatatcctgaagattttaaagcacgtgataatgacaaatacgagtacagatatcgtggtggagaatcatacagagatgtagtgattcgtttagagcccgtcattatggaattggagcgccaagaaaatgttctcattataactcatcaagccgtacttcggtgtatatatgcatattttatgaacgttccacaggaggaatccccttggatgtcaatcccactacacacattgatcaagctggaacctagggcctatggcacaaaggtcaccaaaattaaagcaaacatccctgcagtgagtacatataaagagaagggtacaagccaagtaggtgagctttctcaaagctcaactaaacttcatcaactgctcaatgactctcctttggaagacaaattttaa

SEQ ID NO: 77269 - DNA, 2835 bp, Saccharomyces pastorianus
atggcgtatgcggactcaccagaaaatgcgatcgctgttatcaagcagcgaaccgcactaatgaaccggtgtctatctcaacacaaactaatggaatcattacagcatacttccataatgttgaccgaattgagaaatccaaacttatcgccgaagaaatactacgaactttatgtcattattttcgactcattgactaatctatctacgtacctcatagaaaaccatcctcaaaatcaccacttagctgatctttatgagttggttcaatataccggtaacgtggtacccaggctttacttgatgatcacagttgggaccagctatctcactttcaatgaagcgcccaagaaggaaatcttaaaggatatgattgagatgtgtcgtggtgtgcaaaacccaataagaggtttgtttttacgctattatttatcccagagaaccaaagaattacttccggaggacgatccgtcgtttaactctcaatttattatgaataatttcatcgagatgaacaagttgtgggtgagattacaacaccaggggccacttcgtgagagggaaaccagaacacgtgaaaggaaagagctgcagattttagtggggtctcaactagtacgtctttcgcagattattgatgataatttccaaatgtataagcaagatattcttcccaccattttggaacaagtcatacaatgtagagatttagtatcccaagaatatcttttggacgtcatctgtcaagtgttcgcagacgagttccatttgaaaaccttggatactttactgcaaactactttgcatttgaaccctgatgtttcgataaacaagattgttctcactttggtcgatcgattaaacgattatgttacaagacagttggaggacgatccaaacgccacctccacgaatgcttatttagatatggacgtgtttggtacgttctgggactatttgaccgtattgaatcatgaaagaccagatctatcattacaacagtttattcctctagttgagagtgtgattgttttaagtttgaaatggtatcctaataattttgataatttgaacaaactctttgaattagtcttacaaaaaactaaggattatggtcagaaaaatatttctttagagtccgagcatttatttttggttctgttatctttccagaatagtaaacttcagctaacctcatcgaccactgcgccaccaaactcaccagttacttcgaaaaagcattttatctttcaattaatctctcagtgccaggcttacaaaaacatcctggctttgcagagcattagtctacaaaaaaaagttgtcaatgaaattattgacatcttaatggatagagaagtggaagaaatggccgataatgattcagaatcgaaactgcatcctccagggcattccgcttatttagttattgaggacaaactccaagttcagcgcctgctttcaatctgtgagcccttaataatatcaagaagcggaccgcccgcaaatgttgcatcctcggatacaaatatagacgaagtgttttttaatcgacatgatgaagaagaatcctggacactggacccaatacaggaaaagttggcacatttgattcattggataatgaacactacttctcggaaacaaacaatgaaaaacaaaattcaatttagcttagaagcccaattggaaatattacttcttattaaatcttcgttcattaaaggtggcatcaatgttaaatacacttttccagcaataatcacaaatttttggaaactgatgaggaaatgccgtatgatacaagagtaccttttgaaaaaaagacctgataacaagacgttactttcccattattccaatcttttaaagcaaatgtttaaatttgtttctcgttgtatcaatgatatcttcaattcttgcaataactcatgcacagatctgattctgaaactgaatttacaatgcgccattctagctgatcaattgcaattaaacgaaatttcatatgattttttctctcaggccttcacaatatttgaagagtctttgagtgactcaaagacacagttacaggctttaatatatattgctcagtctttacaaaagacaagatcactctacaaagaagcttattatgattctttgattgtcagatgcacactccatggatccaaattattaaagaaacaagaccaatgtcgtgctgtttatttatgctcccacctctggtgggcaactgaaatttcaaatattggtgaggaagaaggtatcacagacaacttctacagagatggtaaacgggtgttagaatgtctacaaaggtctctccgtgtggcggattctataatggataacgaacagagttgtgagctaatggtcgaaatattaaatagatgcctctactattttattcacggggatgagtccgaaactcatatatcgataaaatacatcaatggtctgatcgaactaatcaaaacaaacttaaagtcgctaaaattagaagatagcagtgcctctatgattaccaactcaatcagtgatttgcacatcaccggagaaaatagtgtgaaggcaagcagtaatgctgacgatggctctgtaatcacagataaggaatcaaatgttgccataggatcggatggtacgtatattcaattaaatacactgaacggatcttccacgctaatacacggggtcgtagcaactgcttcaggtagtaaattactgcaccaactgaagtatatcccgatccaccattttcaacgcacttgtgagtacattgaaagtcaaagagaagttgacgatcgtttcaaagtcatatatgtatag

SEQ ID NO: 77270 - DNA, 303 bp, Saccharomyces pastorianus
atgcaacgctttactgcactgcactacaccccttttcctctacttgtttttcttagttcctatttccctctcaaaatgcacctgttcaccagagtattctttctcattgcaagtattaccctactttatcgtcccacacaaagaggaatatatatagattataagcgaattgtagatttcgatggagatctgatttccgtgcaaaatatccaggacgtctatacacagtgcttacaactcagctcatattcatatcatgccatttcaagattattttcagaagaaaaaagcagcgttcattaa

SEQ ID NO: 77271 - DNA, 1992 bp, Saccharomyces pastorianus
atgccatttcaagattattttcagaagaaaaaagcagcgttcattaacagaaacaataaaagtaacgcagatgcttcagcgctacgagatattaacgatattgacataaatttcgccgccaagagcaaaaactacgtgttcccgctaacaaagctccccgatgagctcatgcaagaagtattctctcatttgccgcaaccagaccgcttgcagctttgccttgtgaacaaaaggttgaataagatcgctaccaaactgctttatagaagaatatatttgaacgactcaaatgtagtgaagagtgacttcatgcatctcgcaattaattggaccctactgaacttgccgtcttcgttgaaagaagaggagtcccgcgatatcgccaactacaaattgaaaaaacttatagaaacactgcaaaataatattcacattactgaagtcatccagtggataaggattaactgggatttggactctaccttgcaaaggtccattctcagcatcctttgcaatcagggcaagtccttgcaaagactagaaaacgtcactgacccggcttgtaacgatatcatctccaatggtcacttttccaggagcaacgtctcaagtttcgacatggctcctccaaattcattgcctgagatggttgttcccgaaaattacattccgaatctcaccaaatatctttcacagcgtatctcttctcggctatctcatatgactttattcatcgaccctttaaaactgttcaattatctttaccctttagatatcaagttacaaatcatcgatttaaaattgcattggaggagggagttttacaataatgattattttgttaaaaagattcgacccggcaatcctctgactaaactatcggaggtttttgacaagaggacgttgaaaattcttaccatcatttcttggaatgacactttgttaaaacgcgagacagaaatgctgaaagattttaaagaatttgagaacctggaagatttgtctttgatttctattaagcaggatattcatattctcgtagatctttttagttcgttaaccaatttgaaaagactaaaaatggatttcttagaggagtatgtacctgaacccacaaatcctcacatatttctctccattcttttagcttgctccaaattgcaattcatagatctgagatacgacggtcttatcccacaaatcatcaatattcaagaaaataagttccaactaaatcagcaatgcaactgcacaaactgtcaaatagtattcagtgacattctgaagggcaaaatattcatgttccctgaagactactatattcacgatcttcaagacattgctgcaaaggatatttttaaaatgatgaaatacctatctttgttaccatactctaaagcttgtgatgcttatccgagcgttagaacacaaccaatgaatttgactaattttgtgaccaagatgaaccgcaaccttttggaatatagaaattctaaatcccagttggtgcccaaaatcgttaataacccacatcaacactccaccgtgacttccacatcaaccgctcatatgagcgagcccgaaatgataataatcgatgacgatgatgatgatgatgaaattaatgcggccatccctccaagtagtgatgacacggcagctacaatttccactgacctggaacttcctcatgaatcattgaccaaaagggatattattatgtgttatcacgctcttatccatcacttcaagtcgatttacgtcacttttttgaaaagttttcctcatttgagattcttgatgttgaatgacattcccacaatagttatggaggaaaataatgaacgtatttttgaacccgtcttttatcattatgattataagagtaatctgtatggatggtcaaaggaatcgaacaagaatctggagaacgacagcaacaacaacaataataattctgataccattgcaagaatagccactgttatgtaa

SEQ ID NO: 77272 - DNA, 1149 bp, Saccharomyces pastorianus
atgaggaggactttttctcagttagcaacccggctattgaagtcgaaagatgatgagctgaaatcaactctaaaatacttgaccaaaggtccagtgaagttgttggggcctttgtttgaatcttctgaagttaatgaacaaggttccttattgaatcgttcacgcactaaagaaaataatcttcaaaatcaccatatagagaacatcctgagaatactgaattcaaatctaccggaagtagagtccaagaaacaaaaagtggctgttcattacgatgtgcttttctcacatttgaactcaatagttacgcaagcaacggataacaaaagttcttcttcgaaggagctacaaggttcatcgtccgaggatctatatgataggctgctgcttttgcagtatatgggcaagttaactaatgtgcgtcaaataacagaaattttgctctcaaaaaatttcaacaaattcgataaagtatgggagcacagagccttgtttgacgaataccaaagagtagtgatatccatcctgttgtattatagaacgcatgatgtgcaaataagaaaagactacgagcctcgttggttgtccgactacagtgatctaccgtttcctctgcgacgtcttttgtggagatgtctaacttttaacgtatctgaagagaatattcatcaaaatacaattcattacattaagcttttaggcgcaaattggaggaataacgatttgattttaatttatcaatctttgtatgaaaagtcacatatattgcctgatttaacggtcctgaaccacaataaagatgatggtttctctttcacccaaaaccaaatcctgcttgttcgtattttaagggctatttcgaaatgcgttgaagaggaaccaaaattggtcaaaaaatggttaattgatatagtaaaattgagtatacaaagcaaaataatgctggagtcaccgaagaaaccgtccacaccaataatggaccaatacaaatttattagatccttagatatttctatacggagtatccatcggacgtgccaggataaactaatctttgaagatttacaggtcaaccttggaagtgtattgaagatgattaatgaagaagaacacgagttaaaaacacacttaccattgaacctcatataa

SEQ ID NO: 77273 - DNA, 1410 bp, Saccharomyces pastorianus
atggataatcagcaggaaagtatatctgaagatatcaccggtgatctggccgctgctgtgagaaagtcatggtccgagtcacaagataatccattactgttaaattttaataattctcccataggtactcccaccgataggtactcccctgaaccagcaacgatgatggaaggaaatgcaatgaatctttcatcacttgcgagagggtcgacacagcagcagcaaaggctttatggatcttctcaaacacgcgaaaaatctggtcaacagcagcaggattatcagctgttcaaacatcattattctttgggacaggagacgagagagtctgtttcagatatccttaacgatttgactctaggatctccggaaccaagcgaaagggcatcaccaataaggcaaccatcggtggatgttccacctttaactacaaggcgtagttctatacaggacgttcagtggataagacatttactgaacccaagaagttcgttttccggcgcatcttccaatgaaccaaccaactctcctggggattttcttaatcagagcagggcttggataacaatactgcacgattcatcggcagaatctttacaggctgtcatcgtattggccgagtcattgaagaatgtcaattctcagtataatctctgggtattgcattccagtgaagtcaacgcctttcaattggcccaggtaggaatcaagacgctgataatagatgaatatatcaatttattcatgaatttcggcactggctcgggatttagcgcaagttcgcaatcgaccgaaaccaagggcgaattgaattttaagtggtgcaagctatttcttttcttttcattaattgatcgattcgaattgatttgctatttatcccctacatgcctggtactgcaaaatattgatgagcttctagagagcactgaagtatctgacgagattgataacgaaacttgtgtattgttatcgaataaggtaaattatataaatgaagatctcgttagcgtgaaccaagaccaatcttccgctgaaaattatgatgacgaccctcaaattattatactgaagccaaacagggcagtagcaatgtgcattaaggaatactttactatttacgggaacgattttgaaggtgaaagtaaaaggtcgatgtttcatcaaatgaacgatttacagattatgaaagcattgtttggcgataaatggagttatatagatagcgttggatactgtgctgttcccatagctagcgtgccagcggatagattgaattataagataatcgaatttaaaatcctgaaaccttgggaaagacaaaactacattgctgccggtcaacatcgagaatctattatgaacaagtggctagatctttggcgagactttttgaaccaagcagactaa

SEQ ID NO: 77274 - DNA, 885 bp, Saccharomyces pastorianus
atgaaattcgataatgacagtgagaagcaggttttcgataagcttaaaaaagcgattcctggtattatcaaggaaaaatgtgcaggatacgatgaattgtatggttacaagttgaatcctgaaggtcttacgcaagaggaggttgataaatactatgacgaaaaaatcgccgatcgtctaatctacaaactttgcaaagcctatcaatttgaatatagcaccattgtacagaacctgatcgatattttgaattggaggagggaattcaacccattgagttgtgcctacaaggaagtccataatacagaattgcaaaacgttggtattttgacattcgatgcaaacggcgacgcaaataaaaaggctgtcacttggaacttatacggccaactggtcaaaaaaaaagaattgtttcaaaatgtggataagtttgtacgctacagaatcgggctcatggaaaagggtttgagcttattagatttcaccagctccgacaacaactatatgacccaagtccacgattataaaggcgtctccgtgtggcgaatggattctgacatcaaaaactgtagcaagacggtcattggaatctttcaaaaatactatccagaactgttatatgcaaagtattttgttaatgtccccaccgttttcggctgggtttacgatttaatcaaaaagttcgttgacgaaaccaccagaaagaagttcgtggtattgaccgacggcagcaagttgggtcaatacttgaaggattgcccatatgaagggtatggcgggaaagataagaagaacaatctgaccaagcaaaatgtcacaaatgtccatccaacagaatacggcctttacattttacaaaaacaaatcatcgaggacgttgagtga

SEQ ID NO: 77275 - DNA, 315 bp, Saccharomyces pastorianus
atgttaagaaaggaaacctcaacaatatataggacgcacaaaaaaagcaacagtagtatactcaggagccagcgggaccagactagagtggattccttggtagaggagtctcccatgggcgatttcgggatcaataaccagcctacacagcctggcgtgatatactactttgtagaactgactaatttaggcatacaggaaaacacaagcagtaataataataacaacaataatcatggagacgatgaaaacggcagtcgatacggccgcggcagcagtctgggtggagacgttcactctcgccgttgttcatga

SEQ ID NO: 77276 - DNA, 477 bp, Saccharomyces pastorianus
atgtcagccgatcattcgagagatccatgtcctatagtcatattaaatgatttcggtggtgcttttgccatgggtgccattggtggtgttgtttggcatgggattaaaggttttagaaattcgccattaggtgagcgtggttcaggagctatgagcgccattaaagcgcgtgctcccgtactgggtggtaattttggtgtgtggggtggtttattttcgacttttgattgcgctgtgaaggccgttagaaagagagaggacccatggaatgctatcattgcagggtttttcactggtggcgctttagctgtaagaggtggttggaggcatacaaggaacagttcgatcacgtgtgcttgtttgttgggtgtgattgaaggtgtgggactaatgtttcaaagatatgctgcttggcaagccaaacctatggctcctcctttgcccgaagcaccttcctctcaacctctgcaagcttag

SEQ ID NO: 77277 - DNA, 666 bp, Saccharomyces pastorianus
atgaatgtttctacatcaacctttcaaacaagacggagaagattgaagaaagtggaggaagaagaaaatgcagctactctacaactgggccaggaattccagctgaaacagataaatcatcagggtgaagaggaggaattgattgccttgaacctaagtgaagccaggttagtaatcaaagaagctcttgtagaacgtaggagagcatttaaaagatcgcaaaaaaaacacaagaagaagcatttgaagcacgaaaacgctaatgatgaaactacggcagtagaggatgaagatgatgatctggatgaagatgacgtcaacgctgatgatgatgattttatgcattctgaaactagggagaaggagttggagtctatcgacgttctgttagaacagacaacgggaggaaataataaagatttgaaaaataccatgcagtatttaacaaatttctcccgatttagagaccaagaaaccgtcggggcagttatacagcttctgaaaagcactgggttacatccttttgaagtggcacaactaggttctttggcctgtgacacagctgatgaagcaaagactttaattccaagcttaaacaataaaatatcagacgatgagttggaaaggatactaaaggaattgtcaaacttagaaacactctattaa

SEQ ID NO: 77278 - DNA, 1143 bp, Saccharomyces pastorianus
atggccaagaaagttgccatctgtacattgctgtattcacgggactatttacctggcgcattgactttagcgtaccaattacaaaaactcttgaaacacgctgtagtggaagatgagataaccttatgcctgctaattgaaaaaaaattgtttggagatgagtttaaacctcaggaaatagctttaattagaagtctttttaaagagattatcattattgaaccgctaaaggatcaagagaagagcatagagaagaataaggcaaatcttgaactgttgaaaaggcctgagctatctcatactttactcaaggctagactgtgggaactggtgcagttcgatcaggttttatttttagatgctgatactttaccattaaataaagaattttttgaaatcctacgattataccctgaacaaacaagattccagattgctgcggttccagacatcggatggcctgacatgttcaacaccggtgtactactactaattcctgatttagatatggcaacaagtttacaagattttttgattaaaactgtatcgattgatggtgctgatcaaggaatcttcaatcaattttttaatcctatttgcaactacagcaaagaggttttgcataaggtgtctccactcatggaatggatacgcctccccttcacctacaacgtaaccatgcccaactacggataccagtcttcaccagccatgaattttttccaacaacacatcagacttattcacttcattggaacgtttaagccatggtcccgtaatacaactgactatgacgaccactattaccagctgtggagaagtacacagcgtgaactttatagtgaatgccacttaagtaactacttcacacacttgcaattgggcaatattgaaacagagacaaatttttaccacgaacctccttgtcttcaagacctgttgaatcatggtaaaagagaaaatcaaaagcacgttgacctggatataacctcagtagatcgaaatgctgcgcagaagagtactgcagagaaacatgatattgagaaaccgacatctaagccgcaatctgcttttaaatttgattgggagtctacggattatttagaccgcgtccaaagagcattcccaaagcctgatacctga

SEQ ID NO: 77279 - DNA, 84 bp, Saccharomyces pastorianus
atgacacgatgtataagtaaaaaaatgcttttggaggtggatgcgctatccttgatctactcccctcatctttatatgtcatag

SEQ ID NO: 77280 - DNA, 318 bp, Saccharomyces pastorianus
atgttcaaccagctattgttggaaccaaatatgtgcaaaatatcgccagatattcatttcacgaataacaaggcaaaaatgttgcaaaaaatgtttcttagtaccaaattgaactactgcctttatcatgtgactgaactacgcttggctgttttgtttttccctcaccttgcgctaaagttgtcgtcacattataagggcagtaagaaaaagcagagtttaagaaagtttgtttacatacaaccatcacgtagaggaaattcttcaaacctaccagaccagcggacacaagccatttgtatagataaaaaatggtag

SEQ ID NO: 77281 - DNA, 225 bp, Saccharomyces pastorianus
atgatcgcccaaagtactagattagccgccgccgtctcttcttcagccgcctccgcgggagtctcaaggatagccgctagcgccatggccagcactattttcaagagatctccgggcaactcgttcaactcttttaaggaatatagagaaaatgccaagacatatggtcccttgagtgcctcactagctaccagaagacacttggctcacgcgccaaagttgtag

SEQ ID NO: 77282 - DNA, 1071 bp, Saccharomyces pastorianus
atgttaaaagttcctttgagtgatgttctttcacagaagatgctgtttttaaaaagttttagatattttcattgcacaaaatacttcagcagagacaatgcatcatctaccacagatatatttcgcaacgcaatgaaacgtaaacgtgagctggcaaatcttaaagagcaaagtcatggaaatgtggcaagaaatgctgcttttcctaaagagtatattaagcgcccgaaacaagtgccaaggaatgctactaacaggaaaaaaatcctgattacttggagcaccgggacagatcgagctaaagaggcagctaattcagttgttagtgagatattcaaaaaaaatcacaagggaaacatcaaagttgtggatcccactacccaccgaattgaaccatccaatattcggtattttgccaagggcattgatctcgataaagttggactcagtattgttaatgtagagcaaatcgataatgaaaatcaaattccacttgttaagatagtcgaaagtcgtgtagccttaaaaaaatattcagactttctggctaaaaaaaaggaaaaggaactgatggaattgggagtactgaataagtcttacaagaatttggtgactgataaaaaagaagataacttgaagcatattaaaatatcatggcagattgaaagcgatgatttaaaaaggcagaaggctcacgaaatagtttcgctattgaaaaaagggaataaagtaacgttatatcttgatgacaagaataacataaattcaaacaattggcttgaaaattttgaggagctggaccgctctcaaaaaggtgaaccacccaggctaccagaatcagttttccagaaaagagctgctgtcttggagacattgaaagagatagttagcgaatatgctaatgatcctgttctgctaggtaacatgaactcgaaaatgataatgaaacttataccaaaggacgttaaaccacaaaacaacgataagagggcgttaaaggaattgagaaagaaggagaggcaagaaaaattgcaaaaaagaattcagagaaaaaaaatgaatgaaatgtaa

SEQ ID NO: 77283 - DNA, 2007 bp, Saccharomyces pastorianus
atggaagacaagtttgctaacctcagtctccatgagaaaactggtaagtcatctatccaattaaacgagcaaacaggctcagataatggctctgctgtcaagagaacatcttcgacgtcctcgcactacaataacatcaaagctgaccttcatgctcgtgtaaaagcttttcaagaacaacgtgcattgaaaaggtctgccagcgtgggcagtaatcaaagcgagcaagacaaaggcagttcacaatcacctaaacatattcagcagattgttaataagccattgccgcctcttcccgtagcaggaagttctaaggtttcacaaagaatgagtagccaagtcgtgcaagcgtcctccaagagcactcttaagaacgttctggacaatcaagaaacacaaaacattaccgacgtaaatattaacatcgatacaaccaaaattaccgccacaacaattggtgtaaatactggcctacctgctactgacattacgccgtcagtttctaatactgcatcagcaacacataaggcgcaattgctgaatcctaacagaagggcaccaagaaggccgctttctacccagcaccctacaagaccaaatgttgccccgcataaggcccctgctataatcaacacaccaaaacaaagtttaagtgcccgtcgagggctcaaattaccaccaggaggaatgtcattaaaaatgcccactaaaacagctcaacagccgcagcagtttgccccaagcccttcaaacaaaaaacatatagaaaccttatcaaacagcaaagttgttgaagggaaaagatcgaatccgggttctttgataaatggtgtgcaaagcacatccacctcatcaagtaccgaaggcccacatgacactgtaggcactacacccagaactggaaacagcaacaactcttcaaattctggtagtagtggtggtggtggtcttttcgcaaatttctcgaaatacgtggatatcaaatccggctctttgaattttgcaggcaaactatcgctatcctctaaaggaatagatttcagcaatggttctagttcgagaattacattggacgaactagaatttttggatgaactgggtcatggtaactatggtaacgtctcaaaggtactgcataagcccacaaatgttattatggcgacgaaggaagtccgtttggagctagatgaggctaaatttagacaaattttaatggaactagaagttttgcataaatgcaattctccctatattgtggatttttatggtgcattctttattgagggcgccgtctacatgtgtatggaatacatggatggtggttccttggataaaatatacgacgaatcatctgaaatcggcggcattgatgaacctcagctagcgtttattgccaatgctgtcattcatggactaaaagaactcaaagagcagcataatatcatacacagagatgtcaaaccaacaaatattttatgttcagccaaccaaggcaccgtaaagctgtgcgatttcggtgtttctggtaatttggtggcatctttagcgaagactaatattggttgtcagtcatacatggcacctgaacgaatcaaatcgttgaatccagatagagccacctataccgtacagtcagacatctggtctttaggtttaagcattctggaaatggcactaggtagatatccgtatccaccagaaacatacgacaacattttctctcaattgagcgctattgttgatgggccgccaccgagattaccttcagataaattcagttctgacgcacaagattttgtttctttatgtctacaaaagattccggaaagaagacctacatacgcagctttaacagagcatccttggttagtaaaatacagaaaccaggatgtccacatgagtgagtatatcactgaacgattagaaaggcgcaacaaaatcttacgggaacgtggtgagaatggtttatctaaaaatgtaccggcattacatatgggtggtttatag

SEQ ID NO: 77284 - DNA, 117 bp, Saccharomyces pastorianus
atgacgttgatgtctggagaaggacaaggaaaaagtagttctgtgaaacgtgtacccacaatagcagctacccttgtcttcttttttagtaattcttttcttccggcaagcaggtaa

SEQ ID NO: 77285 - DNA, 159 bp, Saccharomyces pastorianus
atgattttctttttcaaccagatccgttcaatatttacagctttgcatacgccaactcaacagatccaattatcaagaagggcctttttccaattcttaggctatttgggtagttgtgttgtgatttcattagcagctcaatcgaaatacgtgcagtaa

SEQ ID NO: 77286 - DNA, 1923 bp, Saccharomyces pastorianus
atgctaaatcagcacacaagttcagtaccggatgacgaacatctgcagatggcacaccaaaatagcagttcagaagtgagaaatgaggcagcggtcccagatcaacttttgactcctttacaaccgtataccattttattgaaagatggagaaacaatagctacgatatatcctatacctgcgtatcctgatttattgccgctagggctcttaaatttccttctagatgaatttaacatggaagtggaaaagggagatagttttccttattacgagactttatcactagaagaattcaaaaatgtctggtttcataatgatggtcacgtttgtattatggtgttaggcgaaataccagaactggattatagtatggatactgaagcggacacaaatgataattttggaacagaaatagaaaccacgaagcacaccacccaatataagaaacgaaaagaacgtcgcaatttaaatctaagtatacagtgggagaagcaatgtctaggcatatttgacctcaaaccagcataccctggacggtcagcgcatgtggtcacaggaacatttctggtcaatgctggtattcgtggaaaaggtattgggaaaacactagtggaaacattcatagaatggtcaaagaaattaggatttacgtcctcctttttcccgttaatttacggaacgaacgtaggaatcagaagaattttggaaggattgaactttaggcggattggaaagctgcctgaagccgggattctcaagggctttgatgtcccagtagattctttcatgtatggtaaagagttcacacatattacgaaaagtatagatttgttacgagatcctcaaaagagtatcgaaattgggaaatatgaacgattaaagcattttctggaaacaggcaagtatcctttacattgtgatagaaacgaaaaggctagattaagagtactttccaaaactcattcggtattgaatggcaagttgatgacaaaaggaaaagaaatcatttatgacacggatcaacaaatccagattgcattagagatacatttaatggaacatttaggcatcaacaaggtgacctccaaaattggtgaaaaataccattggagaggaatcaagagtactgtttcggaggttatctctcggtgccaaaaatgcaagatgaggtacaaagacgggacaggggtaataattgaacaaaagagagcagttaagcaggcgcatatgctaccgacgcagcatatagaaactatcaacaatccaagaaaaagcaagaagcatgataatgcgttattgggacaggcaataaatttccctcaaaatattatttccagtacgctgaatgatgtggagggtgaacccactccgccagacactaatatcgtacaacccacattccagaacgccacgaatagtcccgcaacaacagctgaagccaacgaagcgaataaaagatccgagtttctttcctcaatacagagcacgccactattggacgacgaacagtcaatgaattccttcaatagattcgtggaggaagaaaactcaagaaaaagacgaaaatacttggatgttgcctccaacggaattgtaccccatttaacgaataacgaatcgcaggatcacgcgaaccccgtcaaccgtgatgaacgagatatgaaccattcagttcccgatttagatagaaatgaccatactataatgaacgatgctatgttgagccttgaagataacgtcatggccgctctagaaatggtccaaaaggaacaacaacagaagataaatcatcgaggtgaagatgtgactggccaacaaatcgatttgaacaacagtgaaggtaatgagaattcagtcactaagattgttaacaacgaatctaatacatttacagagcacaattctaatatttattattaa

SEQ ID NO: 77287 - DNA, 924 bp, Saccharomyces pastorianus
atgactagtaaattaaaacgggttgctgtcgcacaattatgttcatccgctgacctgaccaaaaacttaaaagtggtaaaagaattgatatttgaagccattcaaaaaaaggcggatgtcgtttttctccctgaggcaagtgactatctttctcaaaaccctcttcattccaggtatttggcacagaaaagccccaaatttattcggcaattacagtcaagcattaccgaccttgtcagagataattcacggaatatagatgtttccattggggtacacttgccgccctcagaacaagatttacttgaaggcaatgatcgagtcagaaacgttctattatatatcgatcatgaagggaaaatattgcaagaataccaaaaactgcatttgtttgacgtagacgtgccaaatggaccgatattgaaagaatcaaaatctgtccagcctggcaaagccattcctgacattatagagtctccattgggaaaattgggcagtgccatttgttatgatattcgctttcccgaattttctttgaaattacgatcaatgggggctgaaatcttatgttttcccagtgcgttcactactaaaacaggggaagcacattgggagttactaggcagagcaagagcggttgacacccaatgctatgtgctcatgccagggcaggttggaatgcacgatctcagtgatccagagtgggagaaacaatcacatatgagcgctctcgaaaaaagctccaggagagaatcttggggacactcaatggtcattgatccttggggtaaaataatagcgcatgccgatccctctactgttggaccacaactaattctcgctgatttggatcgtaagcttttgcaagaaataaggaacaaaatgcccttatggaaccagagaagagacgatttatttcattga

SEQ ID NO: 77288 - DNA, 1152 bp, Saccharomyces pastorianus
atgtcaacaaattgtttttccggttacaaagacctcatcaaggaaggcgatttaactctaatatgggtttctagagataacatcaaaccggtaaggatgcattccgaagaggtattcaatactcgttatggttcatttcctcataaggatatcataggtaaaccttatggttctcaaattgctataagaacaaagggctcaaataagtttgcattcgtccatgttctgcaaccaactcctgaattgtggactttgtcgttaccacacagaactcaaattgtatatacgcccgactcttcctacatcatgcaaaggttgaattgtagccctcacagcagagtgatcgaggcaggtacaggctcgggatcattttcgcacgcttttgcaagatctgtaggtcatctttttagttttgaatttcatcacataagatacgaacaagcattagaggaattcaaagagcatggacttattgatgataacgttacgattacacatcgggatgtttgccaaggtggatttcttataaagaagagagacactacatcttacgaatttggcaataatgaaaccgccgcttcattgaatgcaaatgtagtgtttttagatctgccggctccctgggatgctatacctcatctggattctgttattgccgtagacgaaaaggtcggattgtgttgcttctccccatgcattgagcaagtagacaaaacattggatgtattagagaaatatggctggacggatgttgaaatggtggaaattcaaggtagacagtacgaaagtcgaagacaaatggtcagatcactcaatgatgccctggaaaggttgagagatattaagaggcacaaactccagggtgtagaaagacgcaagcggatgtttaacaatacaatagattctaacgatgaaaaagttggaaaaagaaacgaggatggcgtaccattaacagaaaaggccaaatttaatccttttggcaagggttctcgaatcaaggaaggtgatagtaattataaatggaaggaggtcacaaaggtggaagctgagatcaaatctcatacctcatatttgactttggcatttaaagttgtgaatagatcaagagatgatgaaaaagttaacgaaattcttcgatccatggaaaaataa

SEQ ID NO: 77289 - DNA, 519 bp, Saccharomyces pastorianus
atgtctgcaaatagcaaggacagaaatcagtccaatcaggatgcgaagcgacaacagcagaatttcccaaagaagatttcagaaggtgaggccgatttatatctcgaccagtataacttcactaccaccgctgctattgtaagctcagtagaccgtaaaatcttcgttcttttgcgtgatggaagaatgctattcggtgtactaagaacctttgaccaatatgcaaatttgatacttcaagattgcgtggagagaatatattttagcgaagaaaacaaatacgctgaagaagaccgcggcatattcatgattcgtggtgaaaatgttgtcatgttaggcgaagtagacatcgataaagaagatcaaccccttgaggccatggaacgcataccatttaaggaggcttggctgaccaagcaaaaaaatgatgagaaaaggtttaaagaggaaacccacaaaggtaaaaaaatggcccgccatggtatcgtttacgatttccataaatctgacatgtactaa

SEQ ID NO: 77290 - DNA, 1449 bp, Saccharomyces pastorianus
atgtctgaaaataagaactctgaggctgaagacgtatttgaatttttagattctttgccagaagcaaagaatggcgggaaaatggttaatactgacgtaaagggtagccaagaaggcgttaagggaggttctaattctgtggcgggcaagaccgggaatgatggaaagaaaggtgacgatgatatctttgaattcttagaagagttggagaagagtaacttaagcttaactgacaagaaaggggttgaaaagaaggctcccagtgaatcagttaataataaagcacaagacgaaaaagtagaagaatcaaaagaaaacaaaaattccgagcaggacgctcacggaaaggaaaaggaaccacagcagcaggagaaagaagaagaagaggaggaagaagaggaggaagaagaagaagaagaagaggaggaggaggagaccccattgcatgacccaattgcttctatttcaaactggtggtcctcctctggatccgcaaaggtatcgagtatttggaataaaactgcagaacaagcatcccagatcaaaaaccgacttgcccaagaacagcttgatttgacttcaaagataaacacgagcacgattactgaaatagccagaaacttacagaaaatcgttgttggtgagactgaagaggtgctgcgaattcatctagtccatgatttggttaactatccctcattacaatacaatattgaaagcaagtttgatcaagttctaagctcacaagttgagggaggaatcagaatatttgtagatgaatggggccatcctaacaataatggaattacacctgtggaaaaaaagccttcagttgcagacggtgagttaggcaactctaaaaaaaaattacagtttaatctattcgacggcaaggtaacagacggtgagaaactggcatttgcaaacctggaaaatgcagtcaaactcttcaatactgcacatgaggaataccagaaacaacagaaagaggctgatgccactccagatgacgataggagttctattagcagtaacagcaataaaatcagtgatttattcatatccatcttaccaattgccattccgcaaaaacaaaaagatgccgacggtgactttcaagtgaccgactccaatacgccaggcaatttcaatttcacccttgtattgaaagacataactaacgatattaccaccataacaagatcacaaggattccctgtcaaatgggtcaattggctagaaggatccgtggagaaaacaggatcaacagcaagtgaggagaggaataagtcatacgatcaaaagaaacaaaaagaaagtgaagacgaagacgaagacgatgagatcattgatcctagtgaatgggtaaaggaatggatcgaagatggattaagcttgtcatttggggtcatggcacagaattatgtcattgaccgtatgggtctttga

SEQ ID NO: 77291 - DNA, 717 bp, Saccharomyces pastorianus
atggtcaaaccaattatagctcccagtatccttgcttctgacttcgccaacttgggttgcgaatgtcataaggtcatcaacgccggcgcagattggttacatatcgatgtcatggacggccattttgttccaaacattactctgggccaaccaattgttacctccctacgtcgttctgtgccacgccctggcgatgctagcaacacagaaaagaagcccactgcgttcttcgattgtcacatgatggttgaaaatcctgaaaaatgggtcgacgattttgctaaatgtggtgctgaccaatttacgttccactacgaggccacacaagaccctttgcatttagttaagttgattaagtctaagggcatcaaagctgcatgcgccatcaaacctggtacttctgttgacgttttatttgaactagctcctcatttggatatggctcttgttatgactgtggaacctgggtttggaggccaaaaattcatggaagacatgatgccaaaagtggaaactttgagagccaagtttccccatttgaatatccaagtcgatggtggtttgggcaaggagaccatcccgaaagccgccaaagccggtgccaacgttattgtcgctggtaccagtgttttcactgcagctgacccgcacgatgttatctccttcatgaaagaagaagtctcgaaggaattgcgttctagagatttgctagattag

SEQ ID NO: 77292 - DNA, 324 bp, Saccharomyces pastorianus
atgacattcgcaacccaagttggcgaagtcagaagcaaggatactgggagctataattggtttgaccattttttcttgtgtgtttacctcgctcttggaattagcaaatggccttcttgcatgaaattgtatcgagtttgctttatttttctttttacgggcggattctttctattctggctttcctataacagagatcatgaaagaagttccagcttacggatcaagaaagtacctatacatatacaaaaatctgattactttcccagctcgacttggatagctgttcttgttttctcttggcgacacattttttgtttctga

SEQ ID NO: 77293 - DNA, 936 bp, Saccharomyces pastorianus
atggcggttcaacaaagaaagaagaaagagggtagaaagtccgataaaaatgccccatcggtcccacaagtagatgcatcattagacaaaccacttgatattgatgctcctcctactatttacagtgttaatttgaaaccagaatatggtacagctgcattgaatttgtccgcggatttcatcagacaagaacaggcattggctaataagtatttgttcttccatcccgtcatccttgttgttctaaccattgggctgcttatttacttgacgccaagaattgtctttccgataaggaatacaggatccgttgctggatggttctaccagctggctcgtattaataagaaggtcgtcctcagcggtttagtgttcaccgcaattggtgcatctttcttgttcacccttctctcacgtgtatctgattcgtatttcaagtcgaagatcaaccaacttgttggttctaaaggtgagaaagttttcggcatcaatttgaatgatttggtggcaagacatgaaacaaaggatccagtggtgaacaatacgcatatcatcgtttatagagaaacgcccattgcattgatttcgttagcccctaacatgacattaagtactgatgaaaatttagtcatgagtgttactactgtgggttgtcgtcgtgtatatgtaaaaagtggcattatcgaagatttgattgattgggctatgctacactccaaaaatattagaagcagcggcaaatacggggagaccatgaaactcttgattgatgtctattcattcgatagcacgcttaaggaaattttgaagaaaaaagggttcacttatattcaaagcattagagtctctgaaaatcgactactaggcggtttgtttggtgtgaagaaggaattatggggtttgcaattccattttaaagccgaacacaaggactag

SEQ ID NO: 77294 - DNA, 1014 bp, Saccharomyces pastorianus
atgaaaatttccgcagctttaatattgtcttccctttcttctgtcgcattttctgcccctgcacctgctccagcggacagtcatcatgaagatcatcacaaagatgaaaaaccagcggttgtcactgtcactcaatacatagattccaatgccgctactagtactgtagaatctgctgctactaccactacattgtcctcatctgagaaggatacctctgaacagaagcgtgatggcggattccaagatggtactgtcaaatgttcggacttcccttctgtaaacggtatagtttccttggactggctaggatttggtggatgggcctctgtcatggacatggatgccaacacttcgtccgaatgtaaggatggctactactgttcttatgcatgtgaacctggaatgtcaaagactcaatggccttctgaccaaccaagcgatggtaaatctgttggtggtctttactgtaaaaatggttacttgtaccgtaccaacactgataccagcgatttatgttctacggatgaaacatctgctaaggccattaacaaaaagtctgactccattgctctatgtaggacggattacccaggatcagaaaacatggtgattcccacagtggttgatggtggagattcacaaccaatttcagtcgttgatgaagacacttattatcaatggcagggtaaaaagacttctgctcagtactatattaacaacgccggtgtatctgcagaagatgggtgcatttggggtacttctggttcggatgtcggcaactgggctccattagtgttaggtgctggttccactaatggagaaacatacttatcgttgattccaaaccccaacagtaaccaagctgccaactttaacgttaaaatagttgcatccgatggcgctaacgttcagggcagctgtgcgtatgaagatggctctttcaccggagatggttccgatggttgcacagtttctgttttatctggatctgctgaatttgttttctattaa

SEQ ID NO: 77295 - DNA, 2145 bp, Saccharomyces pastorianus
atgtcagtgaacgaccaaataactcatataggaaaaacattgtccacaacggcttccgcttttttaaactaccaaaaatcgaacagcaacactcaagatgtactgaccaataatgggccttataagaatttattatcaaataccgtcaacaatgcgagctcaacttcatacttttacaagaggactgaacacggtcgctttgtaaaaaatgcatctaacacttttgaggatatttactccaagacaagaaggggcgatgtattcaggaacaagttcacagacaacaaaacatgcttcagaatgctcacgtacataagtgatgatttgttgaacgagatcccaactaaggaaggtctcaaaagtgatgcagatggcaagcttctaaccgaaggaggcgaagatgaaaatctcaggaagaacgcatccaaaaaagaaacatccctgtttcagggctttaaaagctacctaccaatagcggagctggccattgaaaacactgaaagattaaactatgatacaaatggtacaagcggtacggttggtgcgaaagatgttatgtctaaaacaaatgagcgagatgaaattcacacagagcttcctaacttccaagattcatttctcataccgcccggggtagaaactaaaaaaataagctcctcttattctcctagtgcattaaaaagtttttctcaaactcttgtaaatagtttagagtttttaaatattcagaaaaattctacgttatccgaaataagagacattgaagttgaagttgagaatctgagacaaaagaaagagaaactgttaggtaaaattgcgaacatagagcaaaatcaattactattggaagacaacctcaaacagattgatgataggttggactttttagaagagtacggattggaggtgatcgaagctaatagcgacgaaaatgcagaagatgatggtatgagtgagcgaaaggcctttgaaaatgatgctataagaaatgagggtgtcaccacagagagcatatcatcagaggcttctaatctacctccaaggagaaggcaacaacttcgagacgataactcattgaatagattaggtgccttttatagcaaatccaaaaaaagacacagaaaaagcttcccaacattccagcagctttacgagccaggaacaaaaattggctctataatgtccactcacgatgatttcctcacttgcctagattttgatgcgccctttggcaccttatgtacagccggatatcttgatcacacggtaaaaatttgggatttatccaaacaaaacaaaattggagaactagcaggacatcttgctacaattaattgtatgcaaatcaatcgtgactacggaactcttgttactggtggtagagatgcggctttaaaattatggaatttgaatttagctcaacaactttaccaggaaacgcaaaatcttacctctcctacaaatcatattgattctccatgtgttcatacatttgaggcgcatacagatgaggttactgcattatcattagatcctagtttcttggtgagtggttcacaggatagaacaattaggcaatgggacttacgttccgggaagtgcttgcaaaccattgatctgagctttgcaaatgtcttaacaacatccactaatgtcgatttatcaaagagcacacttcttactcaaagaaatgagaggcctagtataggtgcactacaaagttttgatgcagcgctagcaacgggtacaaaagatggtgttgtaaggctatgggatttaagatccggaaaggtgattcgtactttgaaagggcatacagatgccataacgtcattaaaatttgattccgcgtgcctggtcacaggttcatacgacagaacagttagaatctgggacttaagaactgggttgttgaataagtttcatgcgtacagtgcgccagttctttcgttagatctcttccaagagaacgctgcagtcgttgtcgcagacgaaccaagtgtccagatatacgatagcgaaaaggatgaaagctggtcttgtgtcgaacaaggtaacgagactagcgttagtaccgttaagtataaagaaaattacatggttgagggtcgtgaaaatggggacgtaaatatttgggccgtatga

SEQ ID NO: 77296 - DNA, 1653 bp, Saccharomyces pastorianus
atgaactttggaagccaaacacctacaattgtggttctaaaagagggaacagacgcatctcaaggtaaaggtcaaatcatctctaatatcaatgcctgtgttgcagtccaagaggcattgaaaccaactttaggtcccttaggttctgatattttaattgtgacatcgaatcaaaagactactatttctaacgatggtgccacgatcctaaaattattagatgtagtacatcctgctgccaaaactttagtggatatttctagagctcaggatgccgaggtgggtgatggtacaactagtgtaaccattttagctggtgagttaatgaaagaagccaagccctttttggaagaaggcatttcatctcatttgattatgaagggctacagaaaggccgtttctttagctgtggagaagattaacgaattagctgtggatattacttcagagaaaagcagtggcagagaattacttgaacgctgtgctagaactgcaatgtcgtcgaaattgattcataataatgcagatttttttgttaaaatgtgtgttgacgccgtgctatcccttgatagaaacgatttggatgacaaattaataggtattaaaaaaattccaggtggtgctatggaagaatctcttttcatcaacggtgtcgcctttaagaagacattttcgtatgctggatttgaacagcaacccaaaaagttcaacaatcctaaaattttaagtttgaatgtagaactggagttgaaagcagagaaagataatgctgaagtacgtgtagaacatgttgaagattaccaagctattgtagatgcggagtggcaattaatctttgaaaagctaagacaagtggaagaaacaggtgccaatattgtactatcaaagttacctatcggcgatttggctactcaattttttgctgatagaaatattttctgcgctggtagagtgagcgcagatgatatgaatcgtgtcatccaagctgttggaggctctatacaatctactacttcagatataaaaccagagcatttgggtacttgtgctttgtttgaggaaatgcaaatcgggtcagaacgctacaatttattccaaggttgcccacaagctaaaacatgtacattattattaagaggaggtgctgagcaagttattgccgaggttgagagatcattgcacgatgcaatcatgatagttaagagagcgttacaaaataaactgatcgttgctggtggtggtgctacagaaatggaagtatcaaaatgcttgagagattattcaaaaaccatagctggtaagcaacaaatgataatcaatgccttcgctaaggctttagaagttattccaaggcaactctgtgaaaatgctgggtttgatgctatagaaatattaaacaaactaagattggctcacagcaaaggtgagaaatggtatggtgttgactttgaaacagaaaatattggcgataattttgccaaattcgtatgggaacctgctttagtaaaaatcaatgctttgaacagtgccacagaggctactaacttgattttatctgttgacgagacgatcattaataaaggtagtgaaagtgccaatgctggcatgatgcctccccaaggggctggaagagggagaggtatgccaatgtaa

SEQ ID NO: 77297 - DNA, 1656 bp, Saccharomyces pastorianus
atggcatcgcaggctacaactcttcgaggctataacattagaaaacgagataatgtatttgaaccaaaatcaagtgaaaacctcaacagcttaaatcaaagcgaagaagaagggcatattgggagatggccacctttaggctatgaagcagtatctgccgagcaaaaatcggcagttcaattgcgtgaatcgcaagcaggagcgtcaataagcaacaatatgaattttaaggcggatgacaagtctttttccacatctactgctggaagaatgagtccggatacgaattcattacaccatatattacctaaaaatcaagttaagaataatggacaaacaatggatgccaattgcaataataacgtatccaatgatgctaatgttcctgtttgtaagaactgtttaacctctacaacaccattatggagaagagatgagcatggagctatgctttgtaatgcgtgtggtctctttttaaagcttcatgggaaacccaggccaattagtttgaaaactgatgtaataaagtctcgaaataggaaaagtaatacaaatcatgcacataatctggacaactttcggaatcagacgctgattgcagagcttaagagtgattgtaatatagaatcaagcggtcgcaaagctaacagagtaacatctgaagataaaaagaaaaaaagttcgcaacttttaatgggaacatcatctactgcgaagatatccaagaagccaaaaacggagtctaaggaaagaagcgattctcacctatcagcaacaaaattagaggtactgatgtcgggagattgttcgagaccaaagttaaagcctaaactgcccaaacaagatactgctatataccaagagaagttacttacgttcccaagttatacggacgttaaagagtattcaaattctgcacaccaatctgcttttatcaaagaacggtcgcaattcaacgcagcctctttccccctcaatgcttcacattcagtaacatcaaaaacaggcgcagattctcctcaattacctcacttatcaatgctgcttggaagcttgagcagtacttcaatatcaaataacggaagtgaaatagtgtccaattgcaataatggtattgcctctaccgccgcaactctggcacccacttcttcacggacgactgactctaatccatccgaggtaccgaatcaaattagatcgacgatgtcttccccagatataatatctgctaatcgtaacgacccagcccctttatctttccacatggcttctattaacgacatgcttgagacgagagatcgtgcgattagcaacgtgaaaaccgagacgacaccgcctcatttcataccgtttctacaatcttctaaagctccctgtatatccaaagcaaattcacaatccatctcaaatagtgtttctagttctgatgtttctggacgaaaatttgaaaatcacccagctaaagatttaggtgatcagttatccactaaattgcacaaagaagaagaaattataaagctcaaaactagaataaatgagttagaacttgttacagatttatataggagacatatcaatgaattagacgggaaatgtcgagctcttgaggaacgtttgcaaaggacagtaaaacaagaagggaataaaggaggatag

SEQ ID NO: 77298 - DNA, 5310 bp, Saccharomyces pastorianus
atgtcttcgttgagtgaccaattagctcaagttgcttccaacaatgctactgttgcgttggatagaaagagaagacaaaaacttcattctgcttctttgatttataactcaaagacggctgcaacacaagattacgatttcatttttgaaaacgctagtaaggctcttgaagaattgagccaaattgagccaaaatttgccattttctcaagaacactcttttcagagtcttccatttctcttgatagaaatgtccaaacaaaagaagaaattaaagatttggataatgctatcaatgcttacttgctattggcttcttctaaatggtatttagcacctacactacatgcaacagaatggttggttcgtcgttttcaaatacatgttaaaaacacagagatgctgcttttgtccactctcaactactaccaaacacctgtctttaagagaattctcagcattattaagttgccccctttgtttaattgtttgtcgaattttgttagaagtgaaaagcccccaacggcgctaaccatgataaagctctttaatgacatggattttctgaaactttataccagttatttggatcaatgtattaagcataatgcaacgtatactaaccagcttttatttacaacatgctgctttattaacgttgttgctttcaattcaaacaacgatgaaaaactgaatcagcttgttccaatcttacttgaaatatctgctaaacttttagcctctaaatcaaaggattgtcaaatagctgcacataccatattagttgtatttgctacagctttgcctttaaagaaaacaattatcttagctgccatggaaaccattctttcaaacttagatgctaaagaggcaaaacattcagcactcctcacgatttgtaagctgttccaaacattaaaaggacaaggtaacgtagatcagctaccttccaaaattttcaagttatttgatagcaagttcgacactgtgtctatactaaccttcttagataaggaagacaaaccagtttgtgataaattcattacttcctatacaagatccatagcaaggtatgatcggtccaaattgaacattattcttagcctactaaaaaaaataagactagaaagatacgaagttaggttgataatcactgatttgatttacctttccgaaattttagaggacaagtcacaattagtagaactattcgaatattttatctccataaatgaagatttggtgttaaaatgtttgaaatcattgggactaacaggcgaactcttcgaaatcaggcttactacatctttgttcactaatgccgatgttaacaccgacattgtaaagcaattaagcgaccccgtggaaactactaaaaaggataccgcttcatttcaaacattcttggataagcattcagaattgataaacacaacgaatgtgtccatgctaacagaaactggagaaagatacaaaaaggttttatctttattcactgaagctattggtaaaggctataaagcaagttccttcttgacttcatttttcactactttagaatcaagaataacgtttttgttaagagtaactatatctccagccgctccaaccgcgctaaagctaatatctttaaacaatattgcaaaatatattaatagtattgaaaaggaagctaatatttttactttagttccatgcttgatttgcgctttgcgagatgcttctataaaagttaggactggcgtgaagaagattctttccttgattgctaaaagaccatccactaagcactactttttgtctgataaactttacggagagaacgttgccattcctatgttaaatcccaaagatagtgaggcatggttatcaggatttttgaatgagtacgttactgagaattatgacatatccagaattataacgccaaagagaaatgaaaaagtctttttgatgttttgggctaatcaagccctactaataccttccccgtatgccaagacagtgttgttggataacctgaacaagagtccgacttatgcatcttcttattcctccctatttgaggaatttatttcccactacttagaaaacagatctagttgggaaaagagttgtattgctaataaaacaaactttgagcattttgagcgctctttagttaatttggtatcaccaaaagaaaagcagtcattcatgatcgattttgttctcagtgctcttaactcagattatgagcaattagctaacatagctgccgagaggcttatcagcatattcgcttcattaaataatgctcaaaaactaaaaatcgtccaaaatatcgtggattcttcgagtaacgtagaatcatcgtacgatacagtcggtgtactacaatcattgccgttagattccgatatttttgtatccatactaaatcaaaacagtatcagtaacgaaatggatcagacagacttttctaaaagaagaagaagacgttcatcaacaagtaaaaacgcatttttgaaagaggaggtttcgcaactggcggaattgcacctgagaaagttgacgattattttggaagcacttgataaagtcagaaatgttggatccgaaaagcttttgtccactttactttccttattatcagatctggaaactttggatcaagacggtggattaccggttttatatgcgcaagaaactttgatttcttgtacgctgaacactatcacatacttgaaggaacatggctgtacagaactaaccaacgtaagggcagatatattggtatccgctattagaaattctgcatctctgcaagtccaaaacaaactattacttgtaattggatctcttgctactttaagttcggaagttattttgcattctgtaatgcctatctttacgtttatgggagcccatagtattcgtcaagatgatgaattcacaactaaagttgttgagcgtacgatactaactgttgtccctgccttgatcaagaatagcaaaggaaatgaaaaagaggaaatggagttccttttgttgagcttcacaaccgctttgcaacacgttccaagacataggagggttaaattattttctacgttaatcaaaacacttgatccagtaaaggcactgggctcgttccttttcttgattgcacaacagtattcttcagctttagtcaactttaaaattggcgaggcaagaatattaattgagtttattaaggccctactcgttgatctacatgtcaatgaggaattatcaggtttgaatgacttactcgatatcatcaaattgttgacatcatcaaagagctcctcggaaaagaagaaatcactagaatcccgtgtcttgttttcaaatggtgtcttgaatttttcggaaagtgaatttttgacatttatgaacaatacctttgagtttatcaataaaataaccgaggaaacagatcaagattattacgatgtgaggagaaatttaagactaaaggtatattctgttttgttagatgaaacaagcgataaaaagttaattagaaacatcagggaagaatttggaacccttttagaaggtgttctttttttcattaattctgtagaattaaccttttcatgtataacttcccaagaaaatgaggaagcttccgactctgaaacatcattatcagatcacacgactgaaataaaggagattctattcaaggtgcttggcaatgtgttacaaattctaccagttgacgagtttgttaatgcggtattacccttactcagtacatccactaatgaagatattagataccacctaacgttggtaatagggtccaaattcgagttagaaggctctgaagctattcctatagttaacaatgtgatgaaggttttgctcgacagaatgcctttggaatctaaatctgttgttatttctcaagtaatattgaacacgatgacggctttagtgagcaaatatggtaagaagcttgaggggtccatattaactcaagccctcacccttgctactgaaaaagttagttctgatatgacagaggtcaagatatcttcgttggcattgataactaactgtgttcaagttttaggagtcaagtcaattgcgttctatccaaaaatagtcccaccttctattgaattatttgatgcttcattggcagatagtagtaacccattaaaagagcagttgcaagttgctatactgttgctgttcgccggtctaatcaaaaggataccaagtttcttgatgtcaaatattttggatgttttgcatgttatttatttttcccgtgaagttgatagcagcattaggctgtcagtaatttcattgataattgagaatatagatttgaaggaagttttgaaagttttattcagaatttggtccactgaaatagcaacgtccaatgatacagttgctgttagtctatttttgagtacattagaatccactgttgaaaatattgataaaaaatccgcaacctcacaatcgccaatattctttaagttactattatctttattcgaatttagatccatttccagtttcgataataatacaattagtaggatagaggcatccgttcacgaaatttccaactcttacgtcctgaagatgaatgacaaagtatttagaccgctatttgttatattagtaagatgggcgtttgacggtgaaggcgttacaaatgcaggtatcactgaaacagaaagactgttggcatttttcaaatttttcaacaagcttcaagaaaatttgagaggtataattacttcctatttcacgtatttgttagaacctgttgatatgttgttaaaaagattcattagcaaggacatagaaaacgttaatttaagacgtttggtaatcaactctctaacctcttcgctaaagtttgatagagacgaatactggaaatcaacttccagattcgagttaatttctgtatccttggtcaatcaactatctaatatagaaaactctattgggaagtacctggtcaaggcaattggcgctctggcttctaacaacagtggcgttgatgagcataaccaaattttgaataaactaatcgttgaacacatgaaagcttcctgttcctccaatgaaaaattatgggctattagagccatgaagttgatatactcaaagataggtgaaagttggttagttctattgccacagctcgttcccgtcatcgctgagttattggaagatgatgatgaagagatcgaacgtgaagtcaggaccggtttggtcaaggttgttgaaaacgttttaggggaaccttttgataggtatttagattag

SEQ ID NO: 77299 - DNA, 450 bp, Saccharomyces pastorianus
atggctcacagggctttcatacaggttataatcacaggaactcaagtttttggaaaagcattcgccgaggcgtatagacaagcggcttcacaatcagtgaaacaaggtgctacaaatgcatctagaaggggaacaggaaaaggcgaatatggtggtattacgttggatgagagttgtaaaattttaaatattgaagaatccaagggcgatttaaacatggacaagattaataacaggtttaactatctatttgaggttaacgataaagaaaaaggtggaagcttctacttacagagcaaagtttatcgagcagcagaaaggttaaaatgggaactggctcagagagaaaaaaatgcgaaggcgaaagcaggggacgcttcaacagcgaaacctcctccgaattcaacaaattcatctggtgcagataatagtgcaagcagcaatcagtag

SEQ ID NO: 77300 - DNA, 1857 bp, Saccharomyces pastorianus
atgaccaaaaaactaccttcagagttgaaacagacgagaaagtctatccagacagcttgtgaattctgtcataccaaacatatacagtgtgacgtagggaggccatgtcaaaactgtttaaaaagaaatattgggaagttttgcagagataagaaaaggaaatcaagaaaacgaattgagaagcatggaacacaaccatacttgaatttggggaagaggctggtaatacatgatgtgccgtcgaagacggtatccccctcaagcgtacatctgcagcgagattttctatcttcagatcaggaaaaaccaggcaaaacacctgcccacaatacgaatatccaatatacgtataatataaatgataactttcaaagcgctggatctattccacgtattacgaacttcaatacgaataacggccagaccgtcttagaaaatacttctaataatatatcagcttcacaagcagtacatttaatgaatgaccccatcatacccaccgtacggaagagtactctcaatttaaagtcgcatttcctagagcaacataaagcaatgcagcagccgctggctaccaattgtttggttgctacttcaaacgttcctgtgcactctggaatggacgctagtaataagagtgacgatgatgtcgatgacgaaactaatattcactttgatagtatgtggtgcaatgacgaatacatgaaattaaaggatatagtagatatttcaacgccgtttttaccgaataactcccagatattttccctccaagaatcagaatatcccaatcctagcgcatctacacggggaaattcgtcattgcatttaacgaaccttttaaactcgacaaaaagcgtgaatgaccaaaaggactcctcgatcggccattccacttctactttcaatacatatgatgaagtagtgtctaggccctttatatctttagacatgctgcatttgaatcgtggagcaaacgctaatacacacccatcacataacgccaaactggaaagcgaatgtgacagttctagtcactccgatgcagatctggagaaacatgataccgatttcatatcaccttcaaagtttcgtgaattagtaaagactcctcaagacctatatgacaataaatgtttaataaaaccgcataattacaagctcgcatacaccaaactgctaactactttaagaaaaaaatttcttgaaggagctgaaattgataaatctgcctcagtaaaagacgaacacagtacccaaaagcataatttgagatatgatttagaagttataatacgctctatactagaaagatatgctccaattttcatttcgttaacatccaatatgattgaagaggatttgctattacaggaagttaccttgcaaagggctttattagatttggagaacatggcaaaattagtaagctgcacaccgatgtgcatctggagaagatcaggcgagatttgttttgtcagtaacgaattctattctttaacaggttttaacaaaaatttactattagaccgcacctcctttatttttgaatatctggatcataaaagcgtttcgaattactttcaaatatttaacgaattgctggcatttggttacaatgatatcaataaaaggaaaaaactattgatgttgaacgcatgttcttctacctcgtcaaaaattacagaagggttttcttttactacggatggaaaagcaatctttactaagtgcaatttattattaagtaacggtctttatttgaagtgtgcctgttgttggacagtaaaaagggactcgtttaatatcccaattctcgtaatgggacaatttttaccaatttttgaaatggactga

SEQ ID NO: 77301 - DNA, 2460 bp, Saccharomyces pastorianus
atgtggaaatggaatgtgcgcagatgggcgggcgcaagagtaaacattagcaagaaccgattaagtgtaattaacgttggaagtagatacttatcgaccgcaagaagtccactgtctaaggttagaaatataggaattatagcccatatcgatgcaggtaaaactaccacaacagagaggatgctttattatgcaggaatctcaaagcatattggagacgtcgacactggcgatacgataactgattttttagagcaggagagatcccgaggtatcacaattcaaagcgctgcgatttcattcccatggcgaaatacttttgcaataaatcttattgatacgccgggacatatagattttacttttgaagtgattagggctttgaaagttattgattcatgcgtggtcattttggacgctgttgccggcgtagaggcacagacagagaaggtttggaagcaaagtaaatcgaagcccaaaatctgctttatcaacaaaatggatcgtatgggggcgagtttcaaccatacagtcaatgacttgataaataaatttatgagaggaacaactaccaaaccggtgttggtaaacattccttactatcgaaaacaaccgactagcaatgattatgttttccaaggtgttattgacgtcgtaaatgggaagcgattaacctggaatccagaaaatcctgatgaaattatcgtggatgagttggatggtacttctcttgagcagtgtaatcgttgtagggaatcgatgatagagactttgactgaatacgacgaagatttagtccagcacttcttagaggaggcagaaggcgattactccaaggtttccgcacagtttttgaacgcttcaataagaaaactgactatgaagaatatgattgtacctgtcttatgcggtgcgtcttttaaaaatattggcgtgcagcctctattagatgctatagttaattatctcccttcgcccattgaagccgaactaccagaactaaatgataaaaccgttccaatgaaatatgaccccaaagttggatgtttagtaaacaacaacaaaaatctttgcattgctcttgcattcaaagtgattacggatccaatcaggggtaaacaaatattcattagaatttattcaggtacactaaacagtggcaataccgtttataattctactactggggaaaaatttaaattgggtaaattactgataccccatgcgggaacatcacaacctgtaaatattttaactgcgggccaaatcggattgcttactggctctacagtcgaaaacaacatatctactggagatacactaataacgcattcgtcgaagaaggatgggttgaaatcacttgataaaaaaaaggagttgacgttaaaaatcaattctatcttcattcccccaccagtttttggtgtttccatcgaaccaaggactttaagtaataaaaaatcgatggaagaagctttaaacactttaattactgaagatcccagtctttcaatttctcaaaatgatgagactggccaaacggttttaaacggtatgggtgaattacaccttgaaattgccaaggatcgattggttaatgacctaaaagcagatgttgaatttggtcagttgatggtgtcctacaaagaaacaattaattcagaaacaaatatagaaacgtatgagagtgatgatggatatagattctccttatctctgctaccaaattccgatgcccttcctaactgccttgcatatccattaggagtcaatgagaattttctgataatggaaaaaaatggtaattgggataaagaatggaaataccaagtttctttcgaatcaattctaaattctattattgcaagttgcattgtgggacttcaaagaggcggaaaaatagctaactttcccttatatgcatgctccatcaaaatcaatagcgattggtcagtcccacctgatattgaaactccacaagaaatcttaaaaattactagaaacttaatttttaaagctctcaatgacttaaaacctgaaaaatacaaccttctggaacccatcatgaatcttgatctaacaatccctcaatctgatgttggtacggtgttacaagatctaacaggagcaagaaaggctcaaattctgtctattgaagacgaatcaagcgtgtcaaattctggcgcatccacttgtaattctccagagaacagcaataggatatatattccctctgatgctgttacaaccctacacgcaaccaaagataaaaaaaacactcaagagaccagttctaatgtaaaaaaaattataaaagcgaaagtgccactaagggaaattaccacctacaccaataagctaaggagcttatcgcaagggaggggtgagttcaatattgaatattccgatatggagaaagttaccaacgatcgcctacaatcaatacttcacgacttgtag

SEQ ID NO: 77302 - DNA, 3177 bp, Saccharomyces pastorianus
atgtcagggtccttttggaagtttggacaagattttggttcacagtctccattagctaaactgttgaacagggctttcattaagatcgatgataagcccactagtacggaagcagggaaaattgactctaatagcacagatgaaagtttagaaagcaattcttttaaatcagaagacgaagaagaagaatatgagctgcctaacagagaagaagactacaaagcttataagccaaacctgtctctactgaatgatcttttagatgatgaggagttatatacagaactggtgtgctcgaacttcaagctactagtgtacttgaagtaccctgaagttttgtccaaattgatagattatgtcagaaatagtaccatacttgagtccaatattgatagagttacttcagaagacagagatttagtacgtggtgaagacaaggacacaacggaggactttgagaatgctaaagcagatacgaaaaacattgatggtacttttgaagaaaaagaacgtactcgtagtggtgaagaagaggaactggaaaatgaagaaaatgatagtgcatctgaggatactagagtcactctacctcatgaactagaggaacatgatgatacgcgaagagccagaatagcggccgaaatattgtccgctgacgtgtggcccatatcatctgctttgattgaaaacgaaggacttctcgctaagctttggtcgatcctcaggctaccttctccattgtcaattgaagcgtcaacatattttatgaaaataaacgaacgcctcttggatatgaatatggacggaataattgaattcatattaaaaaaggaacacattgttgacgattttttagcgcatatagataatccgcctttgatggattttttattaaaagtaatatcgaccgataagccagaaatatcaaatggagttatacaactgtttaaaaaacagaacttggttccaaagttgattcatttactcgatcctgtttttgattcttgcacacaatctgcagccggtgattttctgaaagctctggttactattagcggtaactgtcctaatgagattacttcgagcatagggcctaatgaattaacaaggcaattagtttctccaaatatgatgaaacaacttatggatataatgctcaagggaggcaattcgttaaataatggcgttggcattatcattgagctgataaggaaaaacaattctgattatgataccatacaaacaaattatactaccgtagaatctcatccgccaacagatagagacccaatttatttaggatatttggttaaaatgttttctgaacacatggccgatttcaacaaaatactaactgagaagaagattccccttttacagacgtcctatggaacgattgaaccgttaggatttgaaaggtttaagatctgtgaacttattgctgaactattacactgctcaaacatgactttattgaatgaaccgagtgcctatgacattgtaagagagcgtgatgccgaaagagagagaatcttcaattcacaaaattacgtagattctaacgatcgtagtgaattaaaagaaaatgaagacgacaatacaggtgatgctgatgatgaagtggaagatcatacaaatcaggtagaatccgctaatacctccattgatggtgaagaagttatcgataagttaaattctttacagatagaaaccaacaaagtaaaccagaaaatgaataatgaagagcaacatagtttaatgccagacttcaacaatggtgattttaaggacgaggaagatgaaaatccatttgaaccccaatattcagacgtcattttggattcttctgatatagaaaaaaactttcgtgtgtcccccaacgttggagatcagctgaaaatcagtttacaagataccagagtaatagatactatgctcgaaatgttttttcacttccagtggaacaatttccttcataacgtagtgtacgatgttgttcagcagatttttaacggtcccctcaaaataggttataataggttccttttagatgatctcctaatcaacatccgtttaactgatatgattattaacggaaacaatgaatgcatagaatatgagaaaggacatgacaccaggcttggatatatgggccatttgaccctaattgcggaagaagtcaccaaatttactgcatatattgaagagatgaacatcacctttgaaaatactgaagtaatgagttctttatttgagagtaaatggattgcctatacggaggatgttctagaggatctaaaggagaaatacaacgccatattaggcgatatagctgaagaaggagacatgttgcaagatgaagaagaggatgctgtatacgacaagggagagcgcactatgggtacagtcgatgactacattaatgacataatgcaaatggacaatgtacggtgtcaggaggaggaagaggatgaaggagaagggtatgtcagctttgatgaagatgaaccccaagaatatcgtaatgatgattccgttagaagcaaagaatcgaactcatcagaaggcaaacgtgaccaagagcagctttactatgagtacgttaacgaagatggtacaaaaacaagattaaacttcaatcctggttctgacgccacggaacaagttccaggtgaagtgaatcgcgatcataagataccattgaagcttaagcgaagttttacggatgcatgcaaatctgaaacaataccaaataatacagttaatgctaaggaagaaagtgtatttcaatttagcaatgaacttagtgacggctgggagtcatcaccttctaattctatacccaagcgtgcttctccatcaaaaaatggcatgaattcacctatgtttcaacaccagtttgaacttcatagccccaccgatgaatttggaggtcataaagacgaaatattaagcgcggaaggccatgactacgacatagatgaatacgatgaactgagcgatgacagtgatgaagagtatgataactgtgaagacgaagacagtttggattatgctgattccgccgcatatgcattgtgtagatccaaaagtaaggacaagatatcatgggatgaagaagaacaggcgcgattaatgggcgttgtaaaatttaattcagagcattacagggactag

SEQ ID NO: 77303 - DNA, 654 bp, Saccharomyces pastorianus
atgtcaaaaaaacttgcgtcaccattgtccttcttacccctttataatttgctttctgctgttggttggtcttatttgctttacttggtcatctccttgtacccaaaagttggacagccagcattcttctaccaaactaaaaatgtcgctacccttgttcaatgtggtgctataatcgagatcataaactcatttttaggagttgtacgttccccattgctgaccactgttgcacaagtgtcttcaagactactagttgtcctcggcatcttccaattgttgccaaacacaagtggtgttcaatcagttgtttacatatcattattactggcatggtctataactgagatcgtcagatacttgtattattttttcatgttggtattcaagaatggcgcaccaaagatcttaattctattaagatataatttgttctggattttgtaccccactggtgttgccagcgaactacgcattatttactgtgctttaaatgcagctgaatctcagtattctttactttacaaaagaattttaatagcggccatgctcgcttatatcccaggcttcccaatgctcttcctacacatggtagcacagagaaagaaagtcatgaaaagtttaagatcctctttcgggaagaaactaatttga

SEQ ID NO: 77304 - DNA, 2076 bp, Saccharomyces pastorianus
atgacaaggttcatgaacagctttgccaaacaaacgctgggatatggcaatatggcgacagtggagcaagagagctcagctcaggctgttgattctcattcaaacaacacaccgaagcaagctaagggtgttcttgcagaggaactaaaggatgcattgcggttccgggacgaaagagttagtattattaatgcagagccttcttcaacactgttcgtcttttggtttgtggtttcatgctatttccctgtgattactgcctgcttgggtcccgtagctaacactatctcgatagcctgtgtagttgaaaaatggagatccttaaagaacaactccgtggtgacaaatccacgaagcaatgacaccgatgttttgatgaatcaagtaaagacagtttttgatcctcctggtatttttgccgttaatatcatctctttggtactgggttttacgtcaaatattatactaatgctacatttcagtaagaagttgacgtatcttaaatctcagttaataaatataacaggatggacaatagctggagggatgcttttggtggacgtgattgtatgctccttgaatgacatgcccagcatctacagtaagactatcggattttggtttgcctgtatcagttctggtctatatttggtatgcaccattattttaacaatacattttattggatataaattaggaaaatatcctccaacgttcaaccttttgcccaatgaaagaagtatcatggcatacactgtactattgtctttatggttgatttggggtgcgggtatgtttagcggtttattgcacatcacttacggaaatgcattatatttctgcacggtatcattattaaccgtgggactaggtgacatcctgcccaagtcggttggcgccaaaatcatggttttaatcttttcgctatctggtgttgtcttgatgggtttaatagtgtttatgacaagatccatcattcaaaagtcctctggcccaattttctttttccacagagttgaaaaaggcaggtccaaatcgtggaaacattatatggatagtagtaaaaatttatctgaaagggaagcgttcgacttaatgaagtgtatccgacaaacggcctcaaggaagcagcattggttttctttgtcggtgactattgcaattttcatggctttttggttattgggagctcttgtattcaaattcgcagaaaattggtcgtacttcaattgtatttacttttgtttcttgtgcttattaaccattggatacggagactatgctccaaggactggtgcaggccgtgctttttttgtgatttgggcgttgggagccgtgccattaatgggggctatcctatctacagtcggtgatctgttgtttgacatttccacttctctggatattaagatcggtgaatcattcaataataaagtcaagtccatcgtttttaatgggcgtcaaagagcactttcctttatggtgaacactggagaaattttcgaagaatctgacacagctgatggtgatctggaagaaaatacaacgagctcacaatccagtcaaatttctgaattcaacgataataattcagaagagaatgattctggagtgacatcccctcctgcaagcctgcaagaatcattttcttcattatcaaaagcatctagcccagagggaatacttcctctagaatatgtttcttctgctgaatatgcactacaggactcggggacctgtaatttaaggaacttgcaagagctacttaaagccgtcaaaaaactacatcggatatgtctggcggataaagattacacacttagtttttccgactggtcgtacattcataaactacatttgaggaacattacagatattgaggagtacacacgcggacccgaattttggatatcacctgatacgcccctcaagttcccgttaaatgaacctcattttgcttttatgatgcttttcaagaacatagaagaattagttggtaatctagtagaagacgaagagctttataaagttataagcaaaagaaaatttttgggtgagcatagaaagacactttga

SEQ ID NO: 77305 - DNA, 2295 bp, Saccharomyces pastorianus
atgaagccctttcaaggaataacattttgtccgactgcaataaataatgaaatcttagctaaaaaaatatcaaagaaaattattaagttaggaggtatattttctaaagatttgaccagacaagttaatgtccttgttgttgggtccaccaccaatacaaacaaatttaaatttgcggtgaagcatagattcgatatcatatttattgacattcaagccattgatgacatttatcagctctggctgtctggagaaaatatattgccgaactctaatacggcaacaatgacaggatccacctatgagatgctgaagatactttaccggcgattttcgtttaaatatttgcataacttcaatatcttcattggcagaataaccgacactaacataacttccatcgattcattggttaggagtattaaaaagttagggtgttctagttataactatcaaaactttgtaatcaaagatacctcttcacacaatgatgacgatgatcaaggtcagaatgggcagatatccatttttgttacggatactttactaggagcaagagttaacgctgctattgaacaaaatatacctattgtacatttcaaatggattctcgattgccaaaaaagaagcgcactgttgccgtacgatccctattatcttttaccaaatattaaagacctgccctatgattcaatcggatcaaactcttgcgattgctgggataaaataaacaccacctttccaaccaatatcgatgcccaatcctctctgcagcggcaacaatcctccagtaccctgactccttcgctcccgaaaacatcatccctcttgaataaatttaaaccaaagggtgaaaagatatgggacaaggcaatgtctctacagcagcatagtaagacaaatttttcagtactagggcagtcaccattatcgataaataacaaacaagaagatttaagtgatagtagtactttgattttcaaaaattgtgcgtttatcattcatcatatttttcctggcaatcaccgttcaatactaaccaaaattgttgttcaaaatgggggtaaaattgagacgtcttacttgagcggcatttacgatcattcttattacatcattccaagtaataaagctcttgactccttcaatgatttacctgagattatagatgataatgatggtatagttacagaatttttcattgaacgctgcttgtattatcaaaaattactacacccaatagatttatggtcaaaacccttcctcagcacaatagagtttcaagtttcgtcttcttcaaagttattgcatcatgaattttcttcttccccttttctgaatgttactatcactggattctctggcgtagagctgttacatctgactaaagtattaaatcttctaaaaccaatgggcatcaattatgtagaatacctcaataaatccactgacattctgctaatcaacttagcagctttacccagtatcccgaaaacccatccgttatggtcgaatgaatttagcgatctttttactcagttttacattaataacaataatgatgatcctggtgataataacagaaacgattttcaaaataattcaatcttgagaaattcgatgaaaaggaaaattgaatatatcaagaaattccactccataccggtagttactccagcatttatttttaaattattgtccgctgcatctggagaaaataatgaaatctttttaaacaatatcaagtggtgtattatctgcccaagaggacacaaggacgattttaaatgtaagataaaaaaaccatactataccagcattagttcagaaaaaaagtaccaaaacaatgatccaaaaatcgacaaaactattcttttgaaaagaaacaattcctcattatcggagcactctatgaaagataccaaaaacgaattattgcagaaaattagagaaactgattctggaagaaaaaagcgtagtgtctcatcgagtatcatggatgtttcttcagagagacaaatgccggatacgaaaaggatcaagttggagtcactgccaaaaaatttcgttcctaaacaaattaaacgaaccacgagttggggcacaataatgtcagaaaatgtgcctacagagcagccgactgcaatttctaatccagaagagatcccaagaactgaggaagtttcacatactcaagttacctatggctccattcaagataagaaacgtactgcctctttagaaaaacctatgagacgacagacaagaaatcagacaaaggaattagattcttga

SEQ ID NO: 77306 - DNA, 2490 bp, Saccharomyces pastorianus
atggccaagaggaaatatggcaggtcttattccctcgatgatacagattcctgcagcaataaagtcctaatagtaccaaccggtcaaagctcctctaacgcaatcactgatttctctgtcagaaaggcgcatgcttgcgatagatgcagactgaaaaaaatcaagtgtgacggtttaaaaccgaactgttcaaactgtgcgaaaattgacttcccttgcaaaacctcggataaactgtcgaggagaggtcttccaaaggggtatacagaactactagaaaaagaggtcgtccgtttgacaaatatgaatgcgagttccagcgccaatgcaaattctaatttgccgttcattaatgatacattttattgttttgataattacaacactcagtctgaaaatcaaaggtttttgggacatttgacatggaatattctaactaatacttttcctactcaaaaagcagtagtttttacagacgatcgaaataatattgatctacaactgcaactgttaacaaattttttgaacctgaatggtgactttaatcatctcccaaattttcttttacttaaatatgattataaccttcagtttttgaaaaatttgttgtctgtcattattaaagatttttttaaaaggcaaaattctttgctacttctattataccctacaaatttatggaaaaatttgctattagacaagattaattcaaccgcaatgacaggtgaacccataactctactggcgttactttatattattcaatttacttggtcttgttttgatgatttcaagctttttaaagtcacgaagctaattgtttctctgacaacaaacagcaaattagacttgaaagttttgcaattggttaacttatccatcttttattttatgggcgcctctgttgactcttgtaaaagtaaaagctcgttaacagaacattcaaatgtaaattcagtaatatggaccaatgatttgctaaacctaaactttacaaatattttgaatatgggattgtacataaatcccaaaaatttaattcctatatcaggcaacaataaatataataaatctaatgaagaggatgatagaatagtgacattttggtgctttcaattcttaagctcatggtggtccttaattcaaggtttaccaaagtccaactttttaactgaagaatttcaaccgaaatcaatctcggttctagaaatccccaggctgaagccctttgaaattttgttaaacttcgtcatatattctttggatggatgtaatttgttgaatatctcatctttaaatgtttcggacccaaatttccaatttttccagaatgaactggaaagctttaaaaaaaatttattactgtggaacctttatcacaatttgagtgatcacgataacttccgattcttaacatccagttcaaatacaaaactaacaacaaatttactacttaagaatttgacgggtctaaatcacaaactcaatcaacctgattttgtggagattcaattaactttattttacttgagtttaaaattaatgactttaaaggaaggggaccaagatttgaagaaagaggatatctcgttagagatattgtccctatattttttaattcttacagatgactctaataatgatgataatcaacagttacaaccacagcaactaaatctctaccattttacgcccttcaatagtattgacattattgacttatgtttaaacaatctaaacaattggtcattatcacttaaatacgaaagtggtcaaaaccagccccactcaagtaaaataaagtttgaaaaatttcaaaactttttaaatcactggtgtccaatatggtactatgatgaattttccacaaacccttttttacaaatcctcaaaatcaatttcaaattacttccttttgagacaatccattactcacaagaagagcaacgattgttaataagtttgaataaattgagatatttggatgccgtatcgagctttaattcaagttcagtcaagtcgaatttcgcgtctaaggtcaatacccagctgaaccttttgcaacactcgagttctaactccaatttcctagatgcgtcaccatacgattttaataaaatttttatgaacaactttgaaaactatgactacgaaacagatgaaggatatgcggaagatgatgatgaagaggatagtgacagtgacaatagcttaccactagaaattccttttaaaaaaaggaaaaataaatgcaagaataggaataaagagctttcacaaaggttatccctatttgaaaacagagatagcaattcggtagatttcaacacagatacaaatttaaatttaaaccctgattcgccatcagttacgtcttctaagaaaaaatatttagatcatattattttagataaccgagacatcgttagcaaccatgactccagtaaacaaaaattcaagatccagaatattttgaactcgaccttctaa

SEQ ID NO: 77307 - DNA, 2484 bp, Saccharomyces pastorianus
atgcctagcccatatgacggtaaaagaacagtaactcagcttgttaacgagttagaaaaggcagaaaaactatccggtagaggcagagcttatagaaggatttgtgacttatcacacagcaataagaaagtaatttcatggaaatttaacgaatgggattatggcaaaaatactatcactttgccatgtaatgcaagaggcttatttattagcgatgatacaacgaatccagttattgttgctagaggatacgataagtttttcaatgtaggcgaggtcaactttaccaagtgggattggattgaagagaactgtacagggccttacgatgtcactataaaagccaatggttgtatcatttttatatctggtttagaagatggtaccttggtagtttgttcgaagcattctactggacccagagcagacgtagacaggaaccatgcagaagcaggtgagaagcaacttttaagacaactggcggcaatgaacatcaatcgaagtgattttgctagaatgctatatacccataatgtcaccgctgtggcagaatattgcgatgattcatttgaagaacacatcttagagtatccccttgaaaaagctggcctatacttacatggtgtaaatgttaataaagcggaatttgaaacttgggatatgaaagatgtttcgcaaatggcgagtaaatacggattcaggtgcgtccaatgcattacatcgaacaccttggaggatttgaaaaagttcctagataactgctctgcaaccggatcttttgaagggcaagagattgaaggttttgttatcaggtgccacttgaagagtactgaaaagccattttttttcaagtataaatttgaagaaccgtatttgatgtaccgtcagtggagagaagttactaaagactatatttccaacaagtcaagagtgtttaaatttagaaagcataaatttataaccaacaagtatcttgatttcgcaatcccaatattggagtcatcacccaagatctgtgagaattacttgaaaggttttggtgtgattgaattgagaaataagtttctacaatcatatggcatgagtgggctggaaatcttaaaccacgaaaaagtggccgagttggaattaaaaaacgccattgattatgataaagtagacgaacgcactaaatttttaatctttccaatatcagttattggatgtggcaaaacaacaacttcccagacattagtgaatttgttccctgacagctggggtcatattcaaaatgatgatattacaggtaaagataaatctcaattaatgaaaaaatcattggaactattatccaaaaaagaaatcaaatgtgtcatagttgacagaaacaatcaccaattccgcgaaagaaagcaattatttgaatggttgaatgaactaaaagaagattatttggtgtatgatacgaacatcaaggtaatcggcgtgtcattcgcgccatatgacaaactatcggaaataagagacataacactgcaaagagtaatcaaaagaggtaacaatcaccaaagtattaaatgggacgaattaggagagaagaaagtggtaggcatcatgaatgggtttttgaaaagatatcaacctgttaatttagacatatcaccagataatatgtttgatttaatgatagagttagattttggacaagcagactcttcattaaccaatgcgaaacaaatcctcaatgaaattcataaagcttatccaattttggtaccagagatcccgaaagatgatgaaattgagacagcgttcagaaggagcttagattacaaacctactgtgagaaaaatagttggtaaaggcaacaataatcaacaaaaaacgcctaagttaattaaacctacatatatctcagctaaaatagaaaactacgatgaaattattgaactggtcaagaggtgtattgctagcgatgcagagctgactgagaaattcaagcatttactagctagtggaaaagttcagaaggaacttcatataacattaggtcatgtcatgtcgtcccgtgaaaaagaggcaaaaaagttgtggaaatcatattgtaacagatacactgaccagataacggagtacaataacaaccgcatagaaaatgcacaaggctctggtaataaccaaaatacgcaggtaaaaacgaccgacaaactgaattttaggctcgaaaaactatgttgggatgaaaaaatcattgctattgtagtggaactgtctaaagataaagatggatgcataattgatgaaaacaatgagaaaattaaagggttgtgttgtcaaaacaaaattcctcatattacgctgtgcaaacttgaaagtggtgttaaggctgtttattccaatgttctatgtgagaaggttgaatctgctgaagttgatgaaaatataaaagtgctgaaattggacaactcgaaggaatttgttggcagtgtatatttaaatttttag

SEQ ID NO: 77308 - DNA, 369 bp, Saccharomyces pastorianus
atgtcaatttcagcgggcatttctataaatgcttttgatattataaaaccagaacactttaatggacctttgctattcactgccagcactttaagggtacattcaccttggttttcaaatacgtttaagcacactgtttcagtaaattatctttatgttccagcgggccggccgcgtacttttccattgataaaatttcactatgagtttatcccaaagaaagtatacagaagagcatctaattcattccattctgttgagaattgcttcgagcaaattttacgtatttgcatagtctttctttctttgaaaatctacactttgactttagtgatcataaaagtattcatacgaagaagcgatgcctag

SEQ ID NO: 77309 - DNA, 3141 bp, Saccharomyces pastorianus
atgcccatggaccaatctatctcatctccattgtttcccatggaaaaggatattgatatccccctcgatgctacacccttggcacaaagttcatcattacagctttttattcatttagctgaaccagttgttttcctccaaggctttgaccctcagaagacggaatatccctcggttgttcttcggggctgtctagtggtaagaatactgaaacccacaaagctgaaaagcataagtctttcattcaaaggatattctagaactgaatggcctgaaggtatccctcctaaaagacaagaattcgtggaaatcaaagatattgtagaccatacatgggctctatatccgccaactgaacagaagagcaagaaaaagatgggtgcttccgcacctaatgagagcaacaatgcagctaataattttttgacgaaggaaagtggtgcctctctttatagaacactgtctgataatgaaactataacaagcagaaaaaattctatatcaggtttgtcctcgttgaacttgtcacctctaggtacaactggaaattcctctgtcaacgtaaaagacagagaaagtagacaaagatctagatcttcgtcagtcacttcttccaatggaccatcaagaaacctatccccgataaatttattgaagagagccacgtctccttccgtgtctcaccacaactataaacctacgaccacttccatcttttccgacttgttgaataacacctttacccataatgatgcagcatcgcatcatggtcatcatatccccaccagtagcaatcatctggcaatgacaagcaacaacttcaccagcgggtctggaggagaattttttgtctttcaaccaggcgactatatttatgctttcgaagaactaattcctcaagcatacccagaatctattaaagctgatttcggatttgtggaatacttcttatttgccagtatagagagacctggtgcctttaaatcaaacattagcgcccggcaagtggttaatatcgtacggacacaggctcataattctgtggaagaaagtgagccgattatcatatctagagattgggaaaaccaattatattatgatatcgttatagcatcaaaggatattattttagatgcttttctgcctatcacgttcaaattcgctcccctcgataaagttacgttgcatagaataagaatttatgtgacagagacaatggagtattattgtagagaaaagaaggttcataggatggagcccaccaagaaatttttattgacagaacagaaaggtcctaagttaccgaacttgcccaatgatgcaaatttgtcaaaggccaagaatatggggaacctgttgcaggatccaaagaatggtgatttagtgaataaagagtatgagtaccagatttttattccgagtcgtttcaataaccatcagcaattgcatccagatacttcttatgaaaacatcaaagcaaaccattggattaaaatttgcctgagactgtctagagtagtagataataaaaggaaacattacgaaattagtattgactcgccaatacatgttttacatagattgtgctcgcatgcaaatacccttttaccgagctatgatggacatcctgcttcttttccaaaagaaacagattcctcaatttcctcaatattggaatcgtctgatgacaatataaatctataccataactctaatattttctttcccaaggaagtcctttcgtctccagtactttcgcccaatgtccaaccattagacattttaatcccacatttaccttccacttcattgaccagaaactctaggcaattcaataggaactcaaaatcccatccgagtgataataccatcttcaattctgcaaagttgaaatccaacatatatcaaccggagagtttgcaaagagaattagcatcaccccaggcaatcccgctctctccaataacatcgccaatgtcaaatatggaagtgcctccgccagattttgacttttcttccgatttcatatctgatgctgcttccggaaccattactactgaggtatcttcatcagagtcgagcatcttaccacgggatccaccatcttataaggatactgtgttgcatgacaacaatcaaaaaaggaggcctaattccaaacatccgacgcctccaagtttaaaagcttcccatccaaataaaaattcggataagaattcttcagaaactttgaataaaaaagaatcgatgtcaaagatagaagaaaataaacacaaaagagagacaactcctaaaaagagagaaaatagggacgtgaaaagtttatcaaccccacaacgcgaggaaagcaaagactcgacatccactgggaatcaaagtaacgaaaagaacagaaaaagagtattaagcctatcgtcttcattacatagctcaccaaataatagcggatttgcgcattcagctttaggaaatctgagcaatgaatcattaagatcattgaatagaagggaaagtgttcaagataatttaccgtccacaataagacacgataatccttttttcacagatttaaatcaagttttaatagaagacgaacttaaaaatcatgataaaaatgaactaaatcgacattctacaaatacttcgagcacccccgcctcagctagatcctcttttgactattcaggaattaatataagcaaggacaagttgaacatggaaccattactgagtaaaacggaaacgttgactaataaagttaatgaagactcctttttaaggcctaatgattcatacgttgatctacttgaaccctcagtagatactacgattgatatcactgcgccgtacgctagaaattcctctgcttggcatcctttacaaaacgataacgataacaatcagttttctccacttttgggaagtaacgagaatttcttgaatgcagctaatgcacaaaattctgccgaatcagatcataataatgacattttcacacagggctcaggattaacggaaagctctaagaattctgattccgaggaaagatttatttcaagactttcttcacccgagaaagtactgattaatacgttagataatgaatctggattacaaagtataaatgagagtaccctttag

SEQ ID NO: 77310 - DNA, 1470 bp, Saccharomyces pastorianus
atgtccaatgctgctttgcaagtttatggcggcgacgaagtttccgcagtagtcattgatcctggctcatacacaacaaatattggctattcgggttctgacttccctcaatcaattctgccctctgtttacggtaaatacactgcagatgaaggcaataagaaaatattttctgaacaatcaattggaattccaagaaaagattatgaactgaaacctattatcgagaacggtctagtcatagactgggataccgcacaagaacagtggcaatgggcattgcagaacgaactctatttgaattccaactccggaataccagctctgttaactgagcccgtttggaatagcacagaaaacaggaaaaaatctttagaagtgctcttagaaggcatgcaatttgaagcctgttacttagcacccacatcgacatgcgtttcttttgcagcaggtagacccaattgtttggttgttgatattggacatgatacttgcagcgtcagtccaatagtggatggtatgacattatcaaagagtacaagaagaaattttattgctgggaaatttatcaatcacttgattaaaaaggcattggaacccaaagaaatcataccacttttcgcaatcaagcaaagaaaaccagagtttataaaaaaaacattcgactatgaggttgataaatcgctgtatgattacgccaataaccgagggttctttcaagagtgcaaagaaacactttgtcatatatgcccaacaaaaactttggaagaaacgaaaacagaattaagttctacggctaaaagatctattgaaagtccttggaatgaggagattgtttttgacaacgaaactcgttacggctttgctgaagagcttttccttccaaaagaagatgacatcccagcaaattggcctcgctcgaactctggagttgtgaaaacttggcggaatgattacgtgccactaaaaagaaccaagccaagcggagtgaacaaatcagacaagaaagttacaccaactgaagaaaaggaacaggaagctgtaagcaaatctacttctccggctgcaaatagcgcagacactccaaatgaaaccggtaagagaccgttagaagaagaaaagcctcctaaagaaaataatgaattgattggtctagcggatcttgtttattcgtctataatgagcagtgatgtggatctaagagcgacactagctcataatgttgtccttacaggcggtacatcctctattcctggattaagtgataggttaatgacagaactaaacaaaatactaccatcccttaaatttagaatattaacaacagggcacactatcgaaaggcaataccagtcatggcttggcggtagtatacttacaagtctgggaacatttcaccaactgtgggttgggaaaaaggaatacgaagaggtgggcgtcgaaagattgcttaacgataggtttagatag

SEQ ID NO: 77311 - DNA, 900 bp, Saccharomyces pastorianus
atgaaactttctaaattatcgatcttaacctccgccttagccacgtctgcattggccgctcctgccgttgttactgtcactgaacacgcccatgaggctgcagtcgttactgtgcaaggcgtagtttatgtcgaaaacggccaaacacgtacaacttacgaaacactagctcctgcttccactgccactccaacttctacagctacagctttggttgctcctcctgtcgctccttcctctgcttccagcaattccgatgtggtcttgtctgctttgaagaacttagcctctgtttggggtaaaactaccgattcaacgaccacgttgacatcttctgaatctacatcgcaatcgttggctcaagctactacgacttctacacccgctgctgcttccaccacttccacgcccgctgctaccaccaccacttctcaagccgctgctactagctcagcatcgtcttcggatagtgacctgtcagattttgcctcttctgtgttggctgaacacaacaagaagagagctttgcacaaggacacaccagctttgtcctggtccgatactttggcctcctacgctcaagactatgctgacaactatgattgctccggcactttgacccattctggcggtccatacggtgaaaacttggctttgggttatgacggcccagctgccgtcgacgcttggtacaatgaaatttccaactacgacttctcgaatccaggcttttcaagtaacactggccactttactcaagtcgtttggaagtccaccacccaagttggttgtggcatcaaaacctgtggcggtgcatggggtgactatgtcatctgtagttacgaccccgcaggaaactacgaaggcgaatacgccgataatgtcgagcccctagcttaa

SEQ ID NO: 77312 - DNA, 2694 bp, Saccharomyces pastorianus
atgctggagtttccaatatcagttctgctaggatgcctagtagccgtcaaggcacaaaccacgtttccaaacttcgagagcgatgtgctgaacgagcataacaagttcagagcgctacatgttgacacagcgccgctcacctggtccgacactctggccacctatgcgcagaactacgccgaccaatatgattgttcgggtgtcttaacgcattccgatggcccatatggtgagaaccttgcccttggttacacagacacgggagcggtggacgcctggtacggggagataagcaagtataattattcaaatcccggattttctgaatccacgggtcacttcacacaggtggtttggaagtcaaccgccgagattggatgtggttataaatattgtggtacgacatggaataattatattgtgtgctcctacaaccctcctggaaactacctgggtgagtttgcagaggaagtggaaccacttataagcactgtttcctcgtcctcatcctcgtcctcttctacctcaactacatcagacacagtctccaccatctcatccagtattatgcccgctgtagcgcaagggtatacaacaacggtatcgtctgcggctagcagcagttctttaaaatcgacgaccataaaccctgccaagaccgctaccctcactgcgtcctcttctaccgtaattactagtagcacagaatcagttggatcctccactgtctcatcagcctcaagctcttctgtcactacttcctatgctacctcctcgagtaccgtcgtctctagtgatgctacttcatccactaccaccacctcatcggttgctacatcgtccagtactacttcttccgatccagcctcgagtactactactgcttcttccagtaccacttcttccgaccctacctcgagcactgctgctgcttcttcttctgatcctgcctcaagttccgctgccgcttcctccagcgcgagtaccgagaacgccgcttcttctagcagcgccatctcgagctcttcatcaatggtttctgctcctttgagtagtactcttactacttccgccgcaagctccagaagtgtaacttccagttcagttaattctgttaagtttgcaaacacaactgtgttttctgctcaaacaacctcttctgtaagcgcctcattatcatcatctgtagctgctgacgatattcagggtagcacttccaaggaggccacaagctcagtttccgaacatactagtatagtaactagtgcaactaatgctgcccaatatgcaacgagacttgggtcatcttccagaagttcttccggggctgtctcttcctcagctgtgtcgcaatctgttctgaattccgttatagccgtcaacaccgacgtatctgtaacctcagttagtagcgcagcccataccacaaaggacaccgccaccacttcagtaaccgcctcagaaagtatcacttcggaaactgcccaggcttcaagttcaacagagaagaagattagtaacagtgccgccacatcgagtagcatttactccaacagtgcttctgtgtcaggacacggtgtaacatacgctgccgaatatgccattacatccgagcaatcctctgcgcttgccacatctgtgcctgctacaaattgctctagtatcgtgaagaccacaactttagaaaattcgagtaccacaaccatcacagccattactaagagtactacaaccttggccactactgctaacaactccacaagggcagctaccgcagtaaccatagatcccacattggaccctaccgacaactcagctagtccaaccgacaatgctaaacacacctctacatatggatcttcttccacaggcgcatctttagatagcttacgcacaaccaccagtattagtgtctcaagcaacaccacacagttagtctctacctgcacttccgagagcgattattccgatagtcctagcttcgccatctccactgccaccaccactgaaagcaatctgatcacaaacaccatcacagcttcttgtagtacggatagtaatttccctacctccgctgcttcttctacagatgagacggccttcactagaacaatctcgacatcttgtagcactttgaacggcgcctcaacccaaaccagtgagctaaccacatcgcctatgaaaaccaacacggtggttccagcttcttcttccccttcaactacaaccacttgtctagaaaatgatgacactgccttttctagtatctacactgaagtcaacgccgcaactatcattaaccccggagaaacatcttctctcgctagcgatttcgccacatctgaaaagccaaacgagcccacttctgtcaaatccacctcaaacgaaggcacctcttccacaacaacaacctaccaacagactgttgctacactgtatgccaagccctccagcacaagcctaggtgcaagaacgactactggtagcaacggtcgttcaactaccagccaacaagacgggtctgccatgcatcagccaacttcctcgatctacactcaactaaaagaaggcacatcaaccaccgcaaaactttctgcatacgaaggtgctgcaacacctctttctattttccagtgcaatagtctagctggaacgattgccgcttttgtcgtagctgttctgttcgccttctag

SEQ ID NO: 77313 - DNA, 396 bp, Saccharomyces pastorianus
atgcacgtatcgctccctacgagaaacaaatcttattttcgaatacgtacacgtacatatcaaataggcttatatcattgtgactctttaccaatcagggacatatcagtactaaatctgttaatagcaacgttatgcactattttttttccaatttttttttcgttgagtaaagttcaggtcgtacagtggcaaggaacgactatttctaaaaactgtattgccttaaccatgcttttcctcttgaacgctatccctggcatgtatctgataattgctttccctcgtctacaaacagtaattcccctgcagcgaaatactcctgttcgaattacgaaatcggtgatagttaaaggcgcagtgagcgtgccacggatctcctctccgatgcactag

SEQ ID NO: 77314 - DNA, 87 bp, Saccharomyces pastorianus
atgccagggatagcgttcaagaggaaaagcatggttaaggcaatacagtttttagaaatagtcgttccttgccactgtacgacctga

SEQ ID NO: 77315 - DNA, 417 bp, Saccharomyces pastorianus
atgcttgattatttttttttactagctttctgtgatgtgtattatactgagactttctggtatcattttttcttgaaatcttttattaatgatgcaaatccaccacttggcttcttcttcttacctaaagcagcactagcggatttcgcactaataaaactttttccatcatcagatgaatcccctgagtcatccgaatctgactcagatttagaatctgaactggaatccgatacggagtccgaactggagttagagtcagaatcagagctagattcatcatcactgcttgaaggggcttttgtttgtgacttctcattcgatttagaagttttttcctttacatctgggatgcctcttgaaacaagatcagataatgaactcaaagaaggacgaacttttcttggaaggtcatga

SEQ ID NO: 77316 - DNA, 3693 bp, Saccharomyces pastorianus
atgtatatcaaaagggtgataattaagggttttaaaacctacaggaacgaaaccattattgataatttctcgccgcatcagaatgttattattggctccaatggttcaggtaaatcgaatttcttcgctgcgattagatttgttcttagtgacgattactctaatcttaagagggaagaaaggcaagggcttatccaccaaggttctggtggttcagtgatgagtgcctcggtagaaattgtgttccacgatccagatcattctatgatattgccctccggtgtactttcgagaggagatgacgaagtgaccattagaagaacagtagggctgaagaaggatgactatcaattaaatgacagaaacgtgaccaaaggggacatagtcagaatgttggaaaccgctggtttttcaatgaataatccgtataatatagtaccacaaggtaaaatagtcgccttaactaatgccaaggataaggaaagattgcagttattggaagatgttgtaggagctaagtcatttgaagtaaaattgaaagcttcattgaaaaaaatggaggaaacagagcagaaaaagattcaaattaacaaggaaatgggtgaactaaactctaaattgagtgaaatggaacaggaacgtaaggaattagagaaatacaacgagttggaacgcaacagaaagatctaccagttcacattgtatgatcgagaattaaatgaggttatcaatcaaatggaaagactggacggtgattataataacacggtatactcttccgaacaatacatccaggagttggataaaagagaggatatgattgaccaagtctccaaaaagctatcaagtattgaagcttcactgaagatcaaaaatgcgactgatttacaacaggcaaaactacgggaatctgagatttctcagaaattaacaaacgtcaacgtaaaaataaaggatgttcaacagcaaattgagtcaaatggggagcagagaaatttggatagtgcaactttgaaagagatcaaatctataattgagcaaaggaaacaaaagttgtctaaaattttacctagatatcaagaactcacaaaggaagaagcaatgtacaaacttcaattggcctccttgcaacaaaagcagagagatcttatcttaaagaaaggagaatatgcccgttttaaatcaaaggatgaacgcgatacgtggattcattcagaaattgaagaactgaaatcttcaatacaaaacttaaatgaactggaaagtcaattgcaaatggatcgtacttctttaaggaagcagtactctgcgattgatgaagagattgaagagctaattgattctatcaatggaccagataccaagggtcaattagaagattttgattcggaattaatacacctcaaaaagaagctgagtgaaagtttagacactcgtaaggaattgtggagaaaggagcaaaaattacagacagtcttggaaactttattaagtgacgtcaatcaaaatcaaagaaatgttaatgaaaccatgagtagatcattggcaaatggtataataaatgtgaaagaaattacagaaaaactaaaaatatcaccggaatctgtctttgggacattaggtgaactgattaaagtcaatgataagtacaagacatgtgctgaagtaattggaggtaactccctcttccacattgtcgtggataccgaagaaacggccactttgattatgaacgaactatatcgtatgaagggtgggagagtgacgtttattcccttgaacaggttatctttggacagtgatgttaaattcccctcaaacactactacacaaatccagtttactcccttgataaagaagataaaatatgaacccaggtttgagaaggctgtcaaacacgtttttggaaaaactattgttgtcaaagacttaggtcaaggtttaaaattagctaagaaacacaaactcaatgccatcactttagatggtgatagagcagacaagagaggtgtacttacaggtgggtatcttgaccagcacaaaagaacacgtttggaatcattgaaaaacttaaatgaatcaagaagtcaacacaaaaaaatactggaagaattagaattcgtaagaaatgaactaaatgatattgatactaagattgatcaagtaaacgggaatataagaaaggtttctaatgacagggagtctgtcttaacaaatatcgagatatatagaacatcgctaaacaccaaaaagaatgaaaaattaattctcgaagaatcattaaacgcaattatactaaaactagaaaagctgaatacaaatcgtacatttgctcaggaaaagctaaatacattcgaaaatgatttgcttcaggagtttgatagcgaactctcaaaagaagaaaaggaaagattagaatctttaacaaaggagattagtgcagcgcacaataagctaaatattacatcagacgccctagaaggtataactacaaccattgactcgttgaatgccgaattggagtccaaacttatcccacaagaaaatgatctagaatccaagatgtcagaagtaggtgacgcatttatttttggtctacaagatgagttgaaagaattacaattggagaaggaaagcgttgaaaagcagcatgaaaacgctgtgttggaactaagtaccgttcaaagagaaattgaaagtctcattgctgaagaaactaataataagaaactgctagaaaaagcaaacaatcaacagcgattactattaaagaagcttgacaatttccaaaaaagtgttgaaaaaacgatgattaagaaaacaactttggttactagaagagaagaattacagcaaaggattagggaaattgggcttctgccagaggacgctttagtaaatgattttagcgacatcacaagtgatcagctattacaaagactgaatgatatgaacacagagatttctggtttgaaaaatgtaaacaagagagcttttgaaaacttcaaaaagtttaacgaaagacgcaaggaccttgcggagagagcttcagagctggatgaatctaaagactcaattcaagatctaattgtcaagttaaaacaacaaaaggttaacgcggttgattctactttccaaaaggtttctgaaaactttgaagctgtttttgaaagattagttcccagaggtactgctaagttgattattcaccgtaagaatgataacgctaacgaccatgatgaaagtattgatgttgacatggatgcagaatccaatgaaagccaaaacggtaaagatagtgaaattatgtatacaggtgtttcaatttctgtttccttcaattctaaacaaaacgaacaactgcatgttgaacagctctcaggtggtcagaagactgtatgtgccattgctttgattctggcaatccaaatggttgaccctgcttccttctatctgtttgatgaaattgatgctgcactcgacaagcagtatagaactgcagttgctacacttctaaaagaactgtcaaaaaatgcccagtttatttgtacgacgttcagaacagatatgttgcaagttgcagacaaatttttccgtgttaagtacgagaataagatttccacggttattgaggtcaatagagaagaagcaatcggattcattagaggtagcaataaattcgctgaagtctaa

SEQ ID NO: 77317 - DNA, 642 bp, Saccharomyces pastorianus
atgtcactaccggcacatttgcagcagactttctcaccagaagaaatacagttcattgtggaaaacgagccagtaaagatttttcccagaataacaacacgccaaaaaattcgtggcgatgatagaggaactggaaaccacacccgctggcaacttattactacagatgacaaagctttaaataatatggtagccatgcgttctacagaagtggttctttggatcgccctattactgaagcaacaatccaagtgcagtattgtagcaccacagtggttaacgacgaaagagcttgatagaaaaatacaatatgagaaaactcatccggataggtttagtgagttgccgtggaactggcttgtcttggcacgtatacttttcaataaagctaaggatgattttcatgaccccattcacgaattacgtggtaaaatacaagacttaagggaaataaggcagatcaaagtgttaaaaggccttaagtatttgaatgaatctcatttacaattggataatttaagtctattagaaatcaatgagttgaggccgttcattactgaaatcatggataaactgcgagaaattcacacagcatctcttaccgctggtactgaaaatgatgaagaagaattcaatatttaa

SEQ ID NO: 77318 - DNA, 1725 bp, Saccharomyces pastorianus
atgtggaggagaatattcgcgcatggactcaagtatgatcaacccaatgcatcttcaaaaaacttgatcctttcagttctgaatacaaccgctacaaaacgagaggctaaggattatctctcaaaatatacaaatgatagtgggcagcataatcattgtttgttttttatcagggacctgcataaagtcgcacctgcgattttgtcccagttttcaagtgtcataaagagactaggaatgctaggtttgcgacctatgtttgtaattccgccgtcgccaactcatgtaaatatacaggcagagttacttgacagtatcgttacagaagcagatttaaagccacttcactttaaggagggtcttactaaatcccgcactgggttatatcattctgttttttcgcaagagagtcgtttctttgatattggaaattccaattttataccaattgtgaaaccttatgtgtataatgaagagactgcttcggaatttatgacaaaagatgttgtaaaatttatggattgcctgtgccaagggaatattccacacattgacaaattcttcattctaaataatgccggaggtataccttcgggagagagaaatgataacgctcatgtattcatcaatctttctcaggaactcgagcatttgtcctcgtcattatctcacaatataagcactctaaccaaacgagagccacgctcccaaaacctgttacacagaatggaggtgtacgttaaaaaagatgagatatcttccttagaatgtgaataccatgatcatttagaaaacctgttattgatggacaaagttttatcgaatctagcggctacagcaacgggactgattacaactgtcaaagctgccgcactatcatcagataggaaaaatcctttagtatataatttattgacagaccgatcgctaatttcttcttctttaccaaggtttaaaaaaaaggacggcgagatagactcaccagccaacatgtttgatgatcacgcatggtatgaattgccttcccaacaggtaaatgcagctccttctaactcagatgcagttttagtgacaactgttctcaaaaagggcgtccatatcaaaacttatgactataagacgctgactcaattcaactcaattgggcttccaaaggagttccacgtatctgagaaaggagcaaaaccctcgagcaatagtccaaaactagatatcaacaaatttaaatccatcatcgaccagagctttaaaagatctttggatttgcatgactacataaaaaggattaatggaaaaatagctacaattattgtgataggtgattatgaaggcattgcaattcttacctatgaaggctcggaggaaaattcctttgtttatctcgataagttcgccgttctaccacacttgaaaggctcgctgggtatatctgatataatcttcaatttgatgttcaaaaaatttcctaatgagatactttggagaagcagaaaagacaatgtggtgaacaagtggtattttcaacgtagcgttgctgtgctagatttgtcgattgacttagaccccgaacactgtgatgaaaagcaaagccaatttaaactattttactacggtaaccctcaatacgctaagagggcactacgtgacaagaaacgtttaagagaattcatgaggtctgtcagggacatcaagccaagttgggaaaatgaaaaaaatatttcatga

SEQ ID NO: 77319 - DNA, 1785 bp, Saccharomyces pastorianus
atgacaatggcaacaaccgcaatgaatgttagcgtacctccaccagatgaagaagaacagttactagccaaatttgtattcggtgatacaacagatttacaagaaaatctcgctaaatttaatgccgatttcattttcaatgaacaagaaatggatgttgaagaccaggaggatgagggatctgaatcagataacagtgaagaagatgaagcgcagaacggtgacttagaccatgttaacaacgatcagttattttttgtggacgatggtggtaacgaagatagtcaagataagaatgaagatgccatggacgtggatgacgaagatgactcttcaagcgatgattattctgaggactctgaagaagctgcttggatagattcggatgatgaaaaaattaatgtgcctattcttgttaccaataagacaaagaaattaagaacctcctataacgagtccaaaatcaacggtgttcattacatcaacagattgagatctcagtttgaaaagatatatccaaggcccaaatgggtggacgatgaatctgattctgaattagatgacgaagaagacgatgaagaagaaggttctaataatgttattaatggagatattaatgctctaacgaagatcctgtctactacttacaattataaagacactttatcgaattccaaactattaccccctaagaaacttgacattgtgcgtcttaaagatgcaaatgcatcacacccgtctcattccgccatacaatctctttcattccatccttctaagcctctactgttaacgggtgggtatgataagaccttaagaatatatcatattgacgggaaaacgaaccatctagtgacaagtttgcacctggttgggtctccaatacaaacatgtactttctatacttctctatcaaaccaaaatcaacaaaatatattcaccgccggtagaagaagatatatgcattcctgggacttatccttagaaaatttaactcattcacagactgccaaaatcgaaaaattttccagattgtatggacatgagtccactcaaagatcatttgagaatttcaaagttgcacatttgcagaattcacaaacaaattctgtccatggaattgtccttttacagggtaataatggttggattaacattttacattccacttccggactatggttaatgggctgcaagatagaaggtgtgataacggatttctgtatcgattatcaacctatttcacgtggtaagtttaggaccattttaattgctgtaaacgcgtatggtgaagtgtgggaatttgacttgaataagaatggccatgttataagaagatggaaagaccaaggtggcgtgggtataacaaaaatccaagttggtggtgggacaacaactacttgtccggctcttcaaataagtaagataaagcaaaataggtggcttgcggtaggtagtgagagtggatttgttaatctttacgatagaaataatgctatgacctcgtcgacccctacacctgtcgccgccttggaccagctaacaactaccatttctaatctacaattttcccctgatggtcaaatactgtgcatggcatcccgtgcagtcaaggatgctttgagactagttcatctgccttcttgtagcgtgttcagcaactggcctaccagcgggacgcctttgggtaaagttaccagtgtcgcattttcgccatctggtgggctactggccgtgggtaacgaacaaggtaaagtgaggctctggaaattaaaccactactaa

SEQ ID NO: 77320 - DNA, 900 bp, Saccharomyces pastorianus
atgaaggttgttaaggaatttagtgtctgtggtggcagattgatcaagttgtcacataactcgaactctaccaagaccagcatgaacgtcaatatctatttgcctaagcactattacgcccaagattttccaagaaataagcgtatcccaactgtgttttacctttctggcttgacgtgcacgccagacaacgcctctgagaaggctttttggcagtttcaagctgacaagtacggatttgcaatagtctttccggatacgtccccacgtggtgacgaagtagccaatgatcctgagggctcctgggattttggacagggcgccggattctatctaaatgccacccaagaaccatacgcccaacattaccagatgtacgactacattcacaaagaactcccacaaacattagattctcattttaacaagaacggtgacgtaaagctggacttcttggacaatgttgccatcacaggtcattcgatggggggatatggtgcaatttgtgggtatttgaagggctattccggaaagagatacaaatcttgttctgccttcgcccctatcgtgaacccttccaacgttccctggggtcaaaaagcgtttaaaggttatctgggcgaagaaaaagcccagtgggaagcgtacgacccatgtttattaatcaagaatattagacatgtgggcgacgacagaattttgatccatgtaggagactccgatccctttttggaagaacacttgaaaccggaattactacttgaggcggtgaaagccacttcatggcaggactacgtggaaataaaaaaagttcacggctttgatcactcctattactttgtcagcactttcgttccagaacatgctgaatttcatgcgcgaaacttgggtttgatttga

SEQ ID NO: 77321 - DNA, 351 bp, Saccharomyces pastorianus
atgagtaaaaaaaggaaacgaaaatatgtcctaattgtcttcgtcaacactcaccactttatgcttcacctggggactggaacccttggaggtagtggtggtagtaatgtctaccgtgccatcgtcaaagtagattttttcagttttgacggtgctgggttttgcatcattggaatccttcgtggtactaatggactgtgcccttccaacaattttcttggatccatctgcagaagcatattcagcatcgttgcccagatgcaagtcgtcccaattcaacatgaggtcttctggagttctagccagaggctctacggcagtgctcctagtcttgattctttgtttttgtag

SEQ ID NO: 77322 - DNA, 759 bp, Saccharomyces pastorianus
atgggcttttatgaaggcgatgacaatgatgccaacaccaaggcatttaatgacaaatatatcaaagatcaaaagttcgcaacggcacccttctggaacctctttccaaagttaagggatattgatgaatacgataatccactcctaccactgcccttcaatttcaacttcagagatcttggagatagtgcacttgccatggcgtccggaatccctacggtgaagcagtttgacaagtgcgaagaacttaagggccagtctgcatggaccacccaagggatttggaaatgtcttgtcccaagtaagactatcccccctctaccacaattggacttcctcttacctctggaggagatcaaatctgacaagtcgcactctcatgggttgttcttcaatgatttcaacctctttttgaagtggaggtcgcacatgaatagactacaaaaacaaagaatcaagactaggagcactgccgtagagcctctggctagaactccagaagacctcatgttgaattgggacgacttgcatctgggcaacgatgctgaatatgcttctgcagatggatccaagaaaattgttggaagggcacagtccattagtaccacgaaggattccaatgatgcaaaacccagcaccgtcaaaactgaaaaaatctactttgacgatggcacggtagacattactaccaccactacctccaagggttccagtccccaggtgaagcataaagtggtgagtgttgacgaagacaattag

SEQ ID NO: 77323 - DNA, 504 bp, Saccharomyces pastorianus
atgaacaacgagactagtggtaaagaaacggcgtctgcacctctgtgttcgcccaagttacctgtagaaaaagtgcagagaatagccaagaatgatccagaatatatggacacttcggatgacgcattcgtagccacagcgtttgctacagaattcttcgtccaggtgctgacacatgagtccctacataggcaacagcagcagcaacaacaacaggtaccgccgctcccagatgaactcacgctgtcgtacgatgacatctctgccgcaattgtgcactcttctgacggccatctgcagtttttgaatgatgtgataccgacaacaaagaatttgaggcttctagtggaagaaaaccgagttagatatactacaagtgtcatgccccctaatgaagtttactccgcctatgtggtgaacgatacggctccgaagcccaacattgtcgagattgatcttgataatgacgaagacgacgacgaagacgttactgatcaagaataa

SEQ ID NO: 77324 - DNA, 396 bp, Saccharomyces pastorianus
atgacacttgtagtatatctaactcggttttcttccactagaagcctcaaattctttgttgtcggtatcacatcattcaaaaactgcagatggccgtcagaagagtgcacaattgcggcagagatgtcatcgtacgacagcgtgagttcatctgggagcggcggtacctgttgttgttgctgctgctgttgcctatgtagggactcatgtgtcagcacctggacgaagaattctgtagcaaacgctgtggctacgaatgcgtcatccgaagtgtccatatattctggatcattcttggctattctctgcactttttctacaggtaacttgggcgaacacagaggtgcagacgccgtttctttaccactagtctcgttgttcattgtgttagcctga

SEQ ID NO: 77325 - DNA, 717 bp, Saccharomyces pastorianus
atgacagtgggtattgctaggaaactctctagggacaaggcgcatagggatgcgctgctaaaaaaccttgcgtgccagttgtttcagcatgaatctatagtgtcaacgcatgccaaatgtaaagaggcttccagggtcgcagagcggatcattacctggacaaagagggcaataacgacaagtaatagtgctgcacaggcggaattaaagtcccaaattcagagccaattgtttttagcaggagacaacagaaagttgatgaagcggttgttcagcgagatcgcaccgcggtacttggaaaggcccggtgggtacacgcgtgtgctgcggttagagcctagggctaacgactcagcgctgcaatccgtcttggaactagtcgactctcccgtgatgtccgaatcgcatacggtgaacaggggcaatttaaagatgtggctgttagtcaagtcagtcatcaacgatgacgccaaccagctacctcataacccactcacattgcagaatcttcacaaagtggccaagtttaaagcagaagcgcagctacatggtgaaattatgctcatcaagcaggtcttactcaaggaaatgtcccttccctatgatgaggcactcgaaaacgaaaggacgcaggcacttttgaaggaggtctactcttcgtcattgccaaagaagacgaagaaaccctcctcctatgtcatggttcccagaccttaa

SEQ ID NO: 77326 - DNA, 1335 bp, Saccharomyces pastorianus
atgaaacaacgattcattcgtcaatttacgaacctaatgtctacttcgagaccgaaagttgttgccaacaaatattttacttctaacactgccaaagatgtttggtcgctaaccaatgaagccgctgcaaaagctgccaataactccaaaaaccaaggccgtgaacttattaatttaggccaaggctttttttcatattcccctcctcaattcgcgattaaggaggctcagaaagccctagacattccaatagtcaatcaatattctccaactagaggtcgaccttcattaattaattccttgattaagttgtattcccctatttataacacagaattgaaagcggaaaatgttaccgtaacaacaggtgccaatgaaggtatactttcttgcttgatggggcttttgaacgctggtgacgaggttattgtttttgaacctttctttgaccaatatattccaaatatcgaactttgcggtggtaaagttgtttacgtccccataaatcccccaaaggaattggatcaaaggaatactagaggtgaagaatggaccattgactttgagcagttcgaaaaagcgattacatccaagacaaaagctgtcattatcaatacccctcacaacccaattggtaaagttttcacgcgcgaggaattaaccactttaggtaacatttgcgtcaagcacaacgttgtgattatatctgatgaagtctatgaacacctttacttcactgattctttcactagaattgccacactctctccagaaattgggcaactaaccttaacggtcggttctgccggtaaatcgtttgctgctactggttggagaattggttgggtcttatccttgaacgcagagttgttaagttacgcagctaaggcacatacaagaatttgttttgcatctccatcccctctacaggaagcttgtgcaaactctattaacgacgctttaaaaattgggtattttgaaaaaatgagacaggaatatatcaacaaattcaaaattttcacatcgatctttgatgaattgggactcccatatacagctccagagggtacatattttgtcctcgttgatttctctaaagtgaaaattcccgaggactatccctacccagaggagatcctgaataagggaaaagattttcgcatttctcactggttgatcaatgaattaggtgtggttgccattccaccaactgaattctatatcaaagagcacgaaaaggccgctgagaatttgttaaggtttgcagtttgtaaagatgatgcttatctagaaaatgccgtagagagattaaaactactcaaggactacttataa

SEQ ID NO: 77327 - DNA, 1227 bp, Saccharomyces pastorianus
atgagtgacaaatctcatcagatatattgctacttttggctctttggtttgatcaataatgtactttatgtggtaatactttcagcagctgttgatatcgtgggtcctaccttgcctaaatctctagtattgctagcagatatattcccatcactcgccattaaattgtgttccccattctttattgatagaatcaagtacagctatagaatatggtctttgatcacgatgagttgcttaggaatgttcttagtttcttttaaaaacttgtttgtttgtcttttaggaatatctttcgcatctatatcttccggatttggagaagtgacattcctacagctaacacactattacaaacaaatttctttaaatggatggtcgtcaggtactggtggtgcaggaatccttggcggagcatcttatatgttcttaacttcaatctttaaagttccagtgaagctaactttactaatatttagtctccttccatttgcatttttgttttattttaaattagaatccaatgataccaacctgactttccaaagtcttcaacaaattgacgaagcagaggatgaccagttggtgccctttcctgtcgcctttacacataccaacgcttcgcaatccctgtattctacaagacagcacattttgcaaacggtcaagagacttcgaagattggtttttccatacatggttccattgaccaccgtctacttattcgaatatttaataaaccaagcggtagctccgaccctattatttccgattaatggtgatgaaagaagtaagtcgatgccatttttcttccataaatacagagatatatacgtaacttatggaacgctctaccaattaggtgtctttatatcaagatcctttggacatcttataagaatgaggagtttatacatcttagcgtttttacaaggtgtgaatttgtgcataacggtactgcaatcatggttttatgtcacacgttcgccctgggcggtgatgatattaatattctatgagggttttcttggtggtgcgtcatatgttaacacattcttaaatattctcgaacaagaggatcctgatgaaacagagttcgccatgggtgctgtgtccatcgctgattcgtttggcgtttttttggctgcgttacttggtttggggctagaacccaaactttgtaggcatcaaattgccgatgacagaccttggtgtaggatggaataa

SEQ ID NO: 77328 - DNA, 1632 bp, Saccharomyces pastorianus
atgacagcagaagatatactccctcgagaaagaacatctactacgacacaacgccctgtcaataccgaacaataccttaatgtgcaattagccacagccccagtaaaaaattttcagactacaagcgagattagccggcaaactcttgtagacacatcaaatgatgacgtttattccatcaagaatttgaagggctcgaggaaccccattagccctagtgtttctaacgttggcttccaatccatattccatacagtagatcatcctcgatcgaaggtcagtgtggcctcaaatcattccttgaggagcaatgacaatgcctcagctgcaacatctaaatctggttcttctcagataggggaatctcacagcattgacacggtggagtgctcgaacaatctatctaaaaagttatcttctgatgcaatatccattactcagaaaagtttacactccacgccctccggcaggtatatgaaaggaaaggcttctggcttttttaataggagaaacagagcacatacgaccatttcatcggatcctgcctcctttttgacagattcaagcaccttacataatagttcacattcatttcgaaacgtgattaagaactttttccaaaataaaagccacaggcacattggtcaagatgctatcgagcctgcaattccaaattccttgagtaaatttctgcattcctcttacggaagacataaatctccgtcacaatttattcatattaatgcggggcaacttgtggactcaggaacttctgtgtactcattgaatgttaatccatctggtgtcgatcccaacacaatcgttgaggatccgctttctggaactgatcctgcctcaccgaatccggtctcaatgttacacgatcttttaagaaatttaccatctctggaagctaactataaacacttcaactcccaagaactgacaaccctaacaaataatatttggaatatattttgtagtaacgtagcagagttattcagaactcaaagaatatggaaactcagggccaaaatagaaaattttaacgaagttttagaattctattgcattttaaaaacagatccaagagtcacacatagcggcatgaatagaattatcagcgatttgaaagaatttttggttagttccctatacaatttagaaaaccaaattgtttttaactattccaatgaagacacaataaataacgcattgaaaagattaggcgttatatggcggatattttatcaagaagtatattatgatttagccgctgtgttattaccgttggatcagagtatcagagaagatggtaattctacggttttaaagtcaggcaatgaaagtcggactcacattaatggtaattattccattgggtttcttttgcttatgtgctttagagattcaatagtcttaccttgttatgaaaacttcgtaaatagtaatgatggtatcagcaaaagttttcaactttacattttcaatcaagaagaagaaagtaatgtcacagaaacagataaattgacattactgcagtgttttggcatattgagtaccattcaaagtaatgataggaatcaacgaattatcgaagagttattagcaggcattagaatgagtatatag

SEQ ID NO: 77329 - DNA, 738 bp, Saccharomyces pastorianus
atgacaatggaaaaaaatggaggtaatagcagccgtggtggccaagtaggcggcaagtctgtgtgtgtttactgcgggtcttcatttggcgctaaggcgctatactcagaaagtgcagaagaattaggagcccttttccataagctgggatggaaattggtatacggtggaggcactactggtttgatgggcaagatagcaaggtctacgatgggacctgatttaagcggacaggttcacggtatcattccaaatgcacttgtgtctaaggaaaggacagacgaggataaagaagatgttaataaagcattgttggagtctgtagaaaatcataagggcgccactcctatttctgaagagtatggggaaacaacgattgtaccagatatgcatacgagaaaaagaatgatggcaaatttgagtgacgcgtttgttgctatgcctggtggatacgggacttttgaagaaatcatggaatgtatcacgtggtcgcaactggggattcataataaaccaattatcttgttcaatatcgatgggttctatgacaaattattggagttcctcaaacactctattcaagaacggttcatcagtgtgaagaatggtgaaatcattcaagttgcctccactccgcaggaagttgttgataaaatagagaagtacgtcgttccagagggccgtttcaatttgaattggagcgacgaaggtcacgctcacgaggattgtgctaaataa

SEQ ID NO: 77330 - DNA, 1437 bp, Saccharomyces pastorianus
atgtcttctgaatcaggaaagcctatcgctaagcctattaggaagcctggctataccaatccggctttaaaagcccttggtatacccgccttgaggctgccttctcgaaactggatgatcttttggtctgtgttaacagtatccatcggtggcatagcctatgacaaatacaagcaacgtcagattctgagccatgcaacagacttggtgaagcctttggcagaggagtccatggaggtagacaaagtgccacgaaagatcactgtttttattgcacctcctccaaatgattatctggagagttcgttgaaagtttggagacgatatgttaagcctgtactgtattatgcagggttggactatgaattagttcaagaggataggcaagggattattagaactaatgtagccaacagaatcagagaattgagaaaggaaatattggcatcgacggatgggcagccagttaaagagcctaaccaaacggtagcaaaaccaagtggttcttcaaccagtaaaatttcatcactactaccgttcaataaaatcattcaagatcctgctgaagaagatgactcgtttgatccagaaatcggtaaaaagttcaaggagaacttcgactggagaaacgttataggtatcttctatacaatgccaaaaccgaagcatataataagtgaagacgccctgacaaaggaccctatattatctggtggtgttatttgtttaggtagaggcgcctataaggagtacattgccggtattcacgaaggcttgcttggacccatcgagaagaccgaaaaaacaggatccactgagcctaagatgactggggttgtagaagcaaatcaaatagaatcaaaggtaagtgaatccggtgctacggaactggtggatgccgagaaagagactgctttggaagaggccaaagtacaagatgatctaaaggttgatgaagaaaacagctcagaggattcgcaaaaatttttgaagccatttatttcttcagaccaataccctgacctgcaaatcgcttcggaattacaaactccaaatggcgaattcataagaaaccccaatacaaatatcccgcttctgattaatcagccgttattggtcattccaatacctaacttgataggttttactaccattccaaggagaatacatcgtttttaccagaagcgtttctacgtagaggacgtgtgttcaagtgtagttaactgtgttcgacaaacccgtataagaccgtttgatattgcaaaggatattgatttggcgaaggacgaagaaaaagattggccacagaactgggtcaaacagggtaaagaaaagaacagcgaatggacccaagaattagtatgtgatcctagaatcacgaagcatatgtttgtttacgaaaaaccacccaaggaagagccagaatcagatatttaa

SEQ ID NO: 77331 - DNA, 1140 bp, Saccharomyces pastorianus
atgagtatttttttcaagccgccgattgatattgagatccttttcgataatgaggaatctcgcaaacacgtagacattgcaacaagatcaagtaattccagttacaaatcaatgaaggaaagcttgcccgtctatgaagatggcgaatcccttggtggaattgttactttgagagttcgggatagtaaaaaggtagaccacttgggcataaaagtgtccgttattggatccattgatatgttaaaatctcatgggagcggtaattcatcttctaaaaaagttacctctagcacatcatcttcctcttctaatggttcagtagatgtgcggaagaattcagttgatcaatttttatgccaaagctatgacctctgtcctgctggtgaattacaacattctcaaagtttcccattcctattcagagatttgagtaaaagatacgaatcttataaaggcaaaaatgtggatgtagcttactatgttaaagtaacagttatgaggaagtccacagacatctcgaaaataaaaagattttgggtctatctttataatagtgtaactactgcgccaaataccctttccgcaaatgagacaaaggcaaccactaatgacattgctggtggtaactatgctgcagataatgcgagtgacaatacgcaaacaaagagcacccagggtgaggcgggagacgttaatcaagttttgccgatatcacattcaaataatgagcccaagcctgttagattggatataggtatagaaaattgccttcacattgagtttgaatatgccaaatcccagtacagcttaaaagaagtcattgtgggacgtatatatttccttttaacgagactaagaataaaacatatggaattaagcttgatcacaagagaatcttccggcctacaaacttctaatgtaatgacagattccactgctatccgatacgaaataatggatgggtcttcagtgaaaggtgaaaccatacccataagattattcttgagcggctatgacctgacgcccaatatgagctgcaactacttcaacgtcaagaattatttgagcttggttattatcgatgaagatggcagaagatattttaaacaatcagaaataacattgtacaggacccggtag

SEQ ID NO: 77332 - DNA, 120 bp, Saccharomyces pastorianus
atgcacctaagaagcagatggtggcttgccttactgtattgtaaagatccagtctccagatctgcgaccactccgaaggtcgaaacccgagcttcctgtttgctgtctcgcgccttttaa

SEQ ID NO: 77333 - DNA, 999 bp, Saccharomyces pastorianus
atgatcagaattgctattaacggtttcggtagaatcggtagattggtcttgagattggctttgcaaagaaaagacattgaggttgttgctgtcaacgatccatttatctctaacgattatgctgcttacatggtcaagtacgattctactcatggtagatacaagggtactgtttcccatgacgacaagcacatcatcattgatggtgtcaagatcgctacctaccaagaaagagacccagctaacttgccatggggttctctaaagatcgatgtcgctgttgactccactggtgttttcaaggaattggacaccgctcaaaagcacattgacgctggtgccaagaaggttgtcatcactgctccatcttcttctgctccaatgtttgttgttggtgttaaccacactaaatacactccagacaagaagattgtctccaacgcttcttgtaccaccaactgtttggctccattggccaaggttatcaacgatgctttcggtattgaagaaggtttgatgaccactgttcactccatgaccgccactcaaaagactgttgatggtccatcccacaaggactggagaggtggtagaaccgcttccggtaacattatcccatcctctaccggtgctgctaaggctgtcggtaaggtcttgccagaattgcaaggtaagttgaccggtatggctttcagagtcccaaccgtcgatgtttccgttgtcgacttgactgtcaagttggcaaaggaagctacttacgaccaaatcaagaaggctgtcaaggctgccgctgaaggtccaatgaagggtgttttgggttacaccgaagatgccgttgtctcctctgatttcttgggtgacactcacgcttccatcttcgatgcctccgctggtatccaattgtctccaaagttcgtcaagttgatttcctggtacgataacgaatacggttactccgccagagttgttgacttgatcgaatatgttgccaaggcttaa

SEQ ID NO: 77334 - DNA, 2469 bp, Saccharomyces pastorianus
atgtgccataattctgttaggagcggaaataaggccggttttttggggatcaagttcggaagtgctcttctctcaattgccacaggtgccattgctatcgcattgctatgcaagttccacgaccacgaagcggtactgatagttattgtatgctcgacattgttatatggaataccgtcactgatatcgtttatcacagagactgtttttgcgcctagcaagtttcatattggatacttttacaacgttcttaattttgcattgccactgatcaccatgggctgcacagtggactattttcataatactttgaggagcccaatatcggtacaaagcgagtctcacagagtctatataacaactctggattctttgttaattttcacacttttcattaatggcatacaattaggattcttcctgaaggatggcaatgcgaacaatttcggcagctcatctaacaatattagtacggatcaatatgacaaagaagcaaatgcggtggaaaatggtagatttgtaccccttaagaactcttcacagaccttaacaccagatttggaattattacacggtagtcccaagagtatgaatggggtagcgtggctgattaatgaactctccacaaattcaaacacaaacgcaaacaaaaccatatcatccgatgaaaattcaaactcttcagttattcgacacaaattaggaccgattagcaccagcaagtgtcctaaaaagccatctcattcgcatttttctaaattgaaaaaatataacagtttctttttgggtcctaaagaaaatcgatacaaaagaaatacacaacaagctactaaggttccgacagaaaagaaaagcaaccaccgaagtagccaatatgtatccagactatcaaccatatctgacatctcgaaaagtttcctgaatttcttagcattaaacgaaaaaaacggaaattcgacttccactgcgagaacaccaagtgaaggaagagtttcaataataattaacgaaggaaataatactttgaaatacaaaactccccatgattcgcatactattgattctccaaacttggagttagaaagagaagctattgggagaattaatagtgccttacttcctgcatgtttgagagtaacagataaaatgatatccccacagcaaagcactcaaaatgaggactcataccaagcaacaccattgataccccaggtggaagttgacgatgatttctatgtaggtgatatcttaatgactaatgaactacaagacattccacaagtcccaaggatatcatctgatatagaagacgatttcgaacaacaatataccaaacacgtggatttgccagcccgtgtcactttagagatgtgggaaaaggatcaggagaaaatacttcaaaaagtaaccacaaaccgggataaaagcaaattactaccccctttcagattcacctctgaaagtgatatggatccaagtacatccaccgaattggaagttgaattgcatacccaaaacaacttcagctttccctttaaaagtgcaggattacaaattgctacatcagaccaatttaaccaacaggagtttaaaacttcagatactattagcgaactagatgagtatttacatgatgccagcattcaagaagaggatgcaagtcagctgattgaaagcagtttgaaccaaaacaacctatcctcaactactattgacaatggcccaaaggatatgagtagatttagtacaaggcattcaccaaccaaatcgataatttccatgatcagtggatcaggaagcgtcaagcaccaacattcacacagcaccctaagcaacttttttacgggtcattcaagaaacaattctcaaataaatcagctattacagggttcttcttctaatatgatgtccaacacctcaccgcattcatctccaaccaagtcgttgagaatgagatttggaaagaaattgtcattatcaaatatctctgatacaatgtcgccatatgagggtagtacaacagatccgataaactactcgtttggccatggtcacaataaaaaccagagtattgattttagctacgtacgtactttgcaaagcagtcattcacctacaaaatcaacctcgggaaattctcgtcgggattctttaaacaatgatagaacccagagtactgttaatgaaagagcgcttagaactgcaagtacattattctatctccagcacaataacgccacatgtacattgaacggagaggagccagttctggacacaccacaatctatacagtcatcatcaagcggttctgagcaagaatcggcgggatctggttctggctatccagaagtagtgttcagcgagtatgatagagaaaaatggaatgttttgaggaatctaaaagagatagcgcccgaaaaaactatagagagcggacctgttgaagaactagtctctcccagtaaataa

SEQ ID NO: 77335 - DNA, 1191 bp, Saccharomyces pastorianus
atgtacgagatgtcaggtatagacagcctctttcatgatcgagttgttcatgactactctcatactagtgagcaggttatcgtcgtttacattagttcagcagccggggacaattcttggcttcatcagtggttcaaaccaggaaatcttagtgacgaggagcgcgaaaacatactgtgggtaaggttagtaaatggtactaaagagtgcttgcttttcaagagcattttcccctcctcatcggcgccaagcattaacatattacagaacggtctactcgaatgttctatccaaggtaatagcctttctcgtgagcaggatccttgggaaacctttatcaatgggctacaatcagtctttaagggtcaagtaacaaagaggaagttattttccaagagcaatgaagaatatcaaagagtcaaaagaatgattcagaatgacaagttggagaggaagtatgtttttcaaaatactaatgacccgcaaagaaagccacagaagtggaagcagttgacagttactgataatgttagttacaagagtcaaaaggggtttctcgcccagaactactgtactctacaattgaaactgcccaatggttacacaatctctaatactttccctcctcaaacaaaattacacaaagtaaggatgtggttagactataattgctacgatgatggaactccttaccttttccacagaaatataccaagagtgactcttacgcgaaatgacgaactcaaaagtttgcaagagttggatctgttgcccagatcgactcttatcttagaaccgctggaagccaataacaaaacattcgactacatggaacaatcttctcttctacacaaggtttactcaggtttgacatctttttgggcgaaagaaccggaagtagatgcttcctcctcccgtcttggttaccagaggttgggcacaaatgtgtcaaacagcgccaactactctttacaaaaattatctagcttagacatggtgtcggacgggggaggaggaggtgttggtgattcaatgactccttcagcatatactaccccaaggatgtatccttctaatggtacttctcaattgcgacaaaacgtgtctgaactaaacttgtcttccaataattctgcatctaataccaaagttcgtacattaggttactctaataataacggcaacaattaa

SEQ ID NO: 77336 - DNA, 2529 bp, Saccharomyces pastorianus
atgataaatgagagcgtttccaagagagaaggattccacgagtctataagcagagagacgagtgcaagcaacgctttaggactatacaataaatttaacgatgagcgaaatcccaggtatcgaacgatgattgctgagctgcacgagttttttcaccttactttagctgaaactataactgaaactgacgtgaaagaattggagtgtaataaagaaaaggccgctaaatttagaaagctaatgcctaagatgttgaacaattgccgtgaattaacgcaaaggaaatcatacattccttacaactcagaatttaatgggaatgacgaaaagcaaaagaagtttcagctgctacatcaacaccaaattgtgctgagtttccaagaattttgtgatgaattggcgaagttaataattgacgcgcacgtccttagctttttgaccagatgcgactattcttatgaaattatacccaaaaattggacctctttttacaagctatttcagtacgtaatgggtgccgttggtcctattatatcgtatgtgccggtaaattatcccatgataagaaaagaactaggatttgagaccttaacgatatttcagtattatgattccaaacttttcgaatgtatgaagtcacattttggaagggaattttccacccttgtaagcgctactattcatcactatattcatatgtttccaataacgaatacaatgttagagaaggaagttcctatgctccgtataatgtctaactgcaattttagtatagagggcttgagccccaaagatttttatatgaaaactctcagacaatattactgtgaggaatcaaatttaaggccgaggctggaaactttcaagaattttaaggtactattgacgaggaatgcattattagcatctttattttcccctgaatgggtcagcgatgcaaatgacttatttataagccatctactgttgaacaagaagtctattagcgaatacatagaaattgggaaggacacttatgatgaagaaaaagagagatatttcaaaactgagacacactttagcttattgatgtttagaaatgcttttgaagcaaaaaatatgctgtcaaaattcaaggaattctgtgatgatgccgtttcagaaaagttaaaggcagcatacggatccaatcatgatactgaaaggctatttgatgaggtagttcagctagctaatgtagatcacctcaaaatatactccgattccatcgagtaccatttatgtaatttacttggaagtaccagcaaagccatagaacagtatgtcaaatattttgagtcacatttattcatcatcgtcagaaagataaaaacaactaaaaaagacctacccagagatatgaaaataaagtatctcaacgaaaatcttcctatattgagactgaagttcgttaaccttcccacatttcctaattttttcgaaagatcaattttcagaaagacgatcttacaaagtgatcaaaattcctcatttattaaggatatattacctgtttacaaagacagcctcatggaacttttcaaacaaagaatcataacaaatgtctcacaagaggatgaaatgcgataccgagatcaatatcaaccctatttatcgcaattctttcagccggtagaggttatggcagatctgagaatcaaatatgcatcgttcttgtcgttttatgagaatatcgaggctgctgtgaagttcgggaagacatacaatgaaaacaacagcaagtcatttttcccacttatctttgatagagaaagaattcccaaagtttttcagcaatccaacgaagtaaagaaaaattttgtcctacctcaagagatggatgatacgtggaaccaatttctccgtaattatcacgagcagaataaagtggaagattcagatgcttccaaaaaagagctatatccgatgtggaacttgcaccactgcgaagtggagtcgccttatatcatacaggatggaactaacctaatatttgaattgacccttttccaaacatgtgtgctgactttattcaacgaaagcgatcatttgaccttgcaagttatatcagaggaaacgaaactggcgtacaaagacttagcgctagttttaaaatccttctgcaattataaaattctgacaagagacattgacaacacatacagtatcaacgagagcttcaaacctgatatgaaaaaagtgaaaaatgggaaactacgtgtggttctaccgagaaccgcgtctctccaaagtagcaacacaggcggtgaaagaaccagttctgcacaccacgaaggaagtaattcccaatggacccaagaattactaaaggcatgcataactagatccgttaagagcgagaggaatgggctagactacgaccatttatttgaaacggtaaagcagcagataaaaggctttagtgttggtgagttcaaagacgccttggccaagttgttacgagacaaattcataactagggacgaatcaacagcaacttacaagtactaa

SEQ ID NO: 77337 - DNA, 1377 bp, Saccharomyces pastorianus
atgaaggatgtcttacaatgggcgattgaccactacgagacaagagaccaactggtgcagaagggaatttggaaaggtgaactctaccatgactctatctttaaagaaaatagtagaggctggctctggaaagctttgcttctgtgtgatgaaaacaacaactgcttgttaactgataactttaaaggtttggaccttaaccagttcggcttggtgccagtgcctatgctggcagatggcgacaactatgacgaaaatcataatgcaaatgtacctaaaagggtcttgcactcgaacgtttcctcctcagtgggaatcaggaggctgactcccgtcgaggctgttgaagaacatcccttgtctgatgacaatgacaaaactaaaggttctttgtccaagagaagtgatgaaaagccgttgacactgagggaaactctggaaattatagatttggacctctcaaggataatgcttgacgatatatttcaggaacccaaggttcatgctcaaatgagacaacttttgtacaattacctgcttatacatcaaagcgaacacctacagtataaacaagggttccacgaaatattaagcgtcatttatctgcaattatatcacggtacagatctcgataataccgatttgcaaaacgttctgattatctttaacaagctaatgaaccaaatcgaaccgattttttataacgaagaaaatttgattaactgggataagagagtattcacgaaaatctttaggatttgcttgccagacttgttttcaaaggttttttaccaaccaccaaaaacgggcagcgggaagaaaaaaaacgtagaccatctgattcactccaacctaatctggctcatccgatggacaaggttgttatttttaagagaattacccttaaaatatgtgctaatcatttgggaccacgtcctgacgttcaattatcccttggatattttcattgcatgcactatcatcacccttttgttatccatttacgatgagcttcacgaactagtgagccaaggtgactatgaacatacgaataataacgatgaatttgttgaattgattttgcatttcaagaaaatttttgaaaaggaagatgccagtaaagatgatgaaaagtttttagacctgtgtaaggtcactggaaatttatgtgaattgtggtatggaaaaaattacgacgatatgagattgatttgcgacacttttataaatgcgaagttcggcataaagactagtgatgttttaagtatggaaacagcaaagttgactattgatcctaatagacaatcactcgaaaacaaactgagggagagggtaaggcaaacaattttgaagaacaaaaagaaaataagccaataa

SEQ ID NO: 77338 - DNA, 774 bp, Saccharomyces pastorianus
atgtttgttgattattccggactggagcgttacacggatataaatgcatcttttggcaagttggtcaacacttactgctgttttcagcgctgtgaagccatcagcgaacaattggagattctgaaaagtctagtaccaaagtgccacgacattgtggcacttactgacgaagactttgctagtggccgtactgccggactgacgcagaaattgtttgctatggcgatgaccctacaccagatcaccgactgtatcgacctcctgcagaaatgcaacaccataatacccatcgagatcgccaacccggctagctttgaaagcggcgccgcgacggcgccgctacgtcaaagctatgctaggctcttggatgactggtcccactacatgggcccatcaacggtaaaacacacaggctgtaccaaccgacccaagtggagatttccctggcaacagtcacggactatcatcatccccatgctgtttattggcgaaactgcaatgagcaccagggacctaaggtctgtgctgcatgattgtgagatcaggcacgcgagcgaaatgccgctgcagctactttggacgtcgtcaccggagttggtgtacgccacaccgcatgttgacgactacgacatttggtcgcgctacgggtctgattacaacatgcagatagaggacgaagacgaagcatcaaaagggcgacagcgcaagtgtgtggtgcagttggaggcactgttgggtgcgctacctactacggacccgttgttccaatggtag

SEQ ID NO: 77339 - DNA, 4194 bp, Saccharomyces pastorianus
atggactccaaggacacgcaaaagttgcttaaggagcaccgaatcccctgcatcgacgttggatggttggtcaggcccagtgcctccaccaccaagagctccagaccagggaaatccgagtccaaggccaacagtgtggctcctgacatccagatggacactgctcgcccgcccgttttcgaaacgtctgtagactcttccagcagcgttctttcttcaaacgataagggacgccgccactccgtagctgcgagcttgctaatggataatcagcgtgctaacgccgggtctacatccgttcccacaaacattcctccccctaggggtaggtcgaagtcagtggtggagactaacctgtctaacgttgaggctgactccggacatcatcaccaccaccaccaccatcacacggaagatgctcctgcacctaagaaggtcggattctttaagagtctgtttggccataggaagaaggatcaggaacaacaggagaaggaacgagaaaggaaagagcgctcaccctctccgactcacgtggaccgtggcgcggccataagaagagaaagaacggctaccatatctgcggaatcaccaccgcctttgcagtacaatgctccaccctcttataacgatactgtggtaccgttaacaagatccaagacggaatcagaagtgtattacgaaaatcatccgcaaagctactaccatggccgtatgcgcacataccactcaccagaagagggtaaagtcgacggaacttcccccgcagacgatcataactatggcggctctcgacctgatcctagattaatggatttcttgcgctactacaaatctaaggattacaaattagccgccttcaaagaagggaactttattaagtcatctgcgtctcccacaaccaagaaaaatagacgcgcttcgttctcattacataacgacaaaccacaacctgccaaatcacttgctcaccagaaatttgacgctaagggaagacccattccgccgcatcccgacgcacccaaattgccttccgccttcaggaagaagcatccaagcaacgcatcgatagtagacacagtggattccaattcggacgtttcctcgtcagcgcagaataataatcagacaccttcttctcataaattcggcgcctttttaaggaaagttacctcttatgggaacaacaacaacaacagcaccaatgcctcctccctttctgcgaatgtcaataatccagacacctcatcgacgtccctatggtcttctagttcaatggagttcgacccttcaaagataaccaccgtccccggcctcgagaatatacggcccttgaaacacgtctcctttgctacgaacacctatttcaacgatcctccacaacaaatatgcagtaaaaaccctcgtaaaggtgaagtggaagtgaagcctaatggatctgttgtcattcataggttgactccgcaagaacgcaaaaaaatcatggaatcgactagtttgggtgttgtcgttggggggaccgggcaattaaaactattaaatcccgaggaagacgacgcaaatgccaagagtaaagaggagatggcccctcaaaagcagaacgaagtggaggcacacgacgaggaggataacaattctcaaaggagaaacatcgttatggccgctgcagaagctgctgcagaggccagagccaaagaggcacctaacgaattgaaacgtatcgtgaccaacaatgaagaagaagtcactgtcagtaagaccgccagccatttgaccatcgataagccaatgatttcaagaaggggtgcttccacatcctctttggcctccatggtgtccagtgataccaacggtacgaacgcagatgatgaaggagaaattcttcccccaccttctttgaagatacctcacgacattgtgtatacccgttgttgtcacttgcgagaaattctgcccataccagccacattgaagcaattgaaaaagggctcgacggaccctatccccatcttacagttacgtaacccaagaccttctatggtggaaatttggtcgttcagcgatttcttgagcattgctcccgttttatgtctttcgttggacggtgtacaattaaccgtgcaaatgcttagaataattttgagttcgctggtttacaaacagcatttccaaaaactttctctaagaaacacccccttggatgaagaaggatggaaagttctgtgttattttgtctccaaggccaagtctctgcactctattgatttgacaatggtcccttccatcaagacaaatgtacaaaagccttctaaatcttctttgaagtcaaaaattctgagaatgcaatgcaacttggaaaatagatccgacatgaactgggaccttttgacagcttctattgccctcatgggcggtttggaggaaatcgtcatttccggggccaagatgaattctgcacaattcaaaaacttcattctcgttgcttgtatagcaaccgagagattgggcctcgcgtataatggattatctaagagccaatgtgatgatttggccaagtggatggttcaatcaaaagtgacaggtctagacgttggttttaacgatttgaatggcaaactttcctctttcaccgatgctgttttaggcaaaatacaaaaagctaacgagaaaaacgtcttcaaatttttatctctaaatgggacaaatttgagagtgaacgaacacgacacttttgagaataacgaggtcttaaaactgataagcgttttatgttattcggaaaatttaaaattcttggatatatcgaacaatcctgccatcttcccccactgtgttccgacgctgattgattttttacctgtttttgttaatcttgtccgtctgcatatcgactataataatttaagttccacgagtgtagtgatgctggccgaagtattacccatgtgttcaagattgaattatttttccatgttaggaacggaattggatttggcatcgtctaaagctctagcagaggcggtgaggaaaagttcatctttgatgactttggacgtggactatgtgtatatgccagagaacattaaggaaaaaatttcattatatgctttaagaaatattcaaggggagttgaaaagggttaatagtgacgataaagatatcaaagatagccaattttcaagcctacaggaccaactatcacttttattaactgaaaaagcggataattccgaacattacaacaaaatggttgagaatttcatggccaaaatcgcgttggcacgtatcaagattagtaaagtggttcatgatctttttgatttaaaactgaatggacaattaaatttggaaggtaaggaagctttgattagattatgcttcatagaggcaagtttggaaagaggctgtgacctgctgaaacaaagacataacaacactttgaaatcaccagaggccatctcaaaaagtcggaaagggggaaatcaagcacaacccaattccgaaagctgtcaaagaatgttactaagctcatctatattacaaaattcagatcatattgcgcttatgccattcggtagtgcaatagtcgaaaagtcaagcccagatgcagaagatgccgtcgaattcagagaaggtgacgactccaacgtaaatcacgaagacgtaccagcaaatgatcaacaatttcgagatgaagttgatatcaaaaacaaatactctatcattaaaagagaactagaacacgaaaagcttgtcggtggtggcgatttgccagtggacaaagaaatcttaaatcgtgccgcacaatccttagatagtgaccagataaaggaatttctgttgaagaatgacgtctctactatccttggcgtcattgatgaactgcatagccaagggtaccacttgcatcatattttcaaaaaacagggaaaccaaaaagagaccgcgttcagaacaaaggatgaacaacagtcctcccaatccaatgattcaagtgctaatgcgtcccctaccactgatccgatatccacaggctccaatacttctagaacgaacgataatgctcatattcctccgaccgatgcgcctggatttgataaatttatgaacaatgcagaggaaaatgccattgacgctgcttatgatgatgtgctagacaaaatccaggatgcgcggaacagtagtactaaataa

SEQ ID NO: 77340 - DNA, 660 bp, Saccharomyces pastorianus
atgaggttccagcttttcatatatttttatttcaccattgttgtgattgcaggaactaacacaatacaacagttcagcgatgcgggcgataggttaatcacatcattgagaaatctggacaacaatggaacatacgaaacattgacagcagagaaggtgcctattatcgagggacaaattcaaaacattagtgcaaaatatgagcagcatacttttattttgaagggcttagaagcggtgctaaattataaagtgaaaagtttggataataatgagagagagtcgctcgaaatagaatatgaaaaggtggaaaaggcactagatgcggctttgaatgtttcaccatttgaatatatcaaaaagtttaaagaagtctccagggacaaggtagttaatgctttagaaaacctcagtagagaacagaatcgaattactataaatggtggtagagaagacgaaaaagaaaaagaagcgagggaaaaaaagaaacgactagacagaataaagagaatcctaactgtaagtctgttagaattgggtctagctcaaggagtggccgatttatgtgcagtagcaccttttgcgtgtcttcttggggtgacagttggaagcatcggtttcatattttggttggcactaatatataatgctattcaataa

SEQ ID NO: 77341 - DNA, 753 bp, Saccharomyces pastorianus
atgcagcatattaaacatatgaggacagctgtccgtttggctagatacgctcttgaccacgatgagacaccggtagcttgcatctttgtacatacgccaactggccaggtgatggcttatggcatgaacgatacgaacaagtcattaactggagtagcacatgctgagttcatggggatcgatcagatcaaggcgatgttgggctcccgaggagttgttgacgtgttcaaagacattactctatatgttactgtagaaccgtgtataatgtgtgcatctgctctcaagcaattaggcattggaaaggtggtgttcggttgtggcaacgagagatttggaggcaacggtactgtcttgtcagtaaatcatgatacgtgtacattagtgcccaagaacaatagtgcggcagggtacgagagtataccggggatcttgaggaaagaagcaataatgctgctgagatacttttatgtaagacaaaatgaaagggcgccaaagccacggtccaagagtgacagagtgttggataaaaacacgtttccgcctatggaatggtcaaagtatcttaatgaagaagcattcattgagacttttggtgatgattacaggacttgttttgcgaataaagttgatttgtccagtaatagcgtcgattgggatttgattgactcccaccaagataatataatccaagaactggaagaacaatgcaaaatgtttaagtttaatgtacataagaaatctaaggtttga

SEQ ID NO: 77342 - DNA, 2313 bp, Saccharomyces pastorianus
atggccaaaaaaaatagattgaacacaactcaaagaaagactttacgtcaaaaggaagatgagtacatcgaaaacttgaaaaccaaaattgatgagtatgaccctaagataaccaaggccaagtttttcaaagatctccccattagcgatcccacattaaaaggtttaagagaatcatcctttataaaacttactgagatccaagccgattctatccccgtgtccctgcaaggtcatgatgtattggcggccgcaaagacaggttccggtaagacattagcatttttagttccagtaattgaaaagctataccgcgaaaaatggaccgaattcgatgggttaggtgcccttatcatatctccaacaagagagttggctatgcaaatatatgaggttttgacgaaaataggtagtcacacttcattttcagctgggttagttatcggtggtaaagatgttaaattcgaactagaaaggatatcaaggattaacattcttatcggtacacctggtcgtattttacaacatttagatcaagccgtaggtctaaatacttccaatttgcagatgcttgttcttgacgaagctgatagatgtttagacatggggtttaaaaaaactctggatgccatcgtaagcacattgtcaccatctagacaaacacttttattttcagcgactcaatcccaatctgttgcagacttggctaggctttccttgacagattataaaaccgttggtacacatgatgtgatggatgggtcggttaacaaagaagcatctactccagaaactttgcaacaattctacattgaagttcctttggcagataaattggatatccttttcagttttataaaatcacatttaaaatgcaaaatgatcgttttcttatcaagttccaaacaagtgcattttgtctatgagacatttaggaagatgcagcctggtatttctttaatgcatttacacggtagacagaaacaacgtgctaggacagaaactttggacaaatttaatcgtgctcaacaggtgtgtctttttgctaccgatgtcgttgctagaggtattgactttcctgcagtcgattgggttgttcaagttgattgtccagaggacgttgatacatatatccatagagtcggtagatgtgctcgttacggtaaaaagggtaaatctttaatcatgttgactccacaagagcaggaagcgttcctaaaaagacttaacgctaggaagatcgaaccaggcaaacttaatataaaacagtcaaaaaagaaatccattaaaccacaattgcagtcattattattcaaggatccagaactaaaatatctaggacaaaaggcatttatatcgtacgtgagatctatatatgtgcaaaaggacaaacaagttttcaaattcgatgagttaccaacagaagaattcgcttattctcttggtttaccaggggccccaaaaatcaaaatgaagggtatgaagaccattgagcaggccaaagaaagaaagaatgccccaagacagctagctttcttatcaaaagcaaatgaagatggtgaagtaattgaagataagtcgaaacaaccaagaacaaaatatgataaaatgtttgaacgtaaaaatcaaaccatcttaagtgaacactatttgaatataacgaaggctcaagcacaagaagacgaggatgacgatttcatttctgtcaagcgtaaagatcatgaaataaatgaagctgagttaccagctctaactcttccaacttcaaggcgagcacagaagaaagcgctttcaaagaaggcatctctggcctccaagggtaacgctagcaaattaatatttgatgatgaaggcgaagcccatccagtttatgaacttgaagatgaagaagaatttcataagagaggtgatgcggaggtacaaaagacagaatttttaactaaagaatctgcagtaatggcagacattgacaatattgataagcaggtggctaaagaaaaaaaacaagagaagaagagaaaaagactagaagccatgagaagggaaatggaggctgctatggaagaagaaatttctggagatgaagaagaagggaagacagtagcatatttaggaacaggaaacttgagcgatgatatgagcgacggtgatatgtctgactcggaaggccacttgaaaaagaaagctagaactgttgactattcccacggccacaatccatccaattcagttgatgatgacattattgaagtggaagaaccacaaactttggaggatttggaatctttgacagctaaattaatccagggttaa

SEQ ID NO: 77343 - DNA, 315 bp, Saccharomyces pastorianus
atgtttatatatgtatatcatcacttatgctgctccaggagatgtaggtatctattctttcttaacggatccgcatctattaattggaccaaatattgttccgagcttctttccgttagagcttccttttcttccagaatatcttctagaactaataaaattttcaagcaccaaatattttgcttcccggaaaattcaatttcgtcattatttattaacagaatgttttctctcaagtctttcaacattttaaggtactcttgttcgtccagagttttacaaacaatgtcgtttttaatgaaccacttgatataa

SEQ ID NO: 77344 - DNA, 873 bp, Saccharomyces pastorianus
atgagagatgaaaaaatttactcaattgaagctctgaagaaaacatcagaacttcttgagaaaaatccggaatttaatgctatttggaattacagaagggatattatagcgagtttggcttctgagttggaaatacctttctgggataaagagttagtttttgtaatgatgctattgaaggattaccccaaagtctattggatatggaatcacagactttgggtcttgaaacattatcctacgagttcccctaaagtgtggcaaactgaacttgctgtcgtgaataagttattggaacaagatgcaagaaattaccacggatggcattaccgcagaatagttgttggtaacatagagagtatcactaataaaagtcttgacaagggggagtttgaatacacaacaataaagattaacaataacatttcaaattattctgcatggcaccaaagagtacagatcataagcagaatgtttcagaaaggagaggttgggaatcaaaaggagtatattcggactgaaatatcttatatcatcaacgctatgtttaccgacgccgaagaccaatccgtatggttttatatcaagtggttcattaaaaacgacattgtttgtaaaactctggacgaacaagagtaccttaaaatgttgaaagacttgagagaaaacattctgttaataaataatgacgaaattgaattttccgggaagcaaaatatttggtgcttgaaaattttattagttctagaagatattctggaagaaaaggaagctctaacggaaagaagctcggaacaatatttggtccaattaatagatgcggatccgttaagaaagaatagatacctacatctcctggagcagcataagtga

SEQ ID NO: 77345 - DNA, 591 bp, Saccharomyces pastorianus
atgtcacaatcaatatcactaaagggttcaacaaggacagttacagaatttttcgagtacagcattaattccattttgtaccaaagaggcgtatacccagcagaagatttcgtaacggtgaaaaagtacgatcttacgttactaaagacacatgatgatgaactgaaagattacattcggaaaattcttctacaagttcacaggtggcttcttggtggaaaatgcaatcaattagtattatgtattgtagacaaggatgagggagaggtggtggaaagatggtccttcaatgtgcaacacatttctggcaatagcaacgggcaggatgatgttgtagatttaaatacaacacaatcacaaatcagagctttaatcaggcaaatcacctcaagcgttacctttctgcccgaactaacaaaagaaggtgggtacacattcacagtacttgcatatacagacgcggatgctaaagttccgttagaatgggccgactccaatagtaaagagatacctgatggtgaagtagttcaattcaaaacattttctaccaacgatcataaagttggtgcgcaggtcagctataaatattaa

SEQ ID NO: 77346 - DNA, 2469 bp, Saccharomyces pastorianus
atgctggaaggtacggtagattatgacccgctggaagatattaccaatatacttttttcaaaagaatccctgaacaacatagatgaactgatcagtattaccagaagctacaaaaagcaattgcaagagaatattctcaaagaagagaatgaattgaaggaacaccctaaaaattccgctgaaatagaggcttctctgaggaaagttttccaagatttcaaagaaactcaagatgtctcagcctccaccgagttgacgatatcgaatctgacagaaggtatctcgtacctggacattgccaagaaaaacctcacccactctttgactcttttccaaaatttaaagatattgacagacagttacatacaatgcaatgaattactctcacagggctcattcaaaaaaatggtgtccccttataagataatgtgttcgcttgctgaaaacacattcatctcttacaaatcattggacgagataaactatttgttgagctccatttcaagactgaaaggagacactttgtccaaaattaaacaaaactacaatgcgctcttttccggcggcaatatctcagagcatgatacagcactcactatggaattgcgcgaaggtgcctgcgagctactcgactgcgatacaagtacgagagcccagatgatagattggtgtttggacaaacttctcttcgaaatgaaagagatatttagggtcgacgatgaagccggatccctagaaaatttatcgagaagatacatttacttcaaaaaaattcttaataacttcaattcaaagttcgcagactatttcttaaaagactgggaaatggcagtcagattgaccaccactttttatcacattacacacaaggaccttcagacacttctgaaaagggaattcaaagacaagaacccttccattgatctattcatgacagcattacaatcgacgctagatttcgaaaaatacatcgacgtacgattttcaaaaaaaattaaggaaccaaaactaagttcctgcttcgaaccttatttgactttatgggtgtctcaccaaaaccaaatgatggaaaaaaaatttctttcttatatgagtgagccgaagtacccatctaatgaaacggaatctctcgtgttaccctcgagtgcagaccttttcaggacatatcgttccgtactgactcagaccttagagctcattgataataatgccaatgatagcatattgacttcattggcaaattttttcagtagatggcttcaaacttactcacaaaaaattcttcttcctttactgctgcccgacaatattgaagtccaggataagctagaagctgccaagtataccgttttattgatcaatactgcagattattgtgccacgactatagatcaattggaggataaattatctgaattcagcggtaatcgtgaaaagctggcaaacagttttacgaaaacgaaaaatatatacgacgatttactagcaaaaggaacttcttttctattaaaccgtgtcatacccttagatctaaattttgtatggagagagtttatcaacaatgattggtcaaatgctgcgatagaagattatagcaggtacatggtaaccctcaaatccgtacttaaaatgcccgcattaacagatgcctctattaaacaacagcaagagcaaccttcgactttggcatttattttgtcgcaattcaatagagatgtttataagtggaatttcttggataaggtgattgatatcatcactacaaattttgtaagcaataccatccgccttctgcagcccgttccacccttttccctggcgggcagcaaaaggaaatttgaaacgagaactgttgtaaacattggcgagcagcttctccttgatttagaattgctgaaggagatttttcacactttaccagaaagtgtaagtaaccattctgacttgcgagaaaatacctcttataagagggtgaaaagacatgcagacaataatatagaccagctgctaaagtttattaaacttctagtggcgcctctggattccgctgatgactattacgagacctactccaaattgaccaataataaccctgattcagcggtatggtcttttgtcctcgctttaaagggcattccatgggacctggcattatggaaaaagctatggagtgcctacaacttagaaacagacgacactgacgagggcagcaggccagacagtaatcgcgatcttttcatattcaagtgggacaaggtacttttgggtcaatttgaaaacaacttggcaaggatgcaagatccgaattggtcaaaatttgtgaggcaagatctgaaaatatcaccacctgttatgaagaggatagtatccacccctcaaatacaacaacaaaaagaagaacaaaaaaagcaaagtttgagtgtcaaagacttcgtttctcactcaaggttctttaacagaggcacttga

SEQ ID NO: 77347 - DNA, 417 bp, Saccharomyces pastorianus
atgatggtaacgcgcaaacactaccgctatatatacctacaaaactctcattctctcatttcctgcttcgttcatttcgagtttccaagggtatggtacggtgctatctgcccgtgcttcccctcctttgctttgctaagaaaaattttcttttgtcagcagcaacaacacgctacgctctgcgctgtgctacgaagtggtctctgtggcaacggggacattgtacccatgcccgctcgcagggaggtctgggtgtggggcgtgtgcgacctcgttgccatggcgatcgcgcgtgggtgtggtctttccccaaacggttgcccgttgctccggatttcgcatagttgtcgcgtaaacaaaaaacacgagagagggcggacggcgctgaatagtggaagatcgcgcgatgtcaagtaa

SEQ ID NO: 77348 - DNA, 1200 bp, Saccharomyces pastorianus
atgcctaaagagaccccttccaaagctgctgccgatgcattgtccggcttggaaatcaaagattccaagtccaaccttaacaaggaattggagacattgagagaggaaaacagagtaaagtcagacatgcttaaggagaaattgagcaaggacgctgaaaatcacaaggcttacttgaaatctcatcaagttcaccgtcacaaacttaaggaaatggaaaaggaggaacctttgttgaatgaagacaaggagagaactgttcttttccctatcaagtaccatgaaatctggcaagcctacaagcgtgccgaagcttctttctggaccgctgaagaaattgatttgtctaaggatatccatgactggaacaacagaatgaacgagaacgagagatttttcatttccagagttcttgcctttttcgccgcttctgacggtatagttaatgaaaacttggttgaaaacttctccaccgaagtccaaattccagaggcaaagagtttctacggtttccaaatcatgattgaaaatattcactctgaaacttactccttgttgatcgatacctacatcaaggaccctaaagaaagtgaattcttgttcaatgccattcacaccatcccagaaatcggtgagaaggccgaatgggctttaagatggattcaagacgctgacgccttgtttggtgaaagactagttgcctttgcctccattgaaggtgtctttttctccggttcctttgcctccattttctggttgaaaaagagaggtatgatgcccggtttaaccttttccaacgaattgatctgtagagacgaaggtttgcacaccgactttgcatgcttgttgttcgcccatttgaagaacaaaccagacccagccattgttgaaaaaattgtcaccgaggctgtggaaattgaacaaagatacttcttggacgccttaccagttgctttgctaggtatgaacgctgacttaatgaaccaatacgttgagttcgtcgccgacagactgttggttgctttcggtaacaagaaatactacaaggtcgaaaaccccttcgatttcatggaaaacatctccttggccggtaagactaacttcttcgaaaagagagtttctgactaccaaaaggctggtgttatgtccaagtcgactaaccaagaagccggtgctttcaccttcaacgaagacttttaa

SEQ ID NO: 77349 - DNA, 222 bp, Saccharomyces pastorianus
atggctgggtctggtttgttcttcaaatgggcgaacaacaagcatgcaaagtcggtgtgcaaaccttcgtctctacagatcaattcgttggaaaaggttaaaccgggcatcatacctctctttttcaaccagaaaatggaggcaaaggaaccggagaaaaagacaccttcaatggaggcaaaggcaactagtctttcaccaaacaaggcgtcagcgtcttga

SEQ ID NO: 77350 - DNA, 1044 bp, Saccharomyces pastorianus
atgaagatattctccacactcttatcgcaaaaacctaaaggcaaactggtaattcgaccatcaaccactatacatagtagtgatcccttttcaaaatttatagtgacgaagaataccgagcctctttctcttggtgaccttcgaaaaagcgattcaggaaattcagctgtgtgcttaaatgctgaaaatactatattaagtacgctaactgatttacaaaaagaagaagaaagaaactgggatccagtgaaatatgttgctggtaaacttcgaggtgtaatttcacccatccaagcctatgtgacgattggaaaaaaaatttcccctaactcattggtatacactagtagattctttcaacttcattacttccctgaagaccattttatgtcttgttttagaaaaagtaaaccagcaataacggtaaaatccaataagaagttttatttaaatgggaaggttttcaacaaggacaaagaatatttcaatgaaactaggatatcaaaagctaatgaagtcgaactaagcaaaattcaaacagcgatgacacggcttacaaatagacatagaaacagtattccctctgaatttgcgtacttgagacgagatttaaaattaaaggtgaaaacaacgtttatcaaggagtggtgtaaactaaatggtgataaggccattcgagagtacgttaatcttaacagatctccaaatattaatcctgctagcatgaagggcaagccaaagaaaagttttttagataaccttggtagaagtactgtgggaaccgcaaaggacggctattatttatacattgttagcatatttcctgataaagatatgttaggagaatttaatgacgaggtcaatagaagcgttcaaaaggttgccaatttggattgggatgggttcttgaccccaaaaaaaggcgcgaaaggcaaaaattgggtagaatcgttcaatgacagtataaacgttcaaacaattaacaagatactcgagatcaacaagtttccatttgaattaagaagagaacaaacagaaggctga

SEQ ID NO: 77351 - DNA, 309 bp, Saccharomyces pastorianus
atgggtgaaattacacctcgaagtttaccagcaacatatttcactggatcccagtttctttcttcttctttttgtaaatcagttagcgtacttaatatagtattttcagcatttaagcacacagctgaatttcctgaatcgctttttcgaaggtcaccaagagaaagaggctcggtattcttcgtcactataaattttgaaaagggatcactactatgtatagtggttgatggtcgaattaccagtttgcctttaggtttttgcgataagagtgtggagaatatcttcatgatttggtttttctattaa

SEQ ID NO: 77352 - DNA, 258 bp, Saccharomyces pastorianus
atggcacgaggtagttcttggagctgttcaggttcctcctcctccttctccttatgctgtttctttttcggctcttctgatggtttatttccaactccagaagccataccgaaggggttaaaaccaacaggagcaccgaatctactagcgccagatagtttagccattctttctctcaatgcggccctacgattctcttcactatcttcctcttctttttcctcatcattatctccctctctgtcttcatggccgtaa

SEQ ID NO: 77353 - DNA, 2043 bp, Saccharomyces pastorianus
atgaataactcaaatgagcataggcgggaagaggcaggagcggctaatgaacaaatgccttacaataaggctgtaaagtccgcgtacgcagatgtcctcaaggacaaaatgaatagggaacaggagattagcctacgagccatcaaaaaagggatatacaccgatggcggtgaaactgacaactatgatatggataaagagaatgattccgcgtacgaaatgttcaaaaaaaatcttgattttccgttagaccaacataatgatgacgacgatgatgatccgtacattgaggataatggacaagagaccgacggatatagcgacgaggactatacagatgaggcagacaagagttttatagaagacagcgattccgacagctacgatttggaaagtaattctgactttgaagagaacttggaaagttcaggtgaagctaagaagttgaagtggcggacgtacattttctatggaggccttttcttcgttttttatttttttggatcctttttgatgacaaccgtgaaaaataatgatttagaaagccattcatccggcgctacatcctctccaggcaaatcattcagcaacctacaagaacaggtgaatcatttatatagtgagttgagtaagcgggacgaaaagcacagttcagaattggataaaacagtaaaaatcattgtctctcaatttgaaaagaatattaaaagacttttaccctcaaatttggttaattttgaaaatgacattaactcgctgacaaaacaggttgagacaatttcaacttccatgagtgagttacagaggcgaaatcacaaatttacggtcgagaatgttactcaatggcaagatcaactggtaaaacagttggatacacacctccctcaagaaatacccgttgtaattaataattcttcgtcgcttttaataatccctgaattgcacaattatctgagtgctttgatttcagacgttattgagtctccaggcattggtactgctggaagcgctgaaagtcgttgggagtatgatttgaatcgctatgtaaaggaaattctttcgaatgagttacaatatattgataaggattatttcatccaagaaatgaacagaaggttgcaatctaacaaacaggagatttgggaagagatcacaaataggttagagacacagcagcagcagcagcaggttcaacaggattattctaacgtgccacagcagtattcgagcatattaatgaaaagattaattcaccaaatttacaattccaatcaacaccaatgggaggacgatttagattttgctacttatgttcaaggtactaaactattgaaccatttaacttcaccaacctggagacagggcagtggggtacagccgatagaattactgaccgactccaaacaaagctcctcaacttactggcaatgtgagaacgaacctgggtgttcatgggccataaggtttaaaactcctttgtatctaaccaaaatttcgtacatgcatggccgttttactaataacctacatataatgaactcagcaccaagactgatctcattatatgtaaaactgtcacagactaaagagatcaaagcattgcagacattggcaaatcaatacggtttcgggcagcatcacaagagagaccgaaatttcatcaagatcgcaaaatttgagtacaggttgacagattctagaatacgccaacaaatgtatctggccccatggttcattcagttaaaaccactcgtacgctcaattgtctttcaagtggacgagaactacgggaacaaaaagttcatatctctgaggaaatttatcatcaacggagtgacaccgcaggatttgcaaataattgaaaataacgagttccctgttttactgggtgacaccccagaatatggtgtcacccagaacaccgacgaaggcaagaggaaagttctcctatcaaagcctccttacgcgtcttcatctactagtaccaagtttcatcccgcttctaacgtcccatcatttggccaagatgagctagatcaataa

SEQ ID NO: 77354 - DNA, 486 bp, Saccharomyces pastorianus
atgaaagttcttgaggaaaggaatgcatttttaagtgactatgaagtcttgaagttcctaacagatctagaaaaaaaacatctttgggaccaaaaaagtttggctgcgctgaagaaaagtcgctcgaaaggtaagcagaataggccctacaatcatcctgaattgcaaggtattactcgcaatgtggttaactatctcagtataaacaaaaactttatcaaccaggaagatgaaggcgaggaacgagaaagcagtggtgcaaaagatgctgaaaaatcgggtataagcaaaatgagcgatgaaagctttgctgagttgatgactaaactgaattcttttaaattattcaaggctgaaaaactgcagattgtcaatcaacttcctgccaatatggtccacctttactccatagtggaggagtgtgatgcaagatttgacgaaaaaacaattgaggaaatgctagagatcatctctggctacgcatga

SEQ ID NO: 77355 - DNA, 2001 bp, Saccharomyces pastorianus
atgggaaagactaaaacaagaggcagaagacaccaagacaaacagagaaaggacgaatttgaacccagttcaaattctgcgaaggagcacatccagcaagaagagtctacttacaatgacgaagccgaaattaaagagactcagccacaaatgttttttggtgtgctagatagagaagaactggagtatttcaagcaagccgaatcgactttgcaattagacgccttcgaagcacctgaggaaaagtttcaattcgtcacgagcattattgaggaagcaaaaggtaaagaactgaaattggttacttcccaaataacttcgaaattgatggaacgagttattcttgaatgtgatgagactcagttaaaagacattttccaatctttcaatggcgttttcttcgggttgtcatgtcataaatatgcttcccatgttttagagactttatttgttagaagtgccgccttggtagaaagagaacttttaacaccaagttttgataacaatgaaaaagaagggccttatgtgactatggaaaatatgtttctctttatgttgaatgaactgaaaccgcacttgaaaactatgatgaaccatcagtatgcatcacatgttttgagattgctaatattaattttgtcttccaagacattgcctaattcaactaaagcgaactctactttacgttccaaaaagtcaaaaattgcaagaaaaatgattgacattaaagataatgacgatttcaataaagtttaccaaacaccggaatctttcaaatctgaacttcgtgacataataactactttatacaaaggatttactaatggtgccgagtcgcgttctgatatttcgcaatctactatcaccaaatttagagagtacagtgtggataaagtggcttcccctgtaattcagctcattattcaagtcgaaggtatttttgacagggaccgttcattttggagattggtcttcaatacagcagatgagaaggatcctaaggaggaatcattcctggaatatttactgtcagatcctgtcggttctcatttcttagaaaatgtgattggctctgccaggctaaaatatgttgaaagactttatcgtttatatatgaaagaccgtattgtgaaactagcaaaaagggatactacaggtgcctttgtagtgcgtgcattgctggaacatttgaaggagaaggacgtaaaacagatattggatgcagtagttcctgaattaagcatgcttttaaactcaaatatggattttggtactgctattatcaacgcaagcaataaacaaggtggttacttaagggatgatgtcattgctcaattaatacaaaaatattatccagaaaagtctgatgcaaagaatattttggaaagttgcctgttgttgagtgcatcgactttgggcaataccagagatgactggccaacagcagaagaaagaagacgatcagttttcttggaacaattaattgactacgacgacaagtttttgaatattaccattgacagcatgttggctctgcctgaggaaaggttgatacaaatgtgttaccatggagtattttcgcatgttgttgagcacgtactacaaactactagggtggacataattaagagaaaaatgctattgaacatactgtctaaagagtctgtaaatttggcatgcaatgtgtatggctctcatataatggacaaattgtgggaatttacggcaaaattaacattatataaggagcgtattgctagagcattagttttagaaactgagaaggtgaagaatagtatttatggcaggcaagtgtggaagaattggaaactggaattatatgttagaaaaatgtgggattggaaaaaactaattaaggagcaagaatttgaaatatttccaaattctaaaccgctacagccaaagccagaaaagcactcaagagaaagaaataattcgaaggaaggaagcgccttcaaaaagcaaaagcactatagataa

SEQ ID NO: 77356 - DNA, 285 bp, Saccharomyces pastorianus
atgtctgagatattacaagatgtacaaaggaaactggtttttccaatagattttcccagccaacggaaaacagaaaaatttcaacagctatcgctcatgatcggagctttggtagcgtgtatattgggatttgcacaacagtccctgaaagttttactgactgcgtatggcattagttgtgtgattactttaatatgtgttttgccagcttacccatggtataataaacaaaaattgaggtgggcacagccaaaaattgaaattaatgtcgaccagtatgactag

SEQ ID NO: 77357 - DNA, 786 bp, Saccharomyces pastorianus
atgagtgaaacacgagaatctaatgaaagtacagtttcgtctttacaaaccaaacttttgctcaatgacggaatatccgaaaacaacaagaaaaatgttatactgctgaatcaaatagtgccgtttattctgaatacttcacattatatgacggatctaatgtatgtcttgtattatctggctcaaaagcaggaagacgaagtattaaaccattctggcacatttatttcacacaaaaaagaactccttgcactaaagagtgatatttgtgaactaatttacgatttaaggacaggattccgcttattattggatagttgtgagttagatcactttgaaactcctggaaaatgccggcatttgatcgagaaggttctagtcacctccatttatggagtgaacaggtatattttccaggaattaaacagattaaatgtcgattttaaggatgaatttatattacaaatgcaaaattgtttatcaggattcgttaatctctacaaatttttgaacaagatccctatgagtaaacaacagtcacagatgaacgatttacagatgaagatcttagttaatgtgttacagaatgaattgttacccatttggaagtttcagttagatcttttgaattgtaaactatttaacgagctctctaaggataagggcctgattaatatatatagaaaagctacgaacgatagtgttattgatgttagcaagggtgaaccattcatcagatatgttaattggctaaaggaccaaattattggtgaaatgacggtttaa

SEQ ID NO: 77358 - DNA, 624 bp, Saccharomyces pastorianus
atgacagtacagtcaagccccattcttcgccagtcatctttcaactttatcaccttttaccttgcttgtcagttgttgacttttttatgtatatatattgtgtttttttttgtcaagttcttaccaactattaaagtttcttttattattatcggagcctgtaaaagagctccacatgtttcggtttacctcttgaaaattgattgcgaacataacgagtcaagcatggcagcaggtggtgaacttagttatgaagagttgctggatcacattctgaataacaagcctatacctaatattgtggaggtgcccaatgttacgctggatgagggtttagctagtactccttcattgaggccaagacctaggccctgggaaggtcagctgcagcatcaatctcgtcaaggatcattagacaaacccaatatatctctggacattgatcaagaaagcctagaaggcatgacctcattaacaaggctgtctgaatgttacgatatacagtctaagttacagattaatgacagtgacaacgataatgatgacaataacaatgataacaataaaggcgatggaaatgatgacgacaataatacagtaacagcaaatccaacggctaggtaa

SEQ ID NO: 77359 - DNA, 597 bp, Saccharomyces pastorianus
atgttaagagaagtcatctattgtggaatttgctcctacccaccagagtactgcgagttttcaggaaaattaaagcgttgtaaagtttggttatctgaaaaccacgcagacctttatgcaaagctatacggtactgacgataatacgcaagaggtggaagccgtgaccaacaaactggctgaatccagtattggcgaagctagagaggaaaagttggaaaaggacttgctgaaaattcaaaaaaaacaggaaaacagggaacaaagagaattagctaagaagctgtcatcgaaagtgatcattaaaagagaagctaggaccaagagaaagtttatcgtcgctatctctgggctggaagttttcgacatcgacatgaaaaagctagccaagacatttgcgtctaggttcgccacagggtgctcagtctcgaaaaatgcagagaaaaaagaagaagttgtcattcaaggtgacgtgatggatgaagtggaaacttacatacattccttgctggaagaaaaaggcctaaaggacgtcaaagtggaaaccatcgatgctaagaagaagaaaaagcctgctgcagaaggagctgccaagtaa

SEQ ID NO: 77360 - DNA, 573 bp, Saccharomyces pastorianus
atgatcattgtggtacttattcccacgcataaccgactacggcaccacaacgacgcaccaatgccatctgacgtagcatcgagcaccgggctgccaaccccgtggaccgtcaggtatagtaagtccaagaaaagagagtattttttcaatccagagacgaagcactcgcaatgggaggagcctgagggcaccaacaaggaccagctacacaagcacttaagagaccatccagtgcgtgtaagatgcctgcacattctcatcaagcacaaggattcaagaagacccgcatcgcatagatccgagaacattacgatatccaagcaagacgctacggacgaactgaaaaccttaatcacgaggttggatgacgactctaagacgaactccttcgaggccctggctaaagagagatcagattgctcttcatacaagcgaggtggcgacctcggctggttcgggagaggcgagatgcagcctagctttgaagacgctgccttccagctcaaggtcggcgaggtaagcgatatcgttgaatcaggaagcggtgttcatgtgatcaagcgggtaggttag

SEQ ID NO: 77361 - DNA, 363 bp, Saccharomyces pastorianus
atgttctcggatctatgcgatgcgggtcttcttgaatccttgtgcttgatgagaatgtgcaggcatcttacacgcactggatggtctcttaagtgcttgtgtagctggtccttgttggtgccctcaggctcctcccattgcgagtgcttcgtctctggattgaaaaaatactctcttttcttggacttactatacctgacggtccacggggttggcagcccggtgctcgatgctacgtcagatggcattggtgcgtcgttgtggtgccgtagtcggttatgcgtgggaataagtaccacaatgatcattcaggtcctttttttacttagatcgaagggaaaaaggtatgatacccgctcgtga

SEQ ID NO: 77362 - DNA, 1050 bp, Saccharomyces pastorianus
atgagtgcttccaaaatggccatgtccaacctagagaaaatattggaactggttcctctttcgcctaccagttttgtcacaaagtatctgcctgccgcgcccgtagggtctaagggcacttttggtggaacgctggtatcacaatcgctgctggcgtcattgcatactgtgccattgaacttcttccccacatcgctacattcgtatttcatcaagggtggtgatccgcggaccaagatcacgtaccatgtgcagaatctgagaaacggtagaaatttcatccataagcaggttagtgcttatcagcacgacaagttgatatttacgtcgatgatcttatttgccgtgcaacggtccaaggagcacgactccttgcagcactgggagacgattccaggcctgcaaggtaagcagccagaccctcatcgttatgaagaggccacttcgcttttccagaaagaagttctggacccacagaaattgagcaggtatgcctcattgtccgacaggttccaagacgcaacctcgatgagcaagtatgtggatgcgtttcaatacggagtcatggagtaccaattccccaaggacatgttctactcggcaagacacaccgacgagctggattatttcgtcaaagtgagacctcccatcactaccgtagagcacgcgggcgacgagtcttctttacacaaacatcatccgtacaggatcccgaagagcattactcctgagaacgacgctcgctacaactacgtggcctttgcgtatctgtccgattcctacctcctactcacgatcccgtacttccacaacctgcctttgtactgccacagtttcagtgtctcgctcgaccacacgatttactttcaccagttgcctcatgtgaacaattggatctatcttaagatttcgaatcccaggtcccactgggacaagcacctcgtacagggcaagtatttcgacacacagtcgggacgcatcatggcaagcgtctctcaggagggctacgttgtctacgggtcagaacgagacattcgagccaagttctga

SEQ ID NO: 77363 - DNA, 333 bp, Saccharomyces pastorianus
atgaaatttctaccgtttctcagattctgcacatggtacgtgatcttggtccgcggatcaccacccttgatgaaatacgaatgtagcgatgtggggaagaagttcaatggcacagtatgcaatgacgccagcagcgattgtgataccagcgttccaccaaaagtgcccttagaccctacgggcgcggcaggcagatactttgtgacaaaactggtaggcgaaagaggaaccagttccaatattttctctaggttggacatggccattttggaagcactcatttttatgcaatcttgtcttatcttgtcttgctcatggtggatactgaattga

SEQ ID NO: 77364 - DNA, 327 bp, Saccharomyces pastorianus
atggtagctagttgtaaagatcagaagaaggctgtcgctatatgtttgcagagatcgccctgtgtcatgatagagagacataaccctcaagaatgtcttgacaatccagagctgaataaggatctgcccgaactttgtattgctcagatgaaagcatttttggattgtaagcgaggaatcgtcgacatgactaagcggttcacaggtaacgcacctctgtcgactggcaagtacgatcaacagtacgaaaacttgtgcaaaggaaagtttgatccgagggaggagatggaaaagctaaaacttctgaacagccagcagaaggactga

SEQ ID NO: 77365 - DNA, 423 bp, Saccharomyces pastorianus
atgatggaattcaaagtgtcaccattgacaaagattatttctctgtcaggattcctcgcattgggattccttttggtcatactaagctgcgcattattccataattactacccactattcgatattttgatctttttgcttgccccaataccaaacacaattttcaatgcaggaaataaatatcacacatctgacttcatgtccgattcatcaaacactggccaagatctggctcacttccttacaggaatgctggtgacaagcggtatagcactccctgttgttttctatcattgccaattgattggccatttgagttgtatcatgtgcatgatcggtggtcttatcatatattctagtattgttatttttaaatggtttttcaaaaaagatttcaacgaagatgattccctttttggttaa

SEQ ID NO: 77366 - DNA, 1815 bp, Saccharomyces pastorianus
atgagtggcacagctaatagtaggaggaaggaggttttgcgcgtgcctgtgatagatttgaatagagtttcagatgaagagcagctgttgccggtggtgagggcaattttgctacagcatgacacctttctgttaaaaaattatgctaacaaggctgttctagatgcactactagcggggctcacgacaaaggatctgcctgacacgagtcaaggttttgatgcgaactttacgggcacattaccgctagaagatgatgtttggctggagcagtacatatttgacactgatcctcaattacgcttcgatcggaagtgcaggaatgagtcactgtgctccatatatagtaggctgttcaaactgggtctgtttttcgcccaactgtgtgtgaaaagtgtggtttctagcgcagaattgcaagactgtatcagcagctttcattatgcgaccaagctaacccgttatttcaatgataatggtagtacacacgatggtgcagatgcaggtgctaccgtgctgcccactggcgacgatttccagtacctgtttgaaagggactacgttacttttcttccgacgggcgtgttgaccatcttcccctgtgccaaggctataaggtacaagccatcgactatggcgacgacggacaattcttgggtgagtattgatgaacccgattgtcttctgttccacacggggaccctccttgcgcgctggtctcaaggtatgcacactacctcaccactccagatagatcctcgtgcgaacattgtttcgttgaccatctggcctccacttaccacgccaatctcgagtaaaggagagggtacgattgccaatcatttgttggagcaacaaattaaggctttcccaaaagtcgctcagcaatactacccacgggagcttagtattctaagactccaagacgcaatgaagtttgttaaggagttgtttactgtttgcgagactgtattgtctttaaacgctctttccagatccacgggcgtcccaccagagctgcacgttttgttaccccagatatccagcatgatgaaaaggaaaatagtgcaggatgatattttgaagttattgactatttggtctgatgcatacgtagtggaactgaactctagaggggagctgaccatgaatctacccaaaagagacaatctaacaacgttgaccaataagtctaggactttggcattcgtggaaagggcagagtcgtggtaccaacaagtgatagcttccaaggatgagattatgactgatgtacccgctttcaaaataaataaaagaaggtccagctctaattctaaaacagtcttgagcagtaaagtgcaaacgaagagctctaatgctaatgccttgaataactcaagatatttggcgaatagtaaggaaaatttcatgtacaaagagaagatgcctgattcgcaagcaaaccttatggacagactgcgtgaaagagagagacgttcggccgcattgctttctcaaaggcaaaaacgttaccagcagtttctagcgatgaaaatgactcaggtatttgatattcttttttcgctgaccaggggccagccttatacagagacatatctaagctcgctaatcgtagatagtttacaagatagtaataatcctatcggtacaaaagaagcaagtgaaattttagctgggctacaaggtatcctaccaatggacatatctgttcatcaagtggatggtgggttaaaagtttatagatggaacagtttggataagaacagattttctaagctgttgcaaatccacaaatcaaaaccacaagattga

SEQ ID NO: 77367 - DNA, 708 bp, Saccharomyces pastorianus
atgagtagaaatgtagataaggccaactcagttctggtacgatttcaagagcagcaagcagagtcggcaggtggatacaaggattattcacgttaccagaggcccaggaacgtgtctaaggtaaaatccataaaagaggccaacgaatggaagcgacaagtaagtaaagagataaaacaaaaaagcacaagaatatatgatccgtctttaaatgaaatgcagattgcggaacttaacgacgaacttaataatcttttcaaagaatggaagagatggcagtggcacattgaccatacacttatggaaaaaaaaaccaagaggaaaaggttagaagacagtcatgtgctgatgaattcaggaaagctgataaatggtaagagatattttggaagagccctggaattgcctgaagtaaaagaatggctcaagcagtctcaaaggcagaatgatgggggttctataaacaccaaatgcataccgaaggatagtaatgatttttattaccatggcaaagtcacagccgccttaaccgaatttgaggctaactggacatccattttgaaagcacattataatgtgcctgtgaatgaagatgaagatgaaatgtcaaaacagacacaagaaatccatgtaccaactctggcagatatggagcattggttagtacaaagaagaaagaagaaactgatggatgaacttaacctttag

SEQ ID NO: 77368 - DNA, 1506 bp, Saccharomyces pastorianus
atgattagatctgtgagaagggttttcatttacgtctcaatattcgtattgataatagttttgaaaagaacattaagtggcacagatcaaacgtcaatgaaacaaccagtggtggtcattggctctggtttggcaggcttaaccacaagtaatcgtctcattagtaaatacagaattcctgttgtgcttttggataaggcggcttctattggtgggaattctataaaggcttctagtggtattaatggtgctcacacagacactcaacaaaatttaaaggtaatggacactcccgaattgtttttgaaagatactttgcattcggctaaaggcagaggggttccatcactgatggataagttgactaaggaatccaagagtgctatcaggtggttgcaaacagaattcgatttgaaattagacctccttgcgcaattgggcggtcactctgttccaaggacccatagatcttctggcaaattaccaccaggttttgaaatcgtgcaagcgttatcaaaaaaactaaaggatatctcttccaaagattccaatctcgtgcagattatgctaaacagtgaagtagtggatatcgagcttgataatcaaggtcatgttactggtgtagtatatatggacgagaacggaaaccgtaaaatcatgaaatcacaccatgtcgtgttttgctcaggtggatttggttactctaaggaaatgttgaaagagtactcaccaaatttgattcacttgccaactactaatggcaaacagactacaggtgatggtcaaaaaatcctttcaaagttgggtgccgaattgattgatatggatcaagtgcaggtacaccctaccggcttcattgatccaaatgaccgtgaaaataactggaagtttttggctgcagaggcattgaggggtttaggcggcatcttattgcatcccaccactggaagaagatttacaaatgaattgagcaccagagatacagtaaccatggaaatacagtctaaatgtccgaaaaatgataatagagcacttttggtaatgagcgacaaagtctacgagaactatacgaataacataaacttttatatgtccaaaaacttaatcaaaaaagcgtcaatcaacgatctgatccgacaatatgacctacaaactacagcttctgaactggtgactgaactgaagagttattccgatgttaatactaaggatacgtttgataggccattgattatcaatgcctttgataaagatatttcgactgaatcaactgtttatgttggggaagttacaccagttgttcatttcacaatgggtggtgtgaaaattaatgagaaatctcaggtaattaagaaaaattcggaaagcgttctatctaatgggatatttgctgctggtgaagtttcgggtggtgttcatggagccaacagattgggtggatctagtttgttagagtgtgttgtctttggaaagacagctgcggataacatagcaaaattgtactga

SEQ ID NO: 77369 - DNA, 444 bp, Saccharomyces pastorianus
atggcagtacagtttatactgtgctttaataagcagggtgtggtgcggttggtgagatggttcgatgtacacagttcggatcctcagcgtagccaggatgccattgcgcagatttatagactcatatcttccagagaccataagcatcagagtaacttcgtagagttttccgattcgacgaaactcatatacaggaggtatgcgggtctgtattttgtcatgggtgtggacttacttaacgatgaacccatatatttgtgccacatccatctgtttgtggaggtgctagatgcatttttcggcaatgtctgtgaactggatatcgtattcaacttttacaaagtctatatgataatggacgagatgtttattggaggggaaatacaagaaatttcaaaggatatgctgttagaaagactaagtattttagatagactagactag

SEQ ID NO: 77370 - DNA, 1056 bp, Saccharomyces pastorianus
atgaactctctggcaaataataataagctttctactgaggatgaggaaatccattcggcaagaaaaagaggctataacgaggagcagaactacagcgaggccaggaaaaagcaaagagatcaaggcttgttgtcacaagagagcaatgacggaaatattgactctgctctgttgagcgaaggggctacgctaaaagggactcaaagtcagtatgaaagcggactgacgtctaacaaagatgagaaaggaagggatgacgaagatgcgtcagtggctgaggctgctgttgccgctaccgtcaattatacagacttaatccagggccaggaagatagttctgatgcccacacatctaatcaaacgaacgcgaatggtgagcacaaggattcccttaatggggaaagagccataaccccatcaaatgaaggagtcaagccaaacacctccctggagggaatgacgtcttcaccaatggaatctacacagcaatctaaaaacgacatgctcataccattggcagaacacgatcgtgggccagaacaccaacaggatgatgaagacaatgatgacgctgacattgatctcaaaaaggatataagcatgcagccgggtcgtcgtggaagaaaacctactactttggccacaacagacgagtggaaaaagcaaagaaaagactcccataaagaagtcgaaaggcgtcgccgcgaaaacatcaacactgcaatcaacgttttaagcgacctcctgcccgtgagagaatcaagtaaggcagcaatattggcgcgtgccgctgaatacattcaaaaattgaaagaaaccgatgaagcaaacatcgaaaagtggacgttacaaaaattgcttagcgagcaaaacgcatcgcaattagccagtgcaaatgagaaactgcaggaagaactgggaaatgcttacaaagaaatcgagtacatgaaacgcgttttaaggaaggagggaatagaatacgaggatatgcacactcacaagaaacaagagaacgaaagaaaaagcactaggagcgataatccacatgaggcttga

SEQ ID NO: 77371 - DNA, 2808 bp, Saccharomyces pastorianus
atgatgttatcactgcgcaggttctccatgtacgttttgagatctctgcggcttcactttaaaaagataatcattactcttctaactatccagttactattcattaccatatttgtattgggcggtcgctcgtcgattattgacggtaactggaagtcattcatggcgctctttttcaaaccgcttgcttacactaacagaaacaacaaccatgcttctttcgatctgagatcaaaagacaacgtagccaaactttacgaaaaaatgaatcttgatacttcaggcaaatggatcgacacgtacaccttgaagaataatcttctcactgtgaaaatgggtcctgaaaaagggcaagttcttgattcggtagatgaattgagatattacgataacgacccaaggctggtatggtcagttttactagatcacttattagaatcagattccaatgaatacgcattttcgtggtacgattgggctaattttgactctacaaacaaactcattgcactgagacacacgaacatatcttgccagttcgtttgcgagggtgcctttgataaaaatgtgctagaaatggtagagagtgaagtccaagagcctttattcgtcacaaataggaataaatatgacgaatcgctctggtacaacagggtaagaaaggttgtcgattctaattctgtgcagcaagccatacatgatcactgcatgaataatgacgcgtattccaatggtactcccttcgaattgccttttatcataagcgaaatttctgaaaggttgaggccagaagtgtatgacttacaagccaaaaaccacttgttatattctaactttactccactgtcattaaccgtactggacagcgataaagatgcatacagaatcaatttgaagacaacagactcttccaaatcaaatatagtacagacaaatctactacagaattacattaagaggcacagaaatgaaatggtaaatggcgacctcattttcaaccacacttccatgtttgaaaaatttttacatcatggatccactaaaaaaaggaaacttgacgttgaagcgttggataaaacaatatacgctggagagtatctagagctatcaccatctgatttccaattcaatgcaaaagagaggatcattgaattagagaccaggctcaggtctgaaggcctaccatctcatgatacccactatttacgaagtttaaagacgtccgtaaatacgtcccctgcattacagcaaaagtatttcgcagaggcctctgatattacggacgcgactgccgatggtcatcatagagacaggcgatttttctcaatcggacataatctcctaaatgaccctcaggagtttgaagcaagattgaattctttgatcagaaattttcagaaatttgttaaggctaacggattaatttcctggctatcgcatggtacattgtatggatatctatatgatggtctgaagtttccctgggatgtcgaccatgatttacagatgcccattaaacatttacattacttgagtcaatatttcaaccaatccctaatattagaagatccaagagaaggtaatggaagattcttactagatgtaggaagcgcaattacggtaagagttcatgggaacggcgaaaacaatattgatgctcgtttcatcgatattgacgcaggtatatacattgacatcacgggacttagcgttagttccgatgcggctaagcagtacatgtccaaatttgtagaagaagaaagctcgggcgaaagcttttctgcccttattgaagactataagtttgacgaaaacgactattttgacgaggtggatggtagagaaggtttagctaaatataccatacatgaattaatggaatgggttaattctcatccagacgactttacggatgcagaaaagaatttagtcaccaaaacatacaagaaagagcttgcaatttcgagaagcgattatgctgaaaaagacttgtctccgaaacaaaggtatttggtaaacgagaagtataacctttacaattgtagaaaccagcatttttccagtctaaacatcttatcacccttgagaaatacagtgttcagcggtgtgtcagcatttgttcctaataggcccatagcaacattgaataatgagtataaagttccggcaaaatacgggcttttgtcattccaaggtaaggtgtatttaccggaattcagatactggttctcgtttgcagacatgaagaagtttgcaaatttgcagctgaaagaacccaagataacacgactggaaagtcccttaaatgatttaaaattcagcgacataagcctactgataacaaacattttaaaatgtgggtttcactccgtatttgccagcttatttaattcttttgacagtactgtttacagactcaaagagcttgaaatacagtatgatcctagcttgagtgaggaagaaaaaagtagtctattaaaaactctacggcgaggaatgtcaaaaaaaataaaatcaccagaaaaagatccgatcatatatatatacgaaagaaagttatgggaaaacgtggaaaagttgttgaatgcgtcaaacatctacaacattgcttcacaagttgagaaggaaaaaggtaaagagtttgttgaacggtcccagcaagtatatgaaagaaactttgacggcttcagacttcccgatggcggcaacagtaagactgtaaatgatctgaattctaagggcttaaatctctttggtgataataagaaaacttcaaacaatatatttggttcagaccaaaaatattaa

SEQ ID NO: 77372 - DNA, 378 bp, Saccharomyces pastorianus
atgtctgttgtaggatcgttaattttttgcttggactgtggtgatctcctggaaaatcctaatgccgtattaggctctaacgttgaatgcagccaatgtaaagccatatatcccaagtcacaattctccaatttaaaagtcgtcaccacgacggcagacgatgcgtttccatcttctcttagagccaagaaatccgtggttaaaacttctttgaagaagaacgaactgaaagacggcgctactatcaaggaaaagtgtcctcaatgtggaaatgaagagatgaactatcatactttacagttaagatctgcagatgaaggtgctactgtcttctatacatgcacttcctgtggttacaagttccgtaccaacaattga

SEQ ID NO: 77373 - DNA, 426 bp, Saccharomyces pastorianus
atgtcgaatacttgggacgatgtatgggcatcagacagtgatgtcgaaactgaacgatctccagatttagtgaagttaagagagaatcatagcaagagggggtacttggacggaatagtgagttctaaagaagaaaagctgcaagaaggtttcaatgatggtttcccaacgggcgctaaattagggaaacaagttggcataattatggggattttacttggcctacgaacacgttttggtgatgaagatgaggacctcagtaaggcatatattgatgctcaaaaagagttacgcattaacaaagtacttagtaagtccatatttgatccaaactttgacttgcaagaaaaacatccgctcataacaaaatggactgatattgtcaatacctattgtgaaaagtaccatgtgccatctatccaataa

SEQ ID NO: 77374 - DNA, 1062 bp, Saccharomyces pastorianus
atgtttgaagggtttggtccaaataaaaagcgtaagatatcaaagttagccgcagagcaatcattggcacaacaaccctgggttgagaaatacaggcccaaaaacctagatgaagtgacagctcaagatcatgccgttactgttttgaagaaaaccttaaagtcagctaatctaccacatatgttgttttatggtcccccaggaactggtaaaacgtctaccattttagcgctaacaaaagaattatatggacccgacttgatgaaatcaagaatattggagttgaacgcttctgacgaacgtggtatctctattgtaagagaaaaggtaaaaaattttgcaagattgactgtatccaagcctagcaaacatgacttggagaactatccgtgcccaccgtataagatcattattctcgatgaggccgattcaatgactgccgatgcacagagtgcattacgtagaacaatggaaacctattcaggagtaacaagattctgtttgatttgtaattatgtgacaagaattattgacccgctagcgtcccgttgttccaaatttagattcaaagccctagacgcaagtaatgccattgaccgtttgaggtttatcagcgaacaagaaaatgttaaatgtgatgatggagttttggaaaggatcttggacatttcggcaggtgacttgagaagaggcattacattattacaatccgcttccaagagggcgcaatacttgggtgatggtaaaaacataacttctacccaagtggaagaattagctggtgtggtacctcatgacattctaatagaaattgttgaaaaagtcaaaagtggtgattttgatgagattaagaaatacgtcaatacgtttatgaaaagcggttggtctgctgcgtcagtagttaaccaactacatgaatattacatcaccaacgataactttgatacgaacttcaaaaatcaaatatcttggttgctgtttactacggattccagattaaacaacggaacgaacgagcacatccaattattaaacttattggttaaaatatcccaactctaa

SEQ ID NO: 77375 - DNA, 594 bp, Saccharomyces pastorianus
atgagcaacaacgaaattgtatttgtcactggcaatgccaacaagttaaaggaagtgcagtcgattttgactcaagaggtcgacaacaacaacaaaaccatccacttaatcaatgaggccttagacctggaagaattgcaggacacggatctgaatgccattgcgttagctaagggaaagcaagctgttgcggccttgggtaagggtaagccagtgtttgtggaagacactgcgttgagatttgacgaatttaacggtctaccaggtgcttatataaaatggtttttaaagagcatgggattggaaaaaattgtgaaaatgttggaaccctttgaaaataaaaacgctgaagcagttaccaccatttgttttgctgattctcggggtgaatatcacttctttcaaggaattacaagaggcaagatcgttccaagccggggacccactacattcggctgggattcaatttttgaaccttttgatagtcatggactgacttacgcagagatgagcaaagacgcaaagaatgctatttctcatcgtggtaaagccttcgctcagtttaaagagtacttgtatcaaaatgacttttag

SEQ ID NO: 77376 - DNA, 978 bp, Saccharomyces pastorianus
atgtctactaactttgaaaaacatttccaagaaaacgtcgatgaatgcactctagagcaactaagggacatcttagtcaacaagtctggcaaaacagttttggccaacagatttagagctctgttcaacttaaagactgttgctgaagaatttgccactaagccagaggaagccaagaaggccatcgaatacattgccgaatccttcgtcaatgacaagtctgagttgttgaagcacgaagtggcctacgtgttgggtcaaaccaagaacttggacgctgctccaactttaagacacgttatgttagatcaaaatcaagaaccaatggtgagacacgaagccgctgaggctttgggtgccctaggtgacaaggattcgttggatgacctaaataaggctgctaaggaggatccacacgttgctgtgagagaaacctgtgaactggccattaacagaatcaactggacccatggaggtgccaaggataaggaaaacttgcaacaatccctatactcgagtattgacccagccccacctctaccattagaaaaggatgctaccatcccagaactacaggccttattgaatgatcctaagcaacctttgttccaaagatacagagccatgttcagactgagagatatcggtactgatgaagcaatcctggccttggccactggtttcagtgcagaatcctcccttttcaagcatgaaatcgcctacgtcttcggtcaaataggtagtccggctgctgtcccaagtttgattgaagttttgggcagaaaggaagaagctccaatggttaggcatgaagctgctgaagccttgggtgccattgcttctccagaagttgtcgacgtcttgaaatcttacctcaacgatgaagtcgatgtcgtcagagaatcttgtatcgttgcgctagatatgtatgattacgaaaacagcaacgaactagaatatgctccaactgctaattag

SEQ ID NO: 77377 - DNA, 621 bp, Saccharomyces pastorianus
atgaaggagtcagtccaagagatcatccagcaactcatccacagtgtcgatttacagtcttccaagttccagctggccattgtgtgcacgatgttcaatcctatcttttggaacatcgttgcaagaatggaataccacaagcattctctaaccaagatgtgtggtggggccagaaagggctgttacatgttggcggcgaccatattttcgctaggtatcgtcagagacatggtgtacgagtctgcattgcgtgaacagcccacgtgttctctgatcacgggcgagaactggaccaagctgggtgtggctctctttggtttggggcaagtgcttgttttgagttccatgtacaagctgggtatcacagggacgtacttgggtgactatttcggcatcctgatggatgagagagtcaccggcttccccttcaacgtttccaacaaccccatgtaccagggttccactttgtccttcttgggcatagcgctttacaaaggaaagcctgcggggctggttgtttctgccgtagtttacttcatgtacaagatcgctcttcgttgggaagaaccttttactgccatgatctacgctaaccgtgataaggccaaaaagaatatgtaa

SEQ ID NO: 77378 - DNA, 657 bp, Saccharomyces pastorianus
atgaagattgaaaaggcttctcatatttcacaaccggtgcaactttccacatgcactctcattgacacctaccctggtcatcaaggaagcatgaacaacaaggaagtcgaattatacggcggcgccatcactactgtcgtcccacctgggtttatagacgcttctactctaagagaagtccccgatacacaggaggtgtacgtcaattcccgtcgcgatgaagaagaattcgaagatggactagccaccaatgaaagcattatcgtggatctcttggagacggtcgacaagagcgatctgaaggaggcttggcagttccacgtggaagacctgacggagttgaacgggaccaccaaatgggaagctttacaagaagacactgttcagcaaggaaccaagttcaccggactcgttatggaagtagcaaataagtggggaaaaccagatctggcacagaccgttgtcatcggcgtagcgttgatcagattaacccagtttgacacggatgtggtcatctccattaatgtacctttgacaaaggaggaggcgtcgcaagcaagcaacaaagagttgcctgcaagatgtcatgctgtttaccaattgttgcaagaaatggtacggaagtttcacgttgtggacacgtcgctgtttgcttaa

SEQ ID NO: 77379 - DNA, 936 bp, Saccharomyces pastorianus
atgtctgtgtctgctgctcctgctattccacagtactctgtctctgactacatgaaattcgccctagccggcgccatagggtgcgggtcgactcactccagtatggtcccgatcgatgtcgttaagacgagaatccaactggaacctaccgtgtacaacaagggtatggtcggctctttcaagcaaatcatcgccggagaaggtgctggtgcgttgttgaccgggtttggtcctactttgttgggttactctatccaaggtgccttcaagttcggtggttacgaagtgttcaagaagttcttcattgacaacttgggttacgataccgcctctcgctacaagaactctgtttacatgggttctgctgccatggccgaattcttggcagacattgccttgtgtcccctagaagccactagaatcagattggtctcccaaccacagttcgctaatggacttgtcggagggttttccagaattttgaaagaagaaggtatcggctctttctacagtgggttcactccaattttgttcaagcaaattccttacaacattgctaaattcttggtctttgaacgtgcctccgagttctactacggattcgccggtccaaaagaaaaattgtcctctacttccactactttgttgaatttgctttccggtttgactgctggtttggccgctgccattgtttcccagccagcagacactctgttgtccaaggtcaacaagactaagaaggctcctggccaatccatagtcggtttgttggctcagttggccaaacagttaggatttttcggctcctttgctgggttgcctactcgtttggtcatggttggtaccttgacctccttgcaatttggtatttatggttctttaaagagcactttgggttgcccaccaaccattgaaattggtggtggtggtcattag

SEQ ID NO: 77380 - DNA, 1185 bp, Saccharomyces pastorianus
atgataagcccaagggtgaatactcgagtttggcagagatcaatttctcttttgagcccacaagcggccaagacggagagtaatgtcgtaactaaagaaaggacatatatcgagaacttaagcaaggatattgcgacttcccgtttcaggctagtagacgaaaatggtaaaattgcatctatcactatgcaaccagatattccaatttgtatcaaaaaggattgcctagtttccattcacaatttgaaccatttatccctttcctataaatggctgaatttttggtcaaacctgattaaatttcgttcattcaaatcttcattgtttcatagaattattggatcttccgttttagaaattctggctgccccaaactttcaaacatcgagaagacctttcgattcttcaagaagcttgtccgtactgaatttgaccgggacaaaggattggaatgtatttggcaaggattcaataatcgcatttgaacagaactccagtctggaaatcaaatcgcctatctttccctctgcaaggtctttagtctcgaactcatcaaaatcacaactaccacggaaatttcaaattctgaatgggagaggaaatgtgttagtatgtggaggtgggttggtatattcaattgagttaattgatgaaagcgacaaaattctggttaattccagaaacattttggccatcaacggccaaagtcaattggatattgcaaattcagtggagagacaagagttacacgtggaaggcgcgtacgtcggagattcaagtaatgatacggtggcacctaaattcattaagaaccaaacgctaaaatctgcttacggacatactgttcaatttttcaaaagaatgcgcagttggatccgtaaccagtacgaaaaaagatacatttatggtgtcgactcgtactttatgaagattaaaggtccaagaacaattttgattcaaacgcatgaaatgacaacatccaaagataatattctaactaaactaacgtccaagggccacgttaagaagagcaccgtgaacgataacggtgtcaatttagagaaacaagtggctaacgatgtaaattcaaagatcattgagcttgccaacagaccctcactgtttattgcgaccgtctcgcaagatgggagggttgattttcaaagtacttcgaagttcacataa

SEQ ID NO: 77381 - DNA, 930 bp, Saccharomyces pastorianus
atgtcagaagaccagcgtgtaattagtcaaccaattgaattacataagctgtcgattgtcgataaacactcccaaggacagcagcaacagtcgcatcaaaaacaacatgaagttcagcctgaatcaaaatcaccaagggttacgacacctttaaagcccaaaagacttgctatacctatatcaagtccgcaaagatctacgacaaatcagtcacccgtgagcgaccacgcaagtccgatttcaacagaccaagatttaatatataaattagctgcaaaacacagagaaatcaatgaacttaatttcaaattagaggtcgcccaaaaagaattaaaacaattagagttacagttcaaagatacactgccccgaaatggacaacagaaattaggtaaccagaacccaagtgaatacctctctacttttactaaaagaattcaacagacatttgtggacgtaaataattcaccaaatatgctcaagggaaaaaagagtataaacgatttttttagtaagcccaataataatgttaatagcaacataaataacactctacccaatcgtaaaccgaaccctccgcctaatcggtcacaacgtatgcaaaatattgctccaagccgtagttcagaatcaactccaacatcgggtcctcccttgctacccccaaggaatactatgaagaatgctaatacaacggcaactggtggggagaacacaccattcttacaaagaatacttaacaaattcaatcaaatgaatatggaagaggacgaattcgatgaccttttggaaaagaggaaaagtaagaaagatcattattacataaaagaaaatttgggttacgaatacgatgaagtacgcagtgaagacgaggatgatgaagaatttgaacccatgggtgacatacccgttcatttatttaaaaggtag

SEQ ID NO: 77382 - DNA, 318 bp, Saccharomyces pastorianus
atggaacatccagcatatacattgagtcttttgactacagccggtggccttatgggatactaccgtaagggctccattccatctctagtatctggcttagtattcggtagtgtatatgggattgccggttacttgctacatatgaatagagatggtgggctcgaaatggcattgggtgcatcgaccttactacttggtgctggtgtcataagaggcatgccttccaggttcactaaacctgtccctgtcgttttgacagctttgggtgggctcggcagttactactattataaccaatacaaggaattttacccttag

SEQ ID NO: 77383 - DNA, 333 bp, Saccharomyces pastorianus
atgacatcagttcaaaactctccacgcttacaacaacctcaggaacagcaacagcaacagcaacagctttccttaaagataaaacaattgaagttaaaaagaatcaacgaacttaacaataaactgaggaaagaactcagccgtgaaagaattactgcttcaaatgcatgtcttacaataataaactatacctcgaatacaaaagattatacattaccagaactatggggctaccccgtagcaggatcaaatcattttatagagggtttgaaaaatgctcaaaaaaatagccaaatgtcaaactcaaatagtgtttgttgtacgcttatgtaa

SEQ ID NO: 77384 - DNA, 351 bp, Saccharomyces pastorianus
atgatagtaatagaatccaaaaaaaaaaaaatatacatgctttttcatatcctctctcaccctatcttttttttttcttctaattttggctccgttcatatcttattcaaaattaattcagcggtaatcttatctttattgttagacttcgcagaaatttcatttagcttcgatgcagatagtttgatcaagtcatttggtttattacgtcccagttcgcgagaaatgatgttaaccaatgcccacccttttaggtatagttcgctaagttcaacgctcctcaaagcattctttaatgccttttccaagagctcggtctgggttggtttcttgctacgtagagcctcataa

SEQ ID NO: 77385 - DNA, 3447 bp, Saccharomyces pastorianus
  modified_base (2669)..(2669): a, c, g, t, unknown, or other
atggatcaggataacaacaaccacaatgacagcaataggctgcacccacctgatatacatccaaatttgggccctcaattgtggctgaatagtagcggtgattttgacgacaacaacaacaacaacaacaataataatagcacaagaccacaaatgccatcacgaactagagaaacggcaacttcggaaagaaatgcaagtgaggttagggatgcaacgctaaataatatctttaggttcgatagtattcaacgggaaacgcttttgccaaccaacaacggacaaccgctaaatcaaaacttttcgctgacatttcaaccacaacagcaaacaaatgcgctgaacgggattgacataaacactgtgaacacgaaccttatgaatggtgtcaatgttcaaatagatcaacttaatcgattgttaccgaacctaccagaggaagaacggaagcaaatccacgaattcaagctaatagtgggcaaaaaaatccaagagtttctggttgttatagagaaacgtagaaaaaaaatactgaacgaaattgagctagacaaccttaaactaaaggagctacgtattgataactccccacaagcaattagttatttgcataaattacaaagaatgaggcttagggcgctagagacagaaaacatggaaattagaaatttaaggctaaaaatattaacaattatagaagagtacaaaaagtcattatatgcatactgccattccaagctaagaggtcaacaagtggaaaatccaacagataatttcatcatttggataaactccatagatactactgaatcatctgacttgaaagaagggctacaagatctttcgagatattcaaggcagttcataaataatgtgctttcgaatccatcaaatcaaaacatatgtacgagtgtcacccgaagatcacctgtgtttgccctaaacatgctaccctcggaaatattacacttaatattagataaacttaaccaaaaatatgatattgtaaaattcctcaccgtttccaaactctgggctgaaataattgtgaagatactttattacagaccgcacatcaacaaaaagagtcaattagacttgtttttaaggactatgaagttaacttctgaagaaactgtattcaactatcgtttaatgatcaaaagattaaatttttcatttgttggtgactacatgcacgatacagagcttaactattttgtcggatgtaagaatttggagcggctaactttagtattttgcaagcatataaccagtgttccaatatcggctgttttgagaggatgtaaatttctccaaagtgtggatatcactggaataagagacgtttccgatgacgtatttgataccttagcgacatattgtcccagagtacagggcttttatgttcctcaggcaaggaatgtaacattcgattcactgcggaatttcatagtccattccccgatgttgaaaagaataaaaatcacagcaaacaataacatgaatgacgaattagtagaactattagccaacaaatgccctttgcttgtagaggtcgatataacattaagtccaaatgtcactgattctagtttgttaaaactcctcactaggttagttcagctgagggaattcagaataactcataatacgaatattacggataatcttttccaggagctttctaaagtagttgacgatatgccctctttaagattgattgatctttctggatgtgaaaatattacagataaaactatagaaagaatagtcaatttagcccctaaattacgtaatgtttttctaggcaagtgtagccgaattacagatgcatcgttgttccaattatcgaagctgggcaaaaacttgcaaacagtgcattttgggcactgtttcaatataactgataacggggtaagagcactctttcattcatgtacaagaatacagtatgtggactttgcgtgctgtacgaatttaaccaatagaactctttatgaactagcagacttaccaaaattaaagagaattggccttgtcaaatgtacgcaaatgactgacgagggtttgttgaatatggtttccttgcgaggccgaaatgatactttagaaagggtacatttatcttactgttctaatttaacaatatatccgatatatgagcttctaatgtcttgcccaaggctctcacatttgtctttgactgctgttccgtcatttttacgccccgatataacgatgtattgcaggcctgcaccctcagactttagtgaaaatcaacgtcaaatattctgcgtattttcagggaaaggtgttcataaacttcgccattatttagtaaatttaacgtcgcccgcttttggaccacatgccgatgtaaatgatgttttgacaaaatatattagatccaagaatttgatatttaacggtgaaacacttgaagatgctcttaggagaatcataactgatttaaatcaagattccgctgcaattatagctgctacaggattaaatcaaatcaacggtctaaataacgattttcttttccagaatatcaattttgaacgaatagatgaagtattcagttggtatctcaatacttttgatggcattaggatgagctcggaggaagttaactcactattattgcaagtaaacaagacgtntcgtgaagatccatttagtgatgtggacgatgatcaagattatgtcgtagcacctggtgtaaaccgggaaattaacagtgaaatgtgtcatatcgttagaaaattccatgagttaaatgatcatattgatgatttcgaggtgaatgttgctagtttggtaagagttcagtttcagtttactggttttttacttcatgaaatgactcaaacctatatgcaaatgattgaattaaacagacaaatttgtttagtacaaaaaacggttcaggaatcgggcaacatagattaccaaaaagggcttttaatatggcgacttttattcattgacaaattcattatggtggttcagaagtacaagctctccaccgttgttttgagactatatttaaaagataacataacattgttaaccagacaaagagaactattaatagcccaccaaagatcagcatggaataacaataatgacaatgacgccaaccggaacgccaacaacatagtgaatattgtatcggatgctggggcaaacgatacaagtaacaatgaaactaacaatggtaatgatgacaatgaaacagaaaatccaaatttctggcgtcagtttggcaatagaatgcaaatatcacctgaccagatgaggaatctccaaatgggacttcgtaatcagaacatggttaggaacaataacaacaacacaattgacgaatcaatgcctgacactgccattgattctcaaatggatgaagcatcaggaacgcccgatgaagatatgttataa

SEQ ID NO: 77386 - DNA, 984 bp, Saccharomyces pastorianus
atgagctccagtgaagacgaagacgacaagttcttgtatggttccgactccgaattagcactaccttcatctaaacgatcaagagatgatgaagcagacgcaggtgcgtccagtaatcctgatatagttaaaaggcaaaaattcgactctcccgtggaagaaactccagctactgccagagatgatcgttctgatgaagatatctactctgactcctcagatgacgatagtgattctgacctagaggttatcataagtctgggtcctgaccctactaggttagatgcaaaactactcgattcttattctaccgcagcgacatcttcaagcaaagacgtaattagcgtagctacagatgtatccaataccatcacaaagacatcagatgaaagactaataacagaaggagaagcaaatcaaggtgtaacggcaacaaccgtaaaagctacagagagcgatggaaatgtaccgaaagcaatgactggttctatagacctggataaagagggaatctttgatagtgttggcataacgacaatagatcctgaagtattaaaggagaaaccctggaggcaaccgggggccaacttaagtgattatttcaattacggttttaacgaatttacctggatggagtatttacatagacaggaaaaactacaacaagattataatcctaggaggatcctaatgggcctattatccctccaacagcaagggaagttgaattccgcgaatgatacagactcaaacctcggtaatataattgataacaacaacaacgtaaacaatgcaaatatgtctaatctgaacagtaatatgggtaatagtatgtctggaacaccaaaccctcccgctccaccaatgcatccaagcttcccacccttacctatgtttggtagctttccaccattccccatgccaggtatgatgccacccatgaaccaacagcctaatcaaaatcaaaatcaaaattcgaaatga

SEQ ID NO: 77387 - DNA, 969 bp, Saccharomyces pastorianus
atgtctcaaaaaaagaaggcttcccatccagccatcaatctcatggctggcggcacagcaggtttatttgaagcattgtgttgtcatcctttagatacaattaaggtgagaatgcaaatatacagacgggtagctggtattgaacatgttaaacccccaggatttattaaaactgggcgtaccatttatcaaaaagaaggtttcttggctctgtataaaggtctaggtgctgtggtcatcggtattatacctaagatggcaatccgtttctcgtcttatgaattctatagaaccttattggttaacaaggaatcaggaattgtgtctaccggtaatacttttgttgctggtgttggggctggtatcaccgaagctgttcttgtcgtgaacccgatggaagttgtaaagattaggttacaagctcagcatttaactccgagtgagccaaatgctggtcctaaatataacaacgccattcatgcagcctacactattgtcaaagaagaaggtgtttctgccttatatagaggcgtttccttaactgcggcaaggcaagcaactaatcagggtgctaacttcacagtttattctaaactgaaggagtttttgcagaattaccatcagatggatgtcctaccttcatgggaaacttcttgcataggtttgatttcgggtgctattgggccgttttccaacgctccattggatactataaagacaaggctgcaaaaggataagtccatctcattggaaaaacagtccggtatgaagaaaatcataaccattggtgctcaactactgaaagaagaaggttttagagctttgtacaagggtattaccccaagagtgatgagggtggctccaggtcaggctgtcacctttaccgtttatgaatatgtaagggagcatttagaaaatttgggtatattcaagaagaatgacacaccaaagccaaagccattaaagtag

SEQ ID NO: 77388 - DNA, 519 bp, Saccharomyces pastorianus
atgtcattggtgaattcgttaacacactatgaaattttaagaattccatcggatgcaacacaagatgaaatcaaaaaggcatataggaatcggttactaaatacgcaccccgataaactttctaaaagcatacatgatacggttagcaacgtcacaatcaataagattcaagatgcttataaaatactatcgaatataaaaactcgtcgcgaatatgataggttgatccttgaaaactataaacgccaaggatttcataattgtggtgatgggctggatgaattttccttagacgatttctcatttgatgaagataagctggagtttatgatgaattgtcctcgctgtcaatttgttggtggttttcattttagtgagagtttgttagatgaatgcattgataatgtagacgctatggaacggagtcattctggttatcaattattaacccaatgtagcgcatgcagcttatggctgaaggttaattttgacatcgaggaagagcaagaaggacaataa

SEQ ID NO: 77389 - DNA, 711 bp, Saccharomyces pastorianus
atgagcggagaaaatcgtgctgtggtgccgattgaatcaaaccctgaagtttttacaaattttgcacataaattaggtttaaaaaatgaatgggcgtatttcgatatctatagcttaacagagccagagttactagcattcttaccaaggccagtgaaggccattgtactgctatttccgataaacgaggatagaaaatcgagtaccagtcaacaagttacaagttcttatgatgttatatggtttaagcaatcagtcaaaaatgcgtgcggattgtatgcaattcttcattctttgagcaataaccagtcattgttggagcccggctccgacttggacaattttttaaaatctcaaagtgatacttcaagctcgaagaataggtttgatgatgttactaccgaccaattcgtcttgaatgtaataaaagagaatgtacaaacattttctactggccagtcagaagcaccagaagcaactgcagatactaatctacactatatcacatatgtggaagagaacggagggatatttgaactagatggaaggaatttgagcggacccctctatttgggaaagagtgacccaactgccaccgatttgattgaacaggaattagttagactgagagtcgcctcatatatggaaaatgcaaatgaagaagatgtattaaactttgctatgctaggattgggccctaattgggaataa

SEQ ID NO: 77390 - DNA, 801 bp, Saccharomyces pastorianus
atgcttgttttcaaaaggggtattcacgtagtacctaaactaccaaattctaaggccctactgcaaaatggagtgcctaatatactcagttcttcgggattcaagacggtgtggttcgactaccagcgatatctatgtgataagctaacgctggcgacagcgggacagtctttggaatcatattatccatttcacatattgctgaaaactgcaggaaatccattacagtcaaacatcttcaatttggcgtcctctatccataataaccatttattcgtggagaacattctaccttctgctgttgaacatggtactaactcgaacgccgttgtgaagacagagccttctaggctttttttatccaaaatcaaagattcattcaacggcagcgattgggaagtagtgaaggaggaaatgatttaccgtgctgagaatgaagtcttgggacaaggctggttatttctagttgaaaacaatgagaaaaaactcttcatattaacgagcaataataatggtacgccgtattattttcccaggaaccagtcatttgatttaaacagtgcaatatccatcgatgaatttgctaccttgaaacaaatgaaagaactgataggaaagtctactaagttgaatggtaaggttcaagactggaccatgcctataatctgtgtcaatctgtgggatcatgcttatttacatgattatggcgttggtaaccggtccaaatacgtgaagaatgttctagataacttgaattggtcagtggtaaataataggatattctctggtatatcgaagtaa

SEQ ID NO: 77391 - DNA, 606 bp, Saccharomyces pastorianus
atggttaactcacatggaatacggtacattcggttgaagcaggtctttaatcgtgcattggaccaatcgatttcgaaattacagagttgggacaaggtcagttcatgcttcccgcaatatgtgaatagcaagcagggcgctataaacgcccccaattgtcagcgccaattaacggaattctggacggagctttgtcaacgagagtttaaagaaattatggaagaacgaaacgtcgagcagaaactaaatgagttggacgaactgattttggaggctaaagaacgttacacggatcgtgatcaagatgaagtaaacaaagggcccgcgatcgatgagctctccagcaaagagcttgtggaatgtcatttatacagccaacggatgcatgccatacacgagatagacgagcggcttgcgaaagtgaatgagatgaatgaccagttagcccaggagttgaaagacttagagacgcaagtagaggtagagaaaaacgaaattggcaagatgtacgatgagtacctgggctcccacacggaccaaccggtcaacgtgctgctggtacagagcctcaatgatatggtcttggaattgaaggaaaactattga

SEQ ID NO: 77392 - DNA, 498 bp, Saccharomyces pastorianus
atgttcacaaatacacgtacaatattaatatacaatagtaaggtcatgaacacacacacacacccacacatatatatatatatatatacaggagatcaagttagtgtgaggggacgactactgagtttgaagttctttaaagtgttaaagttatttttcccctctcccacctcgttggcaacctctcacccaccgcttaacagcatgtctccgtacatgaccatacctcagcaatacttatacataagcaagatacgttccaagctgtctcagtgcgcccttgctcgacaccaccacagagaacttgatctacgaaaaatggtgggccacaccaatattctggacaggatcctcgacgaaatagacgaaatcgacagcgaggtagtactgtgtgacgctgccgatggttcttctactgcagaagctcattccgcttcctcagcatccagcgactcttctcctctcactaataacatccggcccattagcattatgtga

SEQ ID NO: 77393 - DNA, 840 bp, Saccharomyces pastorianus
atgaacgccaactctaccacgacagcaatcggcctcaccagccccttcgaaaagctgtccttcttccctcattcgtctaatttaatactggctcatttgcatgagatcatcttcagcttcgtcttctaccagctcgcattctccgttgtcgcaccgttcttgaataaagtggtctttcgcaagcactacaccacgatccgtgacccactgctgaaaattgatttcaatgtccacaccgtctcgatgatccaggctgtcgtctcgaacaccgtcctgttgcccaccctcacgacgccaatgcattataatgttgtcacctacacagattcgtacagttcaatggtatcttccctcagcgcagggtactttatctgggacttgactatgtgcgtgcgttacttcaagctttatggtctcgagttcacgggccacgccattggctccgtatatgtgatgctgttgtccttaagaccgttctgccaaccctggatcggcaggttccttatctacgaggcctccactccctttgtgaacatcaattggttcatcatgcaatgtaacgccaagagcaagaactctatccctctgtggtttaatgtcgtcaatggccttttgctcatgactgtgtttttcgtcgtcaggatttgctggggctccatcgcatccgctctcttattcaggcagatgtggaaggtaagagacgagttacccaagttttctgctgtcacgatgatgtcgctgaacatcttcatgaaccttttgaacgtgctttggttcaagaagatgattagaatcgccaagaaactcgcaaaaccagccccaacgtcgaagctagactaa

SEQ ID NO: 77394 - DNA, 1362 bp, Saccharomyces pastorianus
atgtttgatcttaagacgattctcgaccatcctaatatcccgtggaaattaatcatttctgggttctcgattgcccaattttctttcgaatcttacttgacgtacagacagtaccagaagctatctgaaacaaagttgccacctgtgctggaagacgaaattgatgatgaaacttttcataaatcaaggaactactcccgggccaaggccaagttctccattttcggtgacgtctataacctagcccaaaagctagttttcatcaaatacgacctcttccctaaaatctggcacatggccgtttctttatcgaatgcggtcctgccagtcagatttcatatggtctccactgtcgcacagagtttatgtttcttgggtctcttatccagtttgtctaccttggttgatttgccactctcttactatagccattttgtcctggaagaaaaatttggtttcaataaattgaccgtccaactatggatcaccgatatgatcaagagcctgactttggcgtatgctattggtggcccaatcctttacctgttccttaagatctttgataaattccctactgatttcctttggtacattatggtcttcttgttcgttgtccaaatcttagccatgacaatcattccagtcttcatcatgcccatgtttaataagttcactccattggaggacggtgaactgaaaaaatctattgaaagtttggccgatagagttgggttccctctagataagatttttgtcattgacggctcaaaaagatcttctcattcaaacgcatatttcacaggtttgccattcacctccaagagaattgttttgttcgacactttagtgaacagtaattctactgatgaaattacggctgttttggcccatgaaatcggtcactggcaaaaaaaccacatcgttaatatggtcatctttagtcaattgcacaccttcctcattttctcccttttcaccagcatctacagaaatacatcattttacaacaccttcggctttttcttagagaagtccactggcagttttgttgatcccgttatcactaaggaattccccattatcattggatttatgttatttaacgacttattaactccactcgaatgtgccatgcaattcgtgatgagtttaatttccagaactcatgaatatcaagctgatgcttatgctaaaaaattgggctacaagcaaaatctatgtagggctctaattgatctacaaatcaaaaacctttccaccatgaatgtagatcctctgtattctagctatcattattcccatccaactctagctgaaagattgaccgctctagactatgttagtgaaaagaagaaaaactaa

SEQ ID NO: 77395 - DNA, 612 bp, Saccharomyces pastorianus
atggctcaagccttgaactccaccaatattgcttttttcagagtagcatttttattcacgatcgccttcttttgtttaaagaacgttaattctattttgcaaaatacatatttcatagtcttaacgcaagcgatgaatttaccgcagttaacactttcacgttatagtggtcaattgggtcttttcgctcttctgtttactcttaacggtgttcatgatctaattcccctgttagaaaacaacgttaaatacttccaatctgttgtgccagttagattactaattttttttattttgacaagtatctcgtacctctgggagtcaaacttttacgttcacaataactctgtttttatttactgttttgcagaagtttggataaattttcttttgtataatgccattagggaggagaaaaatgaagagttcaaaagattgaaccaattcatggttaatgatgaggatattgaagaaccccaaccatttaccgtgaagactgaaaccacagaaatcattgaaataatcaatgatgaagaaaatgacgatgaagatgagaaagataatgatgataacaatgagaaaggtaatgatgatagcgatgcaaaaaaataa

SEQ ID NO: 77396 - DNA, 2187 bp, Saccharomyces pastorianus
atggaggaaattcctgccctgtatcctacggaacaagaattcaaaaatccgatcgattatctctctaacccccacattaaaaggcttggtgtacgatatggtatggtcaaggttgtaccaccaaacgggttctgtccgccactttctattgatatggaaaattttacttttcaaccaagaattcaaaatctggagaacctagacctgaaaaataggtgtaggttattttttatgaaacagttaaataattttaaaagatccgttaaggatccatcgaaacttatacttagggaaccttatacgattgtagaatattcagattctactcatgcatcagaaatactaaaaaaaaaagtgtacttttatgacgttttctctgaactaataaaagacaatcggacacttactgacactacacagtcattcaggcgaaaattgaaatttagagatatttcccaattaagaggcgacagcagtctatggaggaccatttctaaaaaattcaacgtaccaatcggcttgttaaaggaaatttttgagaaatatattgcctcatactacatatttcttcattcactgaacgagaacgtgcacacggcgctgcatgctgaccagtatccaaaatccttattaagtgatgacgaggacgatttcgatcttgggccagattcgaattctgggtcggattttgaggaggacgatgatgatgcttgtattgtttgtcgcaagacaaatgatccaaaaagaacaattttatgtgattcatgtgacaaaccattccatatatattgtttatcaccacctttggaacgtgttccctctggcgattggatttgtaacacttgtatcgtcggaaacggatattacggattcactcaggacacgcatgactattctctaccagagtttcaagaatattgtaaacatcaaaattcaaggttattaccagcacgaaaactgtctatagatgagttggaagagatgttttggagtttagtgaccaagaatcgtggcagttcattaacaacagttaaatacggtgctgacatacataacgaattgccaggtcaaattaccggctttccgacgagagaatttatacccaaaaatataaatggggacgaattgaaagactacctcaaatattgcgatcatcctatgaatttaactaacttgcctatggctcataattcgctattaccgttatttaaaagaaatatttctggcatgactattccttggatttacataggctccttattttccacattttgttggcatatggaagatcagtataccctaagtgctaactaccaacatgaaggtgaccctaaggtctggtacagcattcccgaatcgggatgtacgaaattcaacgatctattaaatgatatgtcaccagacttatttatcaaacaaccagacctactgcatcagctagtgactttaatatctccgtacgattcaaatttcaagaaatcaggtattcccgtgtacaaagctgtgcaaaagcccaacgaatatattatcacatttccgaaatgttaccatgctggttttaatacaggttataattttaatgaagctgtcaattttactatagatttctggctaccatatggatttggtgcgattacggattataaattaactcagaaagcatgtgtttttgatatgtttgatttaatgatcaatgttttggacaagtacaataaagatactctattgttcaatgatgcttttgttaggcaatgttactcttcattgatcgtcttttataatacagaattaaaacgcatacggaaaattcaggccattgtaccacggacaactcttttggaggtgcatactgatccaaacgatgaagatgaggaatacgatatattttgttcccaatgtaagactatatgttcaatagcctttgtattgcgaaagaataactctgattcaattagaacgtataaaagacacaagaaaaaccatttaagtattaggcagtggaatgaactatccacgacggacagtaaagtgagtatcctgtgtacgcaggattacttaaaatcaatacaaaacttgaacaatagcgacggtgaagaaccttatattgacgatgaattgtatttcactaagtctttgaaggatattgactctttaataaagcaagttggtgttaagttagatagatag

SEQ ID NO: 77397 - DNA, 351 bp, Saccharomyces pastorianus
atgcgctggggtgttatcatcttatacgcaattagccgcccatatgccacccggcgcaccgggtcgcacatacacccccgtgattcgcgatatatagcggccaatcaacggcgacctccaagcgcgtgccgggtgggcccctcgccggccaagcagcgcaaggatattcccatcttcgagctcttagatacaacgcttataaagaacgcactttttgcattaacctcttttttgtattacagaacaaacattttaacttgcccttttttaaactttctttatctctccaggacaggccaattggataaattttgcaaagatcaaacagtaacacaaattttagcaacctaa

SEQ ID NO: 77398 - DNA, 1536 bp, Saccharomyces pastorianus
atggttttgccaagactatatactgctacatcccgtgctgctttcaaagcagccaaacaatccgctccgcttctatccacttcgtggaaaagatgtatggcctcagctgctcaatctactccaatcaccggtaaagttaccgctgtcattggtgccattgttgacgttcattttgaacaatcagagttgcccgctattttgaacgctttagaaattaaaacacctcaaggtaagttggttttggaagttgctcaacatttgggtgaaaacactgtcagaaccattgctatggatggtaccgaaggtttggtccgtggtgaaaaggttcttgacactggtggccctatctctgtcccagttgggagagaaactttagggagaatcatcaacgttattggtgaacctattgatgaaagaggaccaattaagtccaaactaagaaagccaattcacgcagaccctcctagttttgcagaacaatctacttcggctgaaattttggaaacaggtatcaaagtcgtcgatctattagctccttatgccagaggtggtaagattggtcttttcggtggtgcaggtgtcggtaagactgtgttcattcaagaattgattaacaatatcgccaaggcccatggtggtttttcagttttcaccggtgttggtgaaagaacaagagaaggtaatgacttgtaccgtgaaatgaaggaaactggtgttattaacttggaaggtgaatccaaggtcgccttagtgttcggtcaaatgaacgaacctccaggagccagagccagagtcgctttaactggtttgacgatcgctgaatacttcagagatgaagaaggtcaagatgtcttattgtttatcgacaatatctttagatttactcaagctggttcagaagtctctgcccttttgggtcgtattccatctgccgtcggttatcaaccaactttggccactgatatgggtctcttacaagaaagaattaccaccacaaagaagggttctgtcacttctgtgcaagccgtttacgttccagccgatgatttaacagatcctgctcctgccactacttttgcccatttggacgctactaccgtcttgtcaagaggtatttcagaattaggtatttaccctgcagtggatccattggattctaaatcaaggttattggatgccgccgttgtcggtcaagaacattatgacgtcgcctccaaggttcaagaaactttacagacctataaatctttacaagatatcattgctattttgggtatggatgaattgtccgaacaagataaactaactgtcgaaagggcaagaaagattcaaagattcttatctcaaccatttgctgtcgccgaagtctttactggtatcccaggtaaattagtgagattaaaggacaccgttgcctcgttcaaagccgttttggaaggtaaatacgataatataccagaacatgctttctatatggttggtggtattgaagatgttgttgctaaagctgaaaagttagccgctgaagccaactag

SEQ ID NO: 77399 - DNA, 1494 bp, Saccharomyces pastorianus
atgttcatcagtagaagatgcagaattaaaggctttacccttaagaatttgctgtggttcaggccatcatcaactcgatttgtttcaactgaatcaccagatgcgagcgcaattacgaaaccagatggtattttcaattattctctgttggaaaacagaacatacatcaggatacgaggacccgacacagtgaaatttctgaacggattagttacctcgaaactattacctcattttattaagaaaaatctaaccactgtagaagagaatgaagtgcctactgaagaaggaacgacgaaggctgatccaattattcctgtgccagaatttgatgcacgactgggaaattggggactgtataacgaaaaaggtattcaagggccatatatttcaaggtttggtttgtactctgcatttttaaacggtaaggggaagttaataacagatacaattatttaccccactcctgtgaccgtaagcgaacaaattccaaactatcctgagtatctgttagagcttcacgggaatgtagtggacaaaattttgcacgttttacaaactcacaagttggccaataagattaaattcgaaaaaattgatcattcctccttgaaaacctgggatgttgaggttcaattccctaatttgcccaaagatattgaaaacccgtggtttgataatctactggatcctatggctctaccaaaaaattccatagatgctaataattttgctgttaatgttttaaattctttgtttaactcagatcctagaatattgggtatttacgtagaaagaagaactgagtcgatgtcaaggcattactccacatttccacaatccttcagaattgtcacttccgagcaagtggatgatctgtctaagctatttaactttaacgttttcgacttcccttttcaagtaaataaaagagcttccgttcaagttagagaaatcagctttcaaaaaggtcttatagatagcactgaggattacatatctgagactttgctacctttggaactaaactttgatttttttccaaacactataagcacaaacaaaggatgttatgtaggacaagagctgacagccaggacatatgctacaggcattctacggaaacgtttggtcccagttaagctggataattatcaacttttagatacagacccagaaagaaagtacgcagaattccatatcgacaacgttgtcgaaaagagccttgcagagaacgagccaaccctcaatccatttaccaataaaccgcccgaacgaaccaagagaaagcaaaggccggcaggcttattgatttctaatgaagggctgtatggcgtagctttacttagaacagagcatttctctgctgccttctcatctgatgagccagtcgaattttacattactacaacgaagggtgaaaatattaaaataacacctcaaaaaccattctggtttagcgactggaaaaacaataacgggcctcataaatag

SEQ ID NO: 77400 - DNA, 1347 bp, Saccharomyces pastorianus
atggcaccggaaattttcgttaaattcaagtgtgcaagtagagacataaagctactatgggcgtccgtctttcttagacttctatcatatggtttaacaaatcaagttttgacgctttttttaaatgccatcaatatgacagaggataaaattgggctgtttatgtcattaacactggcaggggatgtaatttgctcttacattcttacttggtatgcggattcctggggccgaagaagagtcctagtttatggttgtgcaatgatgttgttaagtgggttggttttcagttttagcgaaaatttcaccctcttgctagtatttgctatcttcggtgttatatcgccttcaagtgatgaagtcgggcctttcaaatctatagaagaggccatgattgcacatctgagtcctcataatgcaagaccagagatttatgctattcacgccttggttggaacaattggaagcgctctaggtgcaatagtttgtggtatatttgtagatcttttgaaaagaactggtttagctgctactgatttgcaatgttataaattagttttcttactgtatgccttcttcgccttttgcaaaatggtcatcatgctcttattatcagatgctacagaattggacgggcattatgaacatgcagattgcaatgaagaaacagctgaaccattggacgttaacgatgaaactgcaccattaatgagacaagcaactcacccagaagaaagatccaacaaactatctaaggagaccgtttcggttttgatgaaattgttagtaatcttcatggtcgactctctcgggtccgggtttatgacaagtggctggatggtttactactatagtaagcaatttttgatgggatctctggcgttgggtactttatttttcatcacgcaactggttatggcatcttccaccatcccatcatcaataattgccagatgttttggcccagtaagagccacactattggtccagattccatcagggatattttctattctcatccctatggccaagaattacttgcccttatctattttgtttttgaatctgcattttgcaacaactgccatggacgtcacaccaaggcaaattctattaacaaatatcatcaaaccaagagatttaaccaaagttatgggggtggtcaacattggaaagacatttgctcggtgtgttggtccaatattcacgggtatacttgctaacaataattatttatggctatgttacatcattagtgggtccttggtgataacggcggatctaatactggcatgcatgtttttaggagtggacgctaaaattaaaaagcaaatgaaccgccattaa

SEQ ID NO: 77401 - DNA, 1227 bp, Saccharomyces pastorianus
atgagtttagaggatacattagccaacatgtcattatatgacgccaagaaatattttcgtaaagctcaaaatgttgttttcaattatactgagatggaggggaaagttcgtgaagcgacaaacaacgagccttggggtgcctcatccactttaatggaccagatttctcaaggaacttacaatttcagggaaagagaagaaattttgtccatgatattcagaaggttcactgaaaaggcaggtagtgagtggaggcaaatttataaagccttgcaattgctcgattaccttatcaaacacggttctgaaaggtttatcgatgatacaaggaatagcattaacttaattaggattttagaaacttttcactatattgattcccagggaagagatcaaggaattaatgtcagaactagggtcaaagctttgattgaattattgagcgacgataataagatacgcgcagaaagaaaaaaggcaagagaaacagcaaagaagtacaagggcgttgctggaggatctgcctctgctgatggcagtttgaattcgaaggcaggtttcacgtcaacgaaagtgcacggcattagcgtgagtgctgatttcgatagtgacaatgaagataacgaagatggttcttttagtcaaaatggatataacgataatgcctcgagagccacatctactcctgggcaaggaaaacaagaaccagaggactttgttgactttttttctagtgagtcttcaaaaccatctaaagaactcatacaagaagatgaaaagaaggcggacgaagaagaggacgatgatgacgagttttcagaatttcaaagcgccgtccctgttaccaaccctgctaattcgtttaacttgctaaacacgagcccaattgggggtatgcccgccaccacgagttcaatgcctttttataacagctccactaccgaccaaggcaagatcaccccagctattgcggaacctaaaaaagtagatccttttagctctctcttttcaactgcaaaggcatctgcagaagcacctagtgctcctaaagcatcccaagcgaaagccgctgcctctaatcctgtatctaatagcacaactgcactaagtacagatcaagatgatgatgacgaatttggtgaaatgcatggcggagctgttcaacaagaacagaataccaataataaccatacatcatccaaagaaatcgatttactttccttttga

SEQ ID NO: 77402 - DNA, 1020 bp, Saccharomyces pastorianus
atgaatgaagatctattctacgatagattacatcagcggtgccctggaaaatacttgctagaagagttggaaacaagcaaatctaacgatgtcctgcatgcatcgagatttgtttgtgagatggaacttgtgcaaaagacgaatgcatattattgcaaaaccatagtcaagatgctcttagaccacgaatggattctcgcgaaggcattcacaattgtcaacgatggcgaagacgagatagagatatatgattatctctatgagaagtacataaaactattaagcacaggcaagccagacccgatgatgaaagacgtcgtgaggtacagatttgacgaggacgtaaagatcaaaattgaggaaacaccgaatttgatcagtgcggccagtactacaggtttcaggacatgggaagctgccttatacatgggtgatttccttattcataagcccttacaagagttggcaccggtacaaggacaagacgatggcaagaaaaaattaaatgttcttgaggtcggcgctggcacaggcatagtgagtctcgtcattttacaaaagtatcacgagttcgtaaataagatgtacgtcacggatggtgattcgaatctcgttgagacgcagctgaaaagaaattttgaattgaacaatgaagtgcgtgagaacgaaccagacatcaagttgcaaaggttatggtggggcagcgatagagttcctgaggatatagatttggtagtgggggcagatgttacgtatgacccaactatccttcctgatctatgcaagtgtctggccgaatgtcttgctttagaccgatgcaaactgtgtctcctatccgcgacaattagaagcgaatccactgtccaactgttttctcaagagtgcaataaactcgggctaaaatgtaccatagtcaccagcacagagtacgacgcaaacaacgagatccgcgcgatgaaagccctgcaattcaaacctttgattgcacccatacggatctacaagatcacgaaacaataa

SEQ ID NO: 77403 - DNA, 1920 bp, Saccharomyces pastorianus
atgatatctaggaccattggtgaatctattccgcccaacacaaaacatgctgtttccgtgtgtttgcccacatgggaagctacagtaggctatgaagagggtgaaagcagtataattaactcgcttactaccggatatccaagatttttcatacacaagtcaataaagaaattatgtgaaattttatccgctaagtactccatggaagatgaagcttgtctttgcttcccctcttacaaggttgccaataggtgcagagagtttatcaaagtgaaaacgggtctttctaccaaagtacgcatcttacaactatgtacacctaaacctatgaaccaagaggaaaagctctggagaagggaatgtaaaatcacggtggtgtttgtagaccaggaaatcttccccgtgatgaagcagtattggcaacattctggtgagattgtatctagcagaatggcggagtatattttacatgaattacaagtcaaggataatcttaagaagatggaaacagtggacaacggtaaaaaatttatgaccgaagatgaaaacagagtgaacgaagaatatatagaaacgagatttgggagaaatttaaattttcttgctgctgataaagccaaatatctaatacgaaagaggattgccacaaaagttgttgaaaaaattgactctgaaggtctatcggacctattctcttttgaacactataacgagaacaacggtccattcaatgttggcagtggagaggctctggatgatgatcagttgaattcggacatacctgccgaaacaattacttctatgggagaaagtggcgcaaacagtacttttgaaaacacagctaccgatgacttgaagtttcatgtcaaccctaatacggatgtttacttatttccaagtggaatggcgtccattttcactgcccacaggctgcttttaaacttcgatgccaagcgcttatcaaggtcttctaatagacaagataagttgattggatatggacctccgttcaagaagaccgtcatgtttggattcccatatacagatactttgagcattcttcggaagttcaatcacacacatttcttggggcagggagattcaacgtcaatgaacgctctgaaaaatattttacattctggtgagcaaatactggcggtatttatagaagctccatcgaacccactgttgaaaatgggagatttacaagaactgaaaaggctatcagacttgtattcattttacatagtggtcgatgaaactgtgggtggctttgtcaatatagatgtattaccgtatgccgatattgtttgtagttcgctaacgaaaatcttcagcggcgactcgaacgttattgcaggatccttagtactaaatcctagaggaaagatttatgagtttgctagaaaatttatgaagactgaagacggatatgaagattgcctatggtgcgaagatgcgttatgcctggaaagaaattcgagagacttcgtggaacgtacaatcaaggtgaatacaaacactgatatattgttaaaaaaggtgttattgcctcaggtgggaaaattgttcaagaaaatatattaccccagtttaacatcagaggataccaagcggaattatgacagcgttatgtctacaaaagatggtgggtatggaggtttattttcactaacttttttcaatattgaagaggcaaagaagtttttcaataatctggaattgtgcaaaggaccttctctcggtacgaatttcactttggcgtgtccatatgctattattgcccactaccaggaattagacgaggtagctcaatatggtgtcgaaacaaatcttgtaagagtgagcgtcggtttggaaaatagcgacgttttatgcaatgtttttcagcgtgccattgagaaagctttaggggaataa

SEQ ID NO: 77404 - DNA, 630 bp, Saccharomyces pastorianus
atggccgaaaatgagagaatgtacatctcctataataatattcacaagctttgtcagggagtggctaaacatatcttagctagaaacgaaagacctgatattattatcgccatcactggtggtggtatgatccccgcaagaattattaggtcctttttgaaaactaaaggacaaaagaatattccgattcaggccatcggcctatctttgtatgaagatttagggttggataatagcgtcgaaactatcggcaaagaggtcatcagaacacaatggctggacttcggtgctttgaaccaacatttcgattccttaattggtaaaaaggtcctaattgtggatgaagttgacgatactagaactaccctccactatgctgtttctgagctggaaaaagagattgctgaacaacaaaaggttttgaatagaatgagtgaggaaaccgttatttctatctttgttctacataataaggacaaaccaaagagagctggactacctgactccatgatgaattctggacgttacattgctgcgcaaactgtccctgataagtggttgtgttatccatgggacgctgaagatatcgaagaacataccatgctcgctaaagctcaaggtcatgactga

SEQ ID NO: 77405 - DNA, 2124 bp, Saccharomyces pastorianus
atgagtaaaaaattatcgttggaagagagactctccttggcaactaagaaaggaagaaagaaaaataaaaggtcaacgtcaaatttgtcgtctccatcgcctgtggtcctgtcaaacaatgaacaagaaagtgctcgtacatctattgatgatgcggctgccggtgtggtgtcaattgacaatgctgaaaacatagatgatcctgcggtacgatcagaaagcactgtggaaggcgatacaggtaaggcagattcaattgctgtcgatgacgtggtgcatcccgatcacaataggactgattgcttcgacgatactacggtatcactgcctacatggctacccaaaaattacactgaatttactgttgaagaattagtcaaagaaattagtcctgaatatttaagattaaacaaacagattgatgacctaactaacgaactaagcagaaaatcacaaatcgaaaccacggattctatttttttcaaattgattaaagagaaggacgacttgatagatcagctgagaaaagaaggagctaaattagcggaaactgagctgaggcaatctaatcaaatcaaagctttaagaacaaaagtgaaagacttagagtatgaggtatctgaactaaacgatagttctgctcagagtgtcgaaaactataatgagcttcaatcattgtatcacaacatacaaggacaactggctgaagctacaaataaattaaaggatgcagataaacaaaaagagtcacttgaaacattagagaaaaatataaaggaaaaagatgatttgataacaattttacagcaatctttagataatatgagaacattgcttgaaaaagaaaaaagtgaatttcaaacggaaaagaaagcactacaagaagcaacagttgatcaagttaccactctagagactaaactagaacaactaagaatagaattagatagctctactcaaaatttagacgctaaatcaaatagagattttgtcgatgaccaacaaagttatgaagaaaaacaacacgcatctttccaatacaatcggctcaaagaacagcttgagtcatcaaaggccaactgggatagtattgaatacgctttgaacactaaaattgtgaacttggaaaaccgctttgaatctataatgaaagaaaaaaatgatattgaagaaaaatatcaaactgccttacgttcttctgaaacattaggtaagcaattagaaaaagaaaaagagaatcattcgaaggcagttttggaagtgaaagacttggagagacgggtggagacattgaagtcatcattgcaaagtataagtgatgattataatctactgaagaagaagtacgaaattcaaaggtctcagttggaacaaaaagagaacgaactaaaaccacatcaagaaaacagcaatgagaaaattatagataaaatacctgtagaattaacagatagtttaaactccatggagggaaatatagaagacgaatggactttacctcaagaaaattctatgctgtcattatcaatgtcaaaacttggcgaattaggaagcgatccgtctctaaaacccatttacaatgaatctcacgaaaccatatgtagcgaagaaagccaacattttgatagaaaaaatgtggatttcagcattgacgatattccagaagaggccgctgctttacaagcaatcagggaaggggaatcaatgaagtcgttaaacaacacatcaataccatacagaagagctagcgtccagctatcgaattctaacggccacataagcgctcatctggtgaacaagttaagtacggagttaaaaagattggaaggtgaattatcagcatcaaaggaattatacgataatttactgaaagaaaagacaaaagcaaatgatgagatcttaagacttctggaagaaaacgataaattcaatgaggtaaataaacagaaagatgatctcttaaaaagagttgagcagatgcaaagtaaattggaaacctccttacaactattaggtgaaaagactgaacaagtggaggaattagaaaatgatgtgtccgatttaaaagagatgatgcatcaacaagttcaacaaatggtagaaatgcaaggaaaaatgagataa

SEQ ID NO: 77406 - DNA, 720 bp, Saccharomyces pastorianus
atggatgttgaaaaggatgtcctggatgtctacataaagaacctggagaaccagatcggaaacaaacgatatttcttgaagcaagctcaaggtgccatcgatgagatcacgaagagatctctggatacagagggtaaaccggtcaattctgaggtctttacagagttattaagaaaacccatgttcttttcagagagagctgatcctattggtttcagtttgacatcgaattttttgtctttgagagcccaaagttccagtgaatggctctcgcttatgaatgatcaatcaattgatcaaaaggccatgttattgttacagaataatattaatagtgacttgaaagagctgctacgaaaactgcagcatcaaatgaccattatggacagtaagaagcaagatcacgcccatattagaacacgaaaagccagaaataaagagctttgggactcactggcggactttctcaagggttatctagtaccgaatttggatgataatgatgaatcaatagatagcttaacgaacgaagtcatgctgttaatgaaaagactaattgagcatgatttgaatctgacattaaacgatttttcatctaaaacgataccaatatacagattattacttagggctaatataataacagtaattgagggctctacaaatccagggactaaatacatcaaactaatagatttcaatgagaccagtctaacttaa

SEQ ID NO: 77407 - DNA, 264 bp, Saccharomyces pastorianus
atgtcttctctatcaacgtctgatttggcttcccttgacgacacttccaaaaaggaaattgctactttcttggagggagagaactccaaacaaaaagtccagatgtcaatccatcagttcactaatatatgcttcaaaaaatgtgttgagtctgtcaatgattctaatttaagttcgcaagaagagcaatgtttgtctaactgtgtgaatcggtttttggatactaatatcaggattgtgaacgggttgcaaaacacccgttaa

SEQ ID NO: 77408 - DNA, 4755 bp, Saccharomyces pastorianus
atgttcgctaaattgcatgggaagaaacaaagaccaatttcttccatcaattcacaaactccaaggactagcaatactactcacgcaaatagcatatccttatcatcgggtaatttgatagtaggttccaatagaaatttaagacaaaagaaagagcagtttggttctcaacaaagggcttccggcagaaacctgatttcaaataaggaaaatgacgacaacgtcaacaatggtggtgacaacaattatgacaatggggaacgggtccatcgccatcatattccaggactgaaaataaaggcgtatcaagctgaattaggctatcatgagtcccgattttccgagaatttagtgatgctaaatctagttgagttcccggatataaaacctggtgatttggtagaattgaaaacatatcacaaaaatccatctgcatcgaacggagataagaaaatttattttattgcaaaagattttgacggagagactaaaagaagggcaaaaacatctaatgtttcaatactttcgggtcaactgcaaactttgttagatttgccttctaggtctaggatatggataaaattgaagccaaacaaatttgacttacaggcagatgtggtagagtttaatatcaaagattgtctactaaatagaggtgatatgtgggttctatcatctaagctggtagatacatgtgtgtttatggatcaaagactggcattcttagactctatcagaggtactattaagggaatttatcgaaatggtaagaagattgtttctggatatattggcgaacaaacaaggataatttttcggtccgaatctgccagattaatttttttgattcaaataactgatgaaatgtggaacttcgaagaaactggtgaacaattatttcaaaagatggttaattcatttttcccgaagatcttcaaaaaatggaaagatgtggacacccaccatactatcactatagccttcgctatatcaatggacttgtctgatacatcattcaaggacttaacacccggcgaatctttgaaaaattcacaggattattttaggatagttgtagatcaagtcagtattatccattgggttgatattatggaaacattaagagaagaatttatggaaatcagaaaagatttattaaacaagcaaacggataagggttacagtgtagcgaatggaagattttcacctgtaatcaagtcgaattttctcgaattggtcaattttgccacgacaattttaacggatcctttcaagcaattagatcttcgacacaccacaacgcacgtcatgattatttcaccagggtctggattatttgacgttgattatagtttattaaggctaacaggaaaaaaactactctctcttgaaatgacgatggatttaatatgtctctcaaaagctccattgcacatagttccactttttaggtaccgagactttgagaacaagcttcatcattgtgtaccgctttggttaagtgttttcttttggaatgatcatgacaaaaagagtaactcagaatggactccaagatgtaaaatttatgacttacaaatgatggggattactgaaaatgagttaattcgggaagtggatgttgaatatttacagctgaacaagaaagtcaaatcactatccgagtttatgaatgattacgacaaaaatgccttcgaggtgaaaattttatgcgctggctctaatacgaaacaatctaagaaattaaattcaaagtttgataccgtcttcgagaatgatgttgttgtgaaggcaaggaaaatcccggcaacagcaacaacaacacacggtaacacaaaattcatatggagaggtccaaaagttgctatcccagccattaaggatattcaaaaaccaaacgtaataccagatctatcaataaaaacaatagaagcctctttttatgatgattgtaatactacaaatgataaaattagcactcccaccacttctaacaatgacaatctcgaaatgaatgactcattggtctctgtgagatctgctgataaccaaaacacatctttggcgctggattcgctcaaaggactaagcaaaaggaactcattgaaagattttactcaaagagtaattacaaaatttatttcgaacatagacacaagtaaaaataaagaaataaagtcaacattactcagagatgatgtggataactcacctttaggttcaaatacaccactaccatcttctgaaagtaaaataagtggcctgaaattacaacaaaaaggtctggcagatgaaaacgttatcagtaaacgtggaaatttgataatcaagaaaaacctatccatttttgggctacctagtaatgaaatcatgagtggttcaccctcctcatatttaggctcatcacataccagaacatcctctaaactttctaatatgtcagacaaggctgctttcattacagaagggcaaaaatcaaaacatgatgactcgaacacttatagcctcacacagcaattgaaacatcgtataagtgaaacttgggtggatattaaaagtccttccattccggtaagtagtgaatttgccaacgaattattgcctatacgttggaaagatgtatggccaaaatatgtggccagaaaatatagtaaatggaggtcttttacaaccccagcagagttaccaatcacaatttctgattttccatccaaggatgattttgataggaacttcatcttcagaaatcactcagtgactttaaacacagatcaagaacaatataatcagacatacaaagacttacttcgtgatatgatttatatgcgactgttaactggttttcaaatctgcgtgggccgacaagtagaaaaaatagaactttctagggaaagtggtgaaagtgaaactgtagtcaacaagtatttagatttcaatcaaaatgatgcgttcaaactttatctaatgatcgactctgaaatacacagaataacatgctcgtcaagtggaattattgatgtggagaggtatttgagaaaagatgaagcaaacttgtttgatcaggttcctagttatattccgttggttaaaacgagatacgagagctcatttcgtgatgctatgattgacccacttcatgttaaaagagaatctttgaactggaatcaaattgatcaggttctagcaggttatggcgataacttaatagataggaaatggcacggatttcgagctaaatatgtggtgttaccaacagatatccctcccaacacatattctatggttatcaatggtaaaagcgaaactttaaacccagaagaaatcagagtcgagggtttgagaagattaattggctcaataacgaggtcaagactaagaacagagaaagaaaaaaaaggaagaaaaactaagagagaagaaatacagcctgaagttatgttttacaccggcccgctttacaacttcattaatgagcaacaaacatctttagaaagctcggctataaattttaaagattcaatttttgttaatgataataaccttttaaacagaaatgtagaactatccaagttggcgtatcaaattcaacgtggcgaagatcgcattactttagtcaacagaaaatggcactggaaaaagcacgaaaagtgttttgttggctcggagatggttaattggctcataagaaacttctctgatatagatactcgagaagatgcgattaaatatgggcagaaggtgatgaaagagggattatttgttcacgttttaaataagcacaattttttggacgggcactacttttaccagttctcacctgaatacgtaatggacactaataaactagaaaaaacaaactcccatcgctctacattatccgatccaaagcagatgttgagaaaagcatccactggtagctcaaacgatccaagcgctatgactcctttttcttcagtagtacccgctataagcgcttcgaatgcttcagttgctgacgccaaagagccatcacgccctattttaatgctgagtaactctcttgttatcgatgttgatcccgcgggaaaatcctcgaaacaagaatcgtgtacagtccattatgacagagttcataaccccgaccactgttttcacataagattggaatggttgactaccaccccaaaattgatcgatgatttggttgggaactggtcaaggttatgcgaaaggtacggtttgaaaatgattgaaattccttgggaagaactttgtactatcccttcggtcaatccatttcactcttttgtggaaattaagttagctatcaatccttgggaagatcctgagtttaaggatagggagcttttcgctaaaagcaaattctactaccacgtttatcttttaaaggcatctgggtttttattagacaatagggcatccaaatttttacaaaatcaagatatagagtttgacatcatgtattcatggggcaaaccacagttcaaatatgttcaatatattcatcatacgggtgcttacgttgcggaattgagggaaaatggctgcctatttttagctcctaacaacatttatatatccagagtgaatccgggaaacataatcgggaaaattcattctgcttcaagctcttcattagatgctcaaaaagtgatcctaaatttcaaatcaacttgcttggactatcagaagttaaggtcaattttccttgacgcaaaggaaatgtggattacaggaaagattgtagaagattga

SEQ ID NO: 77409 - DNA, 1080 bp, Saccharomyces pastorianus
atgagcactgaagttgttaatgttgccgttatcggtgccggtgttgttggttcagctttcttggatcaattgttagccatgaagtctaccattacttacaatctagttcttttggctgaagctgagcgttctttaatctccaaggacttttctccattaaatgttggttctgattggaaggctgctttagcagcctccactactaaaacgttgcctttggatgatttaattgctcatttgaagacttcacctaagccagtcattttggttgataacacttccagcgcttacattgctggtttttacactaagtttgtcgaaaatggtatttccattgctactccaaacaagaaggccttttcctctgatttggctacctggaaggctcttttctcaaacaagccaactaacggttttgtctatcatgaagctaccgtcggtgctggtttgcctatcatcagtttcttaagagaaattattcaaaccggtgacgaagttgaaaaaattgaaggtatcttctctggtactctatcttatattttcaacgagttctccactagtcaagctaacaacgtcaaattctctgatgttgtcaaagttgctaaaaaattgggttatactgaaccagatccaagagatgatttgaatgggttggatgttgctagaaaggttaccattgttggtaggatatctggtgtggaagttgaatctccaacttccttccctgtccagtctttgattccaaaaccattggaatctgtcaagtctgctgatgaattcttggaaaaattatctgattacgataaagatttgactcaattgaagaaggaagctgccactgaaaataaggtattgagattcattggtaaagtcgatgttgccaccaaatctgtgtctgtaggaattgaaaagtacgattactcacacccatttgcatcattgaagggatcagataacgttatttccatcaagactaagcgttacaccaatcctgttgtcattcaaggtgccggtgccggtgctgccgttactgccgctggtgttttgggtgatgttatcaagattgctcaaagactttag

SEQ ID NO: 77410 - DNA, 4950 bp, Saccharomyces pastorianus
atgtctatgttcaatgccctcaattcaaacatcgaaggtgaacaatatgaagcagaggagcattcaagagagcttcaaatagaacagagttttaatattttgcaggacgctctgattgatctaaaaaacaaggacttcgaaaagtcggacagcaaattccaagagctcttccagattgatgtcgtcaagcctgataggtggggcatgtatcgcaattcttctcctacgctagataacctgcgatatctatgttataggaacagagggatgtactatcatctgtatttggagaataactatgaaaggttgaactcacaagaactagttaattgtattttaaaagcagttgagaacttggttgagtctattcaacatagcgatgctgattttgcagttacagatttgctggctcgcatcttcaagagctttaatagtgtcaagttggaacgtttaatatcagaatatgaattcactaagcaagaaaatctttcacttttgttggggcgacatcgtaaatttcttttgaacgatttgactctgatgatgaataactacgtagaactcacgaacaaactattagtccccaacttatcggataacacaatctttgagagatatcatttggagaagtacaaagatattaagccggaaccactagcttttggtccaattctttctagaatatcagaaatgaaaaagcaagatgaggaaataatgaaaaagctggacgtgtttaatgtcactttgaatgaagaatcatgggatgaagttgcgaaggctttgaaaaacttactacccagcgttaaaacatcgtctcttattggaaggaatatggatccgtataacgaaattgaagaacctattgaagcggttaagtttgaactatcggaagcaattaataatacaccatctttagatagagagtctgagcgacaagaagaagagcaagataaggagagtgtacgagcagatgataagagtgggaatttagctccatcggatatccaaactaatgaagaagcaaggcctaacaagagaactgatgaacatatcgatagcacgaagcctcttcaaagaagtagtaaacgctttaaagaaagagaacaagaaaactcaaaagagcttgttatggacgttcataaaagattttttggtgagttcaacacgttgttgtcatatattcacattctacccttttgcgattttgacacatttgcctccaaatttatcattggctccagtgacaaacaacctgaaaaatttattccctatactgatctctatgaatgtttgaaatcttggagtagtagatatactgatatttttaaccaaaatgactacttgtccagtggttctaacgaaaatgaggaattattccaactaaatgcgctcctgaaatccaatgcatttgatgataaggagagctttcctagatatttaaatgatttggactcggatcacatcagatcttttatttccgaagtgaatgcaggcaatcttcacttccatcaagtgcgtttgaaattattattcacattgcttggaacttacgatgaaggaaacggaaggcgtctcattatagactacctttgggagtctcagcttctaaaaattgttttatggtttgtatttggaatcgaatcgacacatttttggcgcatattaacaacaaacaaagggcaatgcaaatatttggctttatcgatttacgaacttcttgttaaccatttagggaatattgtggaggaaatcacaaataaacggattcaaggacataagtcagcagacctaaaaagtcaaagaaataaagtcgagaaaagaataaggtcgtggcatactctgttagaacaaattgctgacgaaaaagataaagaactgtatgtacattttcaatggacgcattactgcttcttgcaatatacatgtgatatagtcgatagcagactctctgaaactttgacgtctttagaaaatactataaaggattcagattcttctttagacattgcctatccgaattaccgtcatataccggcactaaacctaaacacagttcaatcccagaaaaggaaaataagaataatacaaaacataacagtcgaagatatatctgaagacacgaactctgacactcattcagaaaatcatctagagacactagaaaaagtccttttacatatattacacccttcgactaatcattcaaatattgatgaggagatggtttcctttattttcaactcaccatttttattgaaaattagactttggggcgttctcttttcgtcatatgtcaaaaaatccagtatacaggatgttcaaagaatttatttccacgtacttgattttatgaagggcgcattgacgtcacctgtctacaaagaatcgaacccacacggaaggcaccaaatgttattaacagtgttgacagcaattggctatttctcaagccaactgacagcgatactaaattcaaataggtgggaaagcagcgattttgtcttggaggactgtatgtttgaagagctgctgcaaacattcttcttcttttatactgtccttttctatgaaagctctgcagttaacgacgtttctaataagtcttttttcaaaagagcatcgaaatcatcagggaaaatgaaggatataatgatagatttagcgacgttgatactttattattatgatttacaagcaaagctcaggacacctgctgaacaaggtattgaaacaacggaactaatttggtccttacacactctttttggacatttccatttttgtgatgcatcaaatggaaagttcctagatttagctgaaaaactattgtgccaattcattaataatgattcttttttacaattgaagcaaatactgtggtgtagatatcactacacgatagctagtgataacttcagtcctgatctgcatgatacaaaagcggtagagatggaaaagatacactctttgcctttaggtacatatctaatcaaattacagtatcaaaataagaacccttacctgtcgtcgtcaaagactaccctaaaacagataatggataatattatagaaaaaattggcgacccatcaacgctggacaatcatatcatatctagaaactcatttctattaaatgaatatttatcaaggccaatcacggcagacttgttgaagcatacattttctggtgcaacaagtttgtatttaacttctccaaacgacgagttacagcaaggcatgacagccggcttgttctacgtatccagcttacagtccctgggtttgtataaaatgagaaagaagtctatgcaagcaagaccttctgaattagactccattattagaatgttaaagaatgacattatatacaacacaaaccgtttcgaaagttggatattactcggaaagtgttacagttatattgttgaagatgatttaatatggacctcagataagatcactgtccctgagaaaaaagatgttattgctttgactcaaagaaaggcaatattgtgttatttaatggccatttccatatattatagtaagttggatcgaactattgacgataaaaagattatattggaggcattggatgacttaggatctatgctgatcagcggctactataatcctatgaataagctttgttttagctggaaaagcagtgctgagaatacaatgagattgtctgaaaccggtgaagtagtaatggaaaaaactaagaaaatcaccacaatctcagactttaacatcgagcaaagtatatttttatgttttaatagggcttgttctttatccggcgatatcaagtcacaggacgatgtattcgtgttgaattggtctagtttttacaatctggccaagttctttttcaaaacagatggtggtaataattgtaaattagttgccaaatatattactcagagttgccaaatagcttatgagtcatcacctgctaaagatccgatcatagaaccccattatctgttagttaatgcttgttacaagtgggtaagaagaggcgtcataggtgttaacgaagctctgatcttactgtctaaagataaccaattcttccaggaacaagaggaattttgggtcaacgacgaaggtcttgcatgggattatcaagaaaaattcttttttgacaaaatcataagactacttcgccatttactatctgttgataaaaaaaaatggcagcacagacctcgttacagaatagcgcgcatattgtttgacgatttgggtgatgtgaacggcgctttggaggagatggatagcttaatatccgcaaaaagtataaacaaaaacttggtcaatatatggaaaccagattttgaaaggccagggaaacatttcatctatacttaccagtacctggttttgtatttggatttactcttcgcaataaaagacttcaatacaacaggtcttgttataaaaaagctaaggcgatttggttctggaactgtgaacgtaaacgaactattagagcgtgccattaatgtgtacacgcaaagtgccaaaatcaagctgcaattgcaggacaagagctacgtggagcaaatccttccaaccttgaactaccaagaatttctgaagattagtgagcaactgaaccaagttttcgaccaaggaaagtaccctgaagaaatatcttccgggttaaaacttgctttccagttgaaaaagggacatagcggaattgcatttgacagcgtttgcttgggaatttatttcgagtatctctattttcctctagctcgacaggatcaatccctcacagacgtgaacgatgaaaacaatccagcactaccgtcatcaggttctgtgacatcaaaaagcactccagaccctacttctaagccaagtgcaattaagaaacgtgttacaaagaaggaagtcttcgatagagtgaggctattagtggataagatcacgtga

SEQ ID NO: 77411 - DNA, 1029 bp, Saccharomyces pastorianus
atgaaggtcgagaaatcatctaaaggcttggaagttttagtgaggacacaggaggatgatctagaagggttctctttcctggagattatggaccgcgtagaccctttaccattagacttcgagaattacaaaaatttcaaagagggcatttactatatgtgtacacacgatggcacaaagatcggtttcgtgttgaaatttgcgataaatgaaatggagactgtttgctcggaaatcttcgaagaaaccttccaattagatgaatctagacatgagttaaggtttaaaagtgaagattttgatcatagaaacaatctaattgaccaattggctcgtaaaatgtatctagaatcatccttgagtggtgtgaagggctggagaaacgagaaatatgccgtttgggttaataaaaaaccctatgtactggttgagcgtgcagtagcaggtgttcttggtataattacctacgggattcatattaatggttatgtgctagatccaaagtcaaaaaaaattcagttttgggttccaagaagatctaaaacgaaacaaacatggccgctaatgcttgacaacattatcgccgggggattaggttatccttatggtatctatgaaacagttttgaaagaaagcatggaggaagccaatctagaaaagagtgttattgaggataacattaaagcaactggttcagtttcctacctttactttacgggtgatatttctgtaacgaagtttaataaggaatcagattttatcgtaggggaagtacaatatgtgtacgatctaaaactcagcgaagacatcattccaaaaccaaacgatggtgaagtcgagagtttcaatttattcagcctgcaagagacgattaatgctttaagaaataaagagttcaaaccaaattgtgcattggtaatggtagatttcttgattagacatggctacatcactccagaaaatgagcccaattatcttgaactagtaactagaatgcacagaaggttaccattccccaccttgaattaa

SEQ ID NO: 77412 - DNA, 810 bp, Saccharomyces pastorianus
atgaaaagcattttcaaggttagaggatgtgtatcgcatgctgctcaattttgccaaaaaagaaccgtggtgagtaccggcactagtaacaccgcaacagccggtgcagtgaggaaaagtttcaacagtaccgaaaccaagcctgtatttgcaacaaaatcggaagctggcaatggaagccacatgaaggaatattcaagcggcattaactctaaactcggcgggacccctttggaaacccgcagcaccgccgatgattctttgaacaatagttataagcaagtcaagggagacattgactggtatacttcatggtatggcctaggtatgaagccctttgaagcaaaagtgcaaaaggaactaatcgagcctctggaccctaaggatatagaaatcaagccagatggtttgatatacttgcctgaaattaaataccgtagaatattgaacaaagcttttggcgcaggcggttgggggctagtgccaagatcacaaacaatagtgacatccaagctggtcactagggagtacggtcttatttgccatggtcaattgatcagtgtggcaagaggcgaacaagactatttcaacgaagccggcataccaactgctacagaaggttgcaaaagtaatgcattaatgaggtgttgcaaagatctcggcgtcggttctgaattatgggaccctgttttcataaagaaattcaaagtggatcattgtactgagaagtttgtggaacatgttaccaccaagagaaagaagaaaatttggttaagaaaggacagacaagttgaatatccttataaatag

SEQ ID NO: 77413 - DNA, 354 bp, Saccharomyces pastorianus
atgaaagttggaaaagccaaaaagaaaccggaaatcttctctgcgcattgttctgtggccacggccttcctggacccgtccttcttttacccgaactttgtcgcccaaaaggcatctcattataatgacaaaactggatctgcaaatatttggacatatatctccagaacgggctcacttctcctcttcacccaggtggtatataggaagagtaagtggacgcatcagtccgcgacatttgcggactgtatatattgccagtcagggcagtcgccaagtgtgtctctttcgtgtagcgacgcacgtcagacatggatgcaacatcgaggatggagcagcctgatgtctttgtaa

SEQ ID NO: 77414 - DNA, 1077 bp, Saccharomyces pastorianus
atggatgcaacatcgaggatggagcagcctgatgtctttgtaagcaaactctaccacctgctgcaggggaacgcttactcgaacataatacaatggtcgactgatggcagcaagttcgtcatttggaatccggaccagttcaccaaagtcatcctagagcgattttttggtattcacacctttgcagcattcgttaagcaattgagcaaatataacttccagaaggcggaacgcccggactgcgtggagttttccaacattcattttcaaaaagataacattaatagcctctcactggttaaaactcatcagtctgccgccactcccaatgtcgccgccatcaataatatgaataagcagtgtacttttcactgggaccctttcaaagtgaactccattctaagcaaggccatcggcaagccttccttcgagaaattagtgaaaaatgttgacaggcttcagggcaatcttgatgagcttaagtcgacaaacgcagatagtctgcgtattataagggaaattaacgccagcttacagacaatctcctaccaccagtttcacgcctaccaaaccgctaacttccttcaagaaaattttgaagccatcaaaaaggttgtatgcccggactcttgtctacaacaccagcaacgccaaccaaagcgccccaaacgctactcgttgctgttactaataccaaacgcatccgaattgtcagaaacacctttgatgcgcttcgccggcgtgttcgaatttatgaactgctctttggatacggccactcagcggcacccgcagttgcatctcgaggcatacgaccttcttttcgtcaccgtgtcgcccaacatgcaacaagaacatctcatctacttcaagagactgagaaacctactcccaagctttcctgtaatagccattattaacagacccgtctcccctcaagataccagcattgctccctccaactactctcgctattatttccaccattttttgcagttggggttcagtgacatcctagttagccccttcaccccaacacaacttataacgctcctttccaaacatcttcgaacgtga

SEQ ID NO: 77415 - DNA, 1131 bp, Saccharomyces pastorianus
atgaccttggcacccctagacgcctccaaagttaagataactaccacacaacatgcatctaagccaaaaccgaacagtgagttagtgtttggcaagagcttcaccgaccacatgttaactgcggaatggacagctgaaaaagggtggggtaccccagagattaaaccttatcaaaatctgtctttagacccttccgcggtggttttccattatgcttttgagctattcgaagggatgaaggcttacagaacggtggacaacaaaattacaatgtttcgtccagatatgaatatgaagcgcatgaataagtctgctcagagaatctgtttgccaacgttcgacccagaagagttgattaccctaattgggaaactgatccagcaagataagtacttagttcctgaaggaaaaggttactctttatatatcaggcctacattaatcggcactacggccggtttaggggtttccacgcctgatagagccttgctatatgtcatttgctgccctgtgggtccttattacaaaactggatttaaggcggtcagactggaagccactgattatgccacaagagcttggccaggaggctgtggtgacaagaaactaggtgcaaactacgccccctgcgtcctgccacaattgcaagctgcttcaaggggttaccaacaaaatttatggctatttggtccaaataacaacattactgaagtcggcaccatgaatgcttttttcgtgtttaaagatagtaaaacgggcaagaaggaactagttactgctccactagacggtaccattttggaaggtgttactagggattccattttaaatcttgctaaagaaagactcgaaccaagtgaatggaccattagtgaacgctacttcactataggcgaagttactgagagatccaagaacggtgaactacttgaagcctttggttctggtactgctgtgattgtttctcccattaaggaaatcggctggaaaggcgaacaaattaatattccgttgttgcccggcgaacaaaccggtccattggccaaagaagttgcacaatggattaatggaatccaatatggcgagactgagcatggcaattggtcaagggttgttactgatttgaactga

SEQ ID NO: 77416 - DNA, 1215 bp, Saccharomyces pastorianus
atgtactttttaaaccaactaatatttcaagacgtttccgtaatgttggtggataaaagagaagatatgagcagatctttccaaaaatgtttaaacttgaaataccctatcatccaggcccctatggcgggggtcacgactattgaaatggccgctaaggcttgtattgcgggcgccatagcttcactacccctatcccacttagacttcagaaaggtcaatgatattgaaaagcttaaactgatggtttcacaattcagagatcaagtagccgatgaatctttagagggcaatctcaacctaaactttttttgccatgatatcgttgataaaccgaccgatcttcaaacagctaactgggcgaagctatacagaaagtctatgaatgtgccgattgatatgaatgagattaaattcgataatggtaatgtatcttttaaggcatttgaaaaagaaaatgctcttcaagattttttccagtacctatcagatggctttaggcctaaaatcattagtttccattttggccatccgtcgaaatctacaatagaatatttacaaaaaattggaattctaatttttgtgactgccacctctgtaagagaagttcgattgttagcacgtctcggcattaatggcatagtgtgtcaaggctatgaagcgggaggacatagaggaaatttcttagtaaatgaccccaaagatgatgaaaacttatcaactgtacaattggtgaaaagaacagttgatgaacttgctgaaatgaaaaataaaggtcttatacatgctactccctttgtcattgcagcaggtggtataatggattccaaagatatatcatacatgttatcacagcaagcagacgctgttcaagtggggactgcttttcttggttgcagtgaatccaatgcatcaaaaaacttttcaagccccttcactcgagaaacaacaactaaaatggttaatataatatcaggaaagcctgcaaggaccatctctactccttttatcgaaaaagtcattgctaattttcaaggtgaggagcttcctccatatggctacatgtatagtgctttcaagcaagtaagaaaaaagtatccagaattggctaactttattttagctggacaaggatttcagaacgtccaatcaggaatcaccacagacaaaaaaattgaaactatggggggaagattgaaaattgacggaaaataa

SEQ ID NO: 77417 - DNA, 885 bp, Saccharomyces pastorianus
atgtctagaattagtatattagctgtcgccgcagcattagtggcaagtgcaaccgccgcatccgtgaccaccactctatccccttatgatgaaagggtcaatttgattgaattggctgtttacgtttctgatattggcgcccatttatctgaatattacgctttccaggctttgcataagactgaaacatacccacctgaaattgccaaggctgtttttgccggtggcgatttcaccaccatgttgactggtatttcaggtgatgaagtgaccagaatgatcaccggtgtgccatggtactctactagattgatgggtgctatttccgaagcacttgcgaatgaaggtattgctactgcagtaccagcttctaccacagaggcttcttccacctccacttcagaagcttctagcgccgccactgagtcttctagctcctctgaaagttcagcagagaccagctcaaacgctgcttccacccaagctactgtttcatctgaatctagctctgctgtaagcaccattgcaagttctgctgaaagttctgttgcaagctctgttgcaagctctgctagttttgccaataccacagctccagtttcttctacatcttctatctcagtcactccagtggtccaaaatggtactgacagcaccgtcacaaagactcaagcttccactgttgaaactaccataactagttgttcaaataacgtctgttcaactgtgactaagccagtctcctccaaggctcaatctacagccacttctgtcacatcgtcagcatctcgtgttattgacgttaccactaacggtgctaacaagttcaataacggtgttttcggtgccgccgctattgctggtgccgccgctctattgttatag

SEQ ID NO: 77418 - DNA, 2118 bp, Saccharomyces pastorianus
atgaagaatacggaacttagtcaaaaaaaaaaattagataggcagagtagaagaaagcctgcaaagtcgtgccacttttgtagagtaagaaagctcaagtgcgatcgagtaagaccgttctgtggaagttgctcttctcgaaatcgaaagcaatgtgaatataaagaaaacacttccgccatggagaaccaactcaggaaaaaatacaggagatgttcaaaattagagatggctcgtcgtattgaagagcttgaatctcagctaacaaaacaatcccagcctaacattcacgaaggacaaaaccctctttccaacatgagatatttatcttcaaagcacaataggcacattctttatggaccaacgtcgtatcgagcaatattagcaactcaaacagatacttttgccaaatacagagaggagatatggcaagtcctaaaactcagccgtaacaactggaaaagagagcatcattactcaacactctcggagattagttccattgagactgccccaccgcactcaggctcacccagtgttatagaatacttatgtgaatcgcttccaaattatgaagttttgtgtgagtatttaactgatttttttgctagcgatttttacgatagttaccaaattgttcataaagaaaaagtattaagggatctgcaagattgttttgttaaaggcccaagaagtcataaaactggtcagcacacaataatttcccttaatctggacagtaaaaaaaattattataaagtgggtgttatgacagccattatgtgcttagaatcccatccaaaagaagtgccagaggctattgaagtcttccataaagttttaacgtcttttgtttcggctaaagttttttatactgagcgtgtgcaatttttatttttacgttacctgtacataaatgtggcgggtcttgacgggggcgatcagtcacattgcatatttattcatggtctgacaattgacacagctatccatatgggccttaatgaagatcttcgtcgtttatatctgagtaaaaatcatccaatagaggaaataccttacttggagagattgtggttatggatcttattcacggacgttaaaatttcactctctacaggaattccggtccgaatcaacgacgattttgtaaacaaggtacgtctagaaaactattcttcatcgggggacatccttctgtataaaacaacattaagactgagaaatattatgaaacaaattcatgctcgtgagaaaccgcctgacattccactcatcatcgaggacttaaaaaagttcaccattaaaatgtttaagccgttggatttttacttaaatgcatctaatttaaatggtaatgagttcaccgaacttcaattatggcatgcaactctccatatgataggaagtttatccaatctttataccttaacacatcaagattttgatgcgagaatattcaattttagcgtcctggctccactaaattcattacatttgtgctttaatgtccttgagacctattttgaattagacaacagcaaattatcttctaagtcattatgcctctccaaaaaatggccccatttaaacaatgcgttgtttcttatttatgtgaacgctttcagagcattaattcaaatttataccatatttctacagtatatggaaaataaagatatccaattattcatccagagaaattcgtccgcactaacttatcctatatgtcctggagactttgagggtccacacaataagtgtatttcactgaaaattgcatttaaagaaatggaaaacatatttgatcatattcaccaagaaaagttgaaacctcttactcaaatttggcaaaactcctattacttttctattattatatcaatggaaaaaataggaagaagagcttttaacaaaggaatgagaaatatcgatgaagggcctgaaaccgaaaatgatgcaactgaaaacagtttaacatccatactaaatgatttagagggacctttagaagatttctcagaaaatttcatcgatgatatattaggttctccaagtgccttctttgatacagctatttccgggtggagtaattttgaggacttcttttccagatag

SEQ ID NO: 77419 - DNA, 1422 bp, Saccharomyces pastorianus
atgtccgaagaacggcatgaagatcatcatagggatgttgaaaataaattgaatttaaatggtaaagacgatattaacgggaatacctcaatctcgatcgaggtgcctgatggaggatatgggtggtttattcttcttgcttttattctgtacaacttttctacttggggggcaaattctggttatgctatttatttagcgcattatttagagaataatacttttgctggtgggagtaaattagactatgcttctataggtgggttagcattcagttgtggacttttttttgccccagttataacatggctttatcatatattttcaattcaattcattataggcttagggatactgtttcaaggggcagcgctactgcttgcagctttttctgtcacactctgggaaatttatctcacgcaaggcgttttaattggattcggtttagcatttattttcatacccagtgtcacactcatcccgctatggttcagaaataaaagatctttagcctctggtataggaactgctggaagcgggttaggtggtattgtctttaacttgggaatgcaaagtattctacaaaagaggggcgttaaatgggcgctcattgctcagtgcataatatgcacatcacttagcaccattgcgcttatgttgaccagaacaacacatcaaggcctacgtcaacataagagatcttacaaatttgaattgctagattatgatgtgctttcaaatttcgcggtctggttactttttggatttgtatcatttgctatgttaggatatgttgtccttttgtattccttgtctgattttaccgttagtttaggttatactagtaagcaaggctcatacgtatcgtgcatggtgagtgtcggctctctgctgggacgaccaattgtgggtcacattgctgataaatatggatcactaacagttggcatgatattgcaccttgtcatggccatcctttgttgggccatgtggataccttgtaaaaatttggccactgcgatagcttttggattattggttggttctattatgggaacaatttggccaacaattgcttcaattgttacacgcattgttggtcttcaaaagcttcctggtacctttggtagtacctggatttttatggcggcttttgccttagttgcccccataatcggtctggaacttcgttcaactgatacgaatggaaacaattattatcgtacagcaatattcgtgggttttgcgtactttggtgttagtttatgccaatggctattgagagggtttataatagctcgagatgagattgctgtgcgtgaagcctattcagctgaccaaaatgaattgcatttaaacgttaagttatcacatatgagtaaatgtctttttcgttataaacaattacctaggagagtctaa

SEQ ID NO: 77420 - DNA, 1224 bp, Saccharomyces pastorianus
atgcaaatagtcagaagttgtaactccaataacaaacccctcataccgtccttaaattggcatatcgctatcagaatgagaggcgatgggtttaaagataggagtatagatgtgttatccctcaaacattttgaatcccagaaagttgttctgcctcaagaccttttcatggataacttcacctggatgttttatgagttcttcaagtgcttcacgtttcgtacctggttgctattattactgccaatgtggttgccaggttttctttcgcagataaagcccatcaatcggatttttccgtttaaactttgtattttagtctcatgcctagtggggatatttttacccaatatttattcattctctcataaaagtgtgttaacgaatcaacttactcagttctccaaagaaattgttgaacatgcaccaggtactgatactcatgattggggaatagttgcggcaaatctaaattcttacttctatgaaaataaagcttggaatactgagtacttctttttcaatgctgcagagtgtcaaaatgcattcagaaaagttcttctcgaaccattctctgtgaagaaagatgaatcttcgaaaataaaatcatttggggattctgtcccctacatcgaagaggccttgcaggtctattccacagaatttgacaaaaagtggaagttgttcaatactgagaaagtgtggagccctgataacttggaacatgttcagctccccaagaaaacttatcgttataagtttacctgggttctcaagaggattttcaatctctggctttttccagcatttattctgtttctggcttgtatctacgtgtcatgggataagggccatctatttcgtatcttgtgttgtgggggaggttttctccttatggtaagagtttttcaaaatatgaggcccttttccatgcacatggaagacgaaatgcagttcttgtcaacgattataaatgagcaagaaagtggtgcgaatggatgggacgaaattgcaaagaaaatgaacaggtacttgtttgagaaaaaagtctggactagtgaagagtttttctttgatgggattgactgtgaatggttttttaaccacttcttttaccgccttctatctacaaagaaacctatgtttgatagacctctaaacgtggaactatggccatacattaaagacgcgcaattgacccgcaaacaggcgcctcccgtgtag

SEQ ID NO: 77421 - DNA, 981 bp, Saccharomyces pastorianus
atgattgttcccacttatggagacgttttggatgccagcaacagaattaaagaatatgtaaataaaacaccggttctcacttcacgaatgcttaatgatcgacttggagcacaaatatactttaaaggtgagaatttccaacgagtgggagcattcaagtttcgtggagcaatgaatgctgtttcaaaattaagtgatgaaaaaagaagtaagggagtaattgccttctcatcaggaaaccatgcacaggctattgctcttagtgcaaaactattaaatgtacctgcaacaattgttatgcccgaggatgcgcccgcccttaaagttgctgctacagccggttacggagcacatatcataaggtataacaggtatactgaagatcgcgagcagattgggcgtcaactagcagccgaacatggttttgcattgattccgccctacgatcatcctgatgttattgcagggcaaggtacgtcggcaaaagagctattagaagaggttggacaacttgatgcattatttgttcctttgggcggtggtgggctcctttcaggatctgcacttgccgctagaagcctttctccaggctgcaaaatttttggggttgaacctgaagctggtaacgatggacaacaatccttcagatcgggttccattgttcatatcaatacgccaaaaactatcgcagatggcgctcaaacacaacacctcggtgagtacacatttgccattattcgcgaaaatgtcgatgatattttaacggttagcgaccaagagctagtaaaatgcatgcactttcttgcggaacgcatgaaggtggttgttgagcccacagcttgtttgggatttgcaggtgcacttctaaaaaaggaagagctagttgggaagaaagtaggcataatactaagtggaggtaatgtagacatgaagagatatgctactttaatctctgggaaggaagatggcccaacgatttag

SEQ ID NO: 77422 - DNA, 1851 bp, Saccharomyces pastorianus
atgtcgtcgtcaattacagatgagaaaatatctggtgaacagcaacaacctgctggcagaaaactatactataacacaagtacatttgcagagcctcctctagtggacgaagaaggtaaccctataaattatgagccggaagtttacaacccggatcacgaaaagctataccataacccatcactgcctgcacaatcaattcaggatacaagagatgatgaattgctggaaagagtttatagccaggatcaaggtgtagagtatgaggaagatgaagaggataagccaaacctaagcgctgcgtccattaaaagttatgctttaacgagatttacgtccttactgcacatccacgagttttcttgggagaatgtcaatcccatacccgaactgcgcaaaatgacatggcagaattggaactatttttttatgggttattttgcgtggttgtctgcggcttgggccttcttttgcgtttcagtatcagtcgctccattggctgaactatatgacagaccaaccaaggacatcacctgggggttgggattggtgttatttgttcgttcagcaggtgctgtcatatttggtttatggacagataagtcttccagaaagtggccgtacattacatgtttgttcttatttgtcattgcacaactctgtactccatggtgtgacacatatgagaaatttctgggcgtaaggtggataaccggtattgctatgggaggaatttacggatgtgcttctgcaacagcgattgaagatgcacctgtgaaagcacgttcgttcctatcaggtctatttttttctgcttacgctatggggtttatatttgctatcattttttacagagcctttggctactttagggatgatggctggaaaatattgttttggtttagtatttttctaccaattctactaattttctggagattgttatggcctgaaacgaaatacttcaccaaggttttgaaagcccgtaaattaatattgagtgacgcagtgaaagctaatggtggcgagcctctaccaaaagccaactttaaacaaaagatggtatccatgaagagaacagttcaaaagtactggttgttgttcgcatatttggttgttttattggtgggtccaaattacttgactcatgcttctcaagacttgttgccaaccatgctgcgtgcccaattaggcctatccaaggatgctgtcactgtcattgtagtggtcaccaacatcggtgctatttgtgggggtatgatatttggacagttcatggaagttactggaagaagattaggcctattgattgcatgcacaatgggtggttgcttcacctaccctgcatttatgttgagaagcgaaaaggctatattaggtgccggtttcatgttatatttttgtgtctttggtgtctggggtatcctgcccattcaccttgcagagttggcccctgctgatgcaagggctttggttgccggtttatcttaccagctaggtaatctagcttctgcagcggcttccacgattgagacacagttagctgatagatacccattagaaagagatgcctctggtgctgtgattaaagaagattatgccaaagttatggctatcttgactggttctgttttcatcttcacatttgcttgtgtttttgttggccatgagaaatttcatcgtgatttgtcctctcctgttatgaagaaatatataaaccaagtggaagaatacgaagccgatggtctttcgattagtgacattgttgaacaaaagacggaatgtgcttcagtgaagatgattgattcgaacgtctcaaagacatatgaggagcatattgagaccgtttaa

SEQ ID NO: 77423 - DNA, 945 bp, Saccharomyces pastorianus
atgacagccagtttaactaccaagttcttgaacaatacctatgaaaacccatttatgaatgcatccggtgttcattgcatgactacacaagaattagatgaattagcaaactctaaagctggtgcattcattacgaagagtgctacaaccttagaaagagaaggtaaccctaaaccacgttacatttctgtccctctaggcagtatcaactccatgggtttaccaaacgaaggtatcgactactatttgtcctatgtattaaaccgtcaaaagaattatcctgatgcacctgccattttcttctcagttgctggtatgagcattgatgaaaatttaaatttgttgaggaaaatccaagatagcgaattcaacggtattaccgagttaaacttgtcgtgtcctaatgtgcctgggaaaccacaagttgcttatgactttgacttgacaaaggaaaccttggaaaaggtttttgcctttttcaaaaaacctcttggtgtcaagttgcctccttattttgattttgcccattttgatatcatggcaaaaatattgaacgagttcccattagcttatgtcaactctatcaatagtataggaaatggtcttttcattgatgtggagaaggagagtgtagtagtgaagccaaagaatggtttcgggggtattggaggtgaatatgttaagccaaccgcgctcgccaatgttcgtgcattttacactcgtttgagacctgaaatcaaagttatcggtacaggtggaattaagtccggtaaggatgcatttgaacatcttctatgtggtgcctctatgctacagattggtacagaactacaaaaagagggcgtcaagatttttgaacgtattgaaaaagaattaaaagacataatggaagctaagggttatacatccatagatcagttccgtgggaagttgaacagcatttaa

SEQ ID NO: 77424 - DNA, 612 bp, Saccharomyces pastorianus
atggacaaagcatttgacgaaattattggaaatagtcacacagacagctcatctaatcataaggtaacgagataccgcagaagggatttaagaaatgaattaggacctagactgggatttgcgccttcggatgctgcatcaaggtcgaaagatcgcctttatagagagagggaagagcctcctttgcctaagagaattagaatatccaaaatcccactagacgtttctgactacaccctcgatgatatgattaaagagtttggctcgccaatattttcgaaaatttttgacaataaagaggatcgtacatgtatttacgaatttgaagacccagaagttttggaaaagattgtcgagcgttataatggacatgagttacataatgcaaaaattgaagtggagatttaccaaccacagagaaagcattctagaatgaatgcccacaaccgtcgcaaacagacggctcaagaacaaggaagaggcaggccagggagccattatcgccaaaggcctaacagagtctccaaaaagaacaagggccgtgagaagaataacactcctacttctgtcgaagctcttgacgctgaattagatgcttatatgaaaggttaa

SEQ ID NO: 77425 - DNA, 2148 bp, Saccharomyces pastorianus
atgggatatcaattgagtgcaacacttaaagggcacgatcaggacgtcagggatgtggtagctgtggatgattcaaaggttgctagtgtttcgagggatggaacagttcgcttgtggtctaaagatgaccaatggctcggtacggtagtttatacaggacaaggatttttaaatagtgtgtgttatgattccgagaaggagttgttgctttttggaggtaaggatactatgatcaacggtgtgcccttgtttgccacctcaggagaggatcccttgtataccttgattggccaccaagggaacgtttgtagtttatctttccaagatggtgttgtgataagcggtagttgggacaaaaccgcaaaggtttggaaagaaggatcgttggtttacaatttgcaagcacacaatgcctctgtatgggatgccaaagttgtatccttctcagaaaataaattcttgacagcttccgccgataagacgattaaactgtggcaaaacgataaagtgatcaaaactttcagtgggattcacaatgatgtagtaagacatttagctgtggtggatgatggccattttatcagttgttcaaacgatggcctcatcaagttggttgatatgcatacaggtgacgtactaagaacatatgaaggccatgaaagctttgtttattgcattaaactgctgcccaatggagatattgtaagctgcggcgaagaccgaacagtccgtatatggtcaaaggaaaatggttcgttaaagcaggtaattacacttcctgccatctctatttggtccgttgattgtatgtctaatggtgatattattgtgggaagtagtgataatcttgtgagaatattttcgcaagagaagtcaagatgggcttccgaggatgaaataaatgaactatctacgcaagtggaaaaatccactataagttccaagacaatagaatttgatgagtctaaactatcaccttatgaaattttacaatcgccggggcgcaaagagggtcaaattgtggtagtcaaatcacctcaaggtactatagaagctcatcaattttcaaattcttcatggaaaaaggttggtgatgttgtcggtgcaggtgctactggaaacgacaaaaaaatagaattcgagggtaaaacgtatgactacgtatttgatgtggatattgaagatggaaaacctcccttgaaattgccgattaatgtcagcgacaacccatatacagcagccgacaattttttggctcgttatgaactgccaatgagttatagggatcaagtagtacagttcatactgaagaacactaatggcatatcgctagaccagcccaacgataatgcatcatcttctgcagtatcaccttcaaaaacgagcgtaatgaaggttcttcctgtcaagcagtatcttatcatggaaaattataacccagatactattttcaatggaatagtaaaaataaattcaaatgagaagacctttgatgatgaaattctggcgcaaattggtggcgcactacatgacatagatgaaagctgggagttgctactttcatttgctaacactataagatctaactgggaaattaagactcctgcatacgacatagtacgattgattgtaaaaaaattaccttattcttcagatataaaagattacatcgaagaaggcttgggcaataagaatatcactctaaccatgttaactgtgcgtattttggtaaattgcttcaataatgaaaactggggtgtgaaattactggaatcaaatcaagtttataaatcaatttttgagactatagatactgaattttctcaggcatctgctaaacagtcacagaatttggctattgcagtttccacactaattttcaactattcagctctcgtcacgaaagggaactctgatttagaacttttgcctatcgtagctgacgccatcaacaccaagtatgggccattggaagagtatcaagaatgcgaagaagccgcatataggctaaccgtagcttacggaaatttggctactgttgaacctacattaagacaatttgccaactccgtaacttggcttgcaaacatcaaaaggagctatgggaacgtgccaaggtttaaggatattttcgacgatctctcctaa

SEQ ID NO: 77426 - DNA, 1872 bp, Saccharomyces pastorianus
atgacaggtccaatagtgtacgttcaaaatgcggacggtatcttcttcaagcttgctgagggcaaaggaactaacgatgctgttattcacttggccaatcaagatcaaggtgttcgggtccttggagcagaggaatttcctgtgcaaggtgaagtagtaaagattgcgtccttgatggggttcattaagctaaagttgaacaggtatgccattatcgcaaatactgtggaagagaccggtagattcaatggccacgttttctatagagtgttgcaacattctatcgtatctaccaagtttaactcgagaatcgattctgaagaagccgaatatatcaagctactggagttgcatttgaaaaattccaccttttatttttcatacacatatgatttaacaaattccttacaaagaaatgaaaaggttggtcctgcagcctcctggaaaaccgctgatgaacgattcttttggaaccattacttaactgaagatttgagaaactttgctcaccaagatcctagaattgactcctttatacaacctgttatctatgggtatgccaagacagtggacgccgttttgaatgccacccccatcgttcttggtttgattaccagacgtagtatatttagggcgggcacaagatacttccgtcgtggtgttgacaaagacggtaacgttggcaatttcaatgaaactgagcaaattttactcgctgagaatccagagagtgaaaaaatacacgttttctccttcttacagacaagaggatctgtgccaatatactgggctgaaatcaacaacttgaagtacaagccaaatcttgttcttggagaaaactcattagatgcgacaaaaaagcattttgaccagcaaaaggagttatatggcgacaactacttggttaacctagtcaaccaaaagggccacgaactacccgtgaaagagggctatgaatcagttgtgcacgcgctaaacgatccgaagattcactacgtgtattttgacttccaccatgaatgtcgtaagatgcaatggcatagagtgaaactgttaattgatcacttggagaaattaggtttatctaacgaagatttcttccacaaggtcatagactctaatggtaacaccgttgaaattgttaatgagcaacattccgttgtaagaacaaactgtatggattgtttggacagaacaaatgtcgttcaatctgttctagcccagtgggttttgcaaaaggagtttgaaagtgccgatgtcgttgctactggaagcacttgggaagacaacgctccattgttaacttcttaccaaaacttatgggctgataacgcagatgcagttagtgtggcatattcgggcactggagctttgaagaccgatttcacaagaaccggtaagcgtacacgtctaggtgcattcaacgattttttgaattcagcatcacgttattaccagaacaattggactgatggtccaagacaggattcatacgatttattccttggtggatttagaccacataccgcttctatcaagtcgccattccccgacagaagaccagtgtatattcagctgatcccaatgatcatttgcgcagccttgaccgttttaggtgctacgatattttttcctaaagatagatttaccagcagtaagaatttgctgtattttgcaggtgcgtcgattgtcttggcgctctcaacgaaattcatgtttaagaacggtattcagtttgtcaactggcctaagttagtagacgttgggttcttggtcgttcatcaaacgcatgataaagaacaacaattcaaaggtttgaaatatgcacagagtcctaaattttccaagccagatcctttaaaaagagattaa

SEQ ID NO: 77427 - DNA, 1455 bp, Saccharomyces pastorianus
atgtctgtgcacgctgcaacaaacccaatcaataagcatgtggttctaattgacaactacgattcctttacctggaacgtttacgagtacttgtgccaggagggcgccaaagtgagcgtctaccgtaacgatgcaattacagttccagaaattgccgccttgaatcccgacacattgcttatctcgcctggaccaggccacccaaagacagattctggcatttcaagagactgtatccggtactttactgggaaaattcctgtatttggaatctgtatgggccagcaatgcatgtttgacgtatttggtggtgaagttgcctacgctggtgagattgtccacggtaaaacgtccccaatctctcacgacaactgtggaattttcaagaacgtgccgcaaggtattgctgtgaccagataccattcattggccgggacagaatcgtccctaccatcctgcttgaaggttactgcgagtaccgaaaatggaattatcatgggtgtaagacacaagaagtacactgtagaaggtgtgcaatttcatccggaatccatcttgaccgaggaaggtcatctgatgatcaggaacattttaaacgtcagtggaggcacttgggaggaaaacaaatcatctccttcaaattctattttggaccgtatctatgctcggcgtaaaatagacgtcaatgagcagtctaaaatcccaggtttcacctttcaagacttacaatctaactatgatttaggtcttgccccaccgttacaggatttctacacggtgttgtcatcatcccataaaagagccgttgttcttgccgaagtcaagcgtgcctctccatcgaagggacccatttgtttaaaagctgttgctgctgaacaggctctcaaatacgcagaggctggtgcatccgccatttccgtattgaccgaacctcattggtttcacggttcgttacaggatttagtaaatgtgaggaaaatcctagatttgaaatttcctcccaaggaaaggccttgtgttttgagaaaagaatttattttcagcaagtatcaaatactagaagcaagattagctggagctgacactgtccttcttatagtcaagatgctatctcaacccttattgaaggaactgtacagctacagtaaagatttgaacatggaacctctcgttgaggtgaactccaaagaggaattacaaagggctctagaaattggtgctaaagttgtaggtgtcaataatagggacctgcactcattcaacgtagacctaaataccaccagtaacttggtagaatctattccaaaggatgttcttctaattgctctatcgggaattaccaccagggacgatgctgaaaaatacaaaaaagaaggagtccatggatttttagtgggtgaagccctaatgaaatcaaccgatgtgaagaagttcattcatgaattatgcgaataa

SEQ ID NO: 77428 - DNA, 3075 bp, Saccharomyces pastorianus
atgagcagcaataatagtggtctctctgccgccggagaaatcgatgaaagtctttattctcgtcaactttatgtgttgggtaaggaagcaatgttgaaaatgcaaacctccaacgtattaattctcggcttgaaggggctaggtgttgagatagcgaagaacgttgtgttggcaggtgtcaaatctatgaccgtttttgaccctgagccggttcaattggcagacttatcaacccaattctttttgaccgaaaaggatattggtcaaaagagaggagatgtgaccagagccaaattggcagagttgaacgcatatgtcccggttaatgtgctggattccttagacgatattacccaattgagtcaattccaggtcgttgtcgctacggacactgtttctttggaagataaggtgaaaatcaacgaattttgccattcctccggtattagattcatttcctcggagacaagagggctgtttggtaacaccttcgtagacctaggtgacgagttcacagtgttggacccaacgggtgaagaacctcgcactggtatggtttcagacatcgagcccgatggaacagtgaccatgctagatgataacagacacgggttggaagacggaaattttgtcaggttctccgaagtagaaggtcttgataagttgaatgatgggaccctttttaaagttgaggttttggggccctttgcattcagaattggttcagtcaaagaatttggcgagtataagaagggcggtatcttcaccgaagtcaaagtaccccgtaaaatctcatttaagtctttgaaacaacaactgtccaatcctgagtttgttttttcggattttgctaaatttgacagagctgctcaattgcatttgggatttcaggctttacatcagtttgccgttagacataatggtgaactgccaagaacaatgaatgacgaagacgccaatgaattaatcaagttggtcaccgatttgtccgttcagcaaccggaggttctgggtgaaggtgtagatgttaatgaagatttaatcaaagagctttcctatcaggcaagaggtgacataccgggtgtcgtagcatttttcggtggccttgtggcacaagaagtgttaaaagcatgttctggtaaatttactccgctaaagcaatttatgtactttgattccttggaatcattgccagatcctaaaaacttcccaagaaatgagaagactactcagccagtaaactctcgttacgataaccaaatcgcggttttcggtttggattttcagaaaaagattgccaattcaaaggtctttcttgtcggatctggtgccattggttgtgagatgttgaaaaattgggcacttttggggcttggttctggctccgacggttacatcgttgttacggataacgattcgatcgaaaagtccaacttaaaccgtcagttcttgtttagaccaaaggatgtcggaaagaacaaatctgaagtagcggcagaggccgtttgtgctatgaaccccgatttgaagggcaagataaatgctaaaattgataaagtggggccagaaactgaggaaatatttaatgactccttttgggaaagcctggattttgtcaccaacgctctagacaatgtcgacgcaagaacatacgtagatcgccgttgtgtgttttatagaaaaccactgttagaatctggtaccctaggtactaaaggtaatactcaagtcatcattccaagattgactgaatcatactcttcttctagagacccaccagaaaagtctatcccattgtgtaccctacgttctttcccaaacaagattgatcacaccattgcctgggccaaatctcttttccaaggttacttcactgattccgccgaaaacgttaatatgtacttgacacaaccgaatttcgttgagcaaacactaaagcaaagcggggatgtcaagggagttctagaatccatctcagattctctatctagtaaaccacacaattttgaagattgtatcaaatgggcaaggttagaatttgaaaaaaaattcaaccatgatatcaagcagttactgttcaacttccccaaggatgccaagacttccaacggtgaaccattttggtccggtgctaagcgtgctccaacaccattagagtttgatatatacaataacgatcacttccattttgtcgtagcaggtgctaatttacgcgcttataattatggtattaaaagtgatgactctaattctaaacccaacgtggacgagtataagtccgtcatcgatcatatgataattccagaatttactccaaatgccaatttgaaaattcaagttaatgacgatgatccggatccaaatgccaacgcggctaatggctcagatgaaattgatcagctggtatcatccctaccagatccttctactttggctggctttaaactggagcctgtagatttcgagaaagacgatgacactaatcatcatattgaatttataacggcttgttctaactgtagagctcaaaactacttcatcgaaactgctgatcgccaaaagaccaaattcacagctggccgtattattcctgccatcgcaacaaccacttctttggttactggtttggtcaatttggaattatataaactgattgacaacaagacagatattgagcaatataagaatggctttgttaatttagctttgccatttttcggtttttcggaaccaattgcttcaccaaagggagaatataacaacaagaaatatgataaaatttgggatagatttgatatcaagggagatattaaattaagtgatttaattgaacattttgaaaaagatgaagggttagaaataacaatgctttcttatggcgtttctcttctttatgcctcatttttccctccaaagaaattgaaagaaagactaaatctaccaataactcaattggttaaattagtgactaagaaagatattccggcacatgtatctacaatgattctcgaaatttgcgcagatgacaaggaaggagaggatgttgaagttcctttcattaccattcatctatga

SEQ ID NO: 77429 - DNA, 3873 bp, Saccharomyces pastorianus
atgaactttttaagttttaagactacaaaacactatcacattttcaggtacgtgaacatacggaatgactacaggctgttaatgacaatgataataggtaccgtggcaacaggcctagtgccggcaattacttctatcctgacgggcagagtgttcgatctactatcagttttcgtggctaatgggtcacatcaaggtttgtattcccaactagtacagaggtcaatggcagtaatggcacttggtgcggcttctgtgccagtaatgtggctttctctaacaagttggatgcacatcggcgagagacaaggctttagaatacggtcacagatattggaggcatatttggaggaaaagccaatggaatggtacgacaataatgaaaaattgttaggagattttactcaaatcaacagatgtgtggaagagctaagatcaagctccgcagaggcatcagccataactttccagaatttagttgcaatatgtgcgcttctggggacgtcattctactattcttggtcattaactttaattattctttgcagctctccaataatcacattttttgcagtggtgttttccagaatgattcatgtatattcagagaaggagaattctgaaacgagtaaagcagcccaattacttacatggtcgatgaatgccgctcaattagtgagattatatggtacacaacgtctagaaaggaaaaaattcaaggaaatcatactaaattgtaacactttcttcatcaagagttgcttttttgttgctgcaaacgctgggatcttgagatttttgacgttgactatgtttgtacagggattctggtttggttccgcaatgatcaaaaagggcaagctgaacattaacgatgtaatcacttgcttccattcatgcattatgctgggctcgactttaaataatacattacaccaaatagttgttcttcaaaaaggcggagtggctatggaaaaaatcatgactctattaaaagatggatccaagcgaaatcctttaaataaaactgtagcccaccaatttccactagattatgccaccagtgatctaacatttgctaatgtttcgttttcttatccaagcagaccttcggaagcagttttaaagaacgttagtttaaatttctctgcaggacaatttactttcatagtaggaaaatcaggctcaggtaaatctacattatccaacttattattaaggttctacgatggctataatggatcgatatctatcaatggccacaatatccaaacaatcgaccaaaaattgctaattgaaaatatcaccgtcgtagaacagcgttgtaccctatttaatgatactcttagaaaaaatattcttttaggttcaacagattcggtaagaaatgccgattgcagcaccaatgaaaatagacatttaatcaaagatgcctgtcaaatggctcttctggatagatttattctagaccttcccgatggactggaaacattaattgggactgggggtgtcacactaagtggcgggcaacaacaaagagttgctatagcacgtgcattcatcagagatactccaatattattcttagacgaagctgtatcggctctagatattgttcatcgcaacctgttgatgaaggcaattaggcattggaggaaaggaaagactacaatcatattgacgcatgagttgagccaaattgaatctgctgactatttatatttaatgaaggaaggtgaagttgttgaaagcggcacccagtctgaacttctagccgatccgaccactacatttagcacatggtatcacctacagaatgactactctgatgcgaaaactattgtagatacagagactgaagaaaaatctatacacactgtggaaagttttaactctcaattggaaacaccaaaacttggatcatgcttaagtaatctgggatatgatgagacagatcagttgtccttttacgaagcaatctatcaaaaaagatcgaacgttagaacaagaagggttaaagttgaagaggaaaatattgggtatgcactaaaacaacaaaagaacaccgaaagttcaacagggccacaacttctgagcattattcagattatcaaaagaatgattaaaagcataagatacaaaaaaattctaatcttgggactgctatgttctcttatcgcaggcgccacaaatcccgtcttttcatacacattcagtttcttactagaaggaattgtcccatccacggatggaaaaactggctcttcacattatttggcgaaatggtcgcttcttgttcttggtgtggctgcggcagatggtattttcaattttgctaaaggattcctattagattgctgcagtgaatactgggttatggatcttagaaatgaagttatggaaaaactgacgagaaagaatatggactggttttctggtgaaaacaacaaggcttctgaaatttctgctctagtcttgaatgatttgcgagatttgaggtctttggtctctgaatttttgagtgcaatgactagtttcgttaccgtatcaacgattggactaatttgggcgttagtatcgggctggaagttaagtttggtttgtatttcgatgtttccactcataattatattttcagcaatatatggaggcattttacaaaaatgcgaaacagattataagacatctgttgctcagttagaaaactgcctgtaccagattgtcactaacattaaaaccattaagtgcttacaagctgaatttcattttcaattgacctaccatgacttgaagataaaaatgcaacaaattgcctccaaacgcgccattgccacaggatttggtatatctatgacaaacatgattgtcatgtgtatccaagctattatttactactatggcctaaagctggttatgattcacgagtacacctcaaaggaaatgtttacgactttcactttgttattattcactattatgtcatgcactagcctagtaagtcagatacccgatataagtagaggccaacgtgctgccagttggatctataggattcttgatgaaaagcataataccctagaggttgaaaacaataatgctagaacagtgggaatagctggtcacacctaccatggcaaagaaaaaaaaccaatcgtttcaattcaaaatttgacatttgcctatccatctgcacctaccgcctttgtttacaaaaacatgaattttgacatgttttgcggacagacgttaggtatcattggtgaatcaggcacaggaaagtctacacttgtgcttttattaacaaaactttataattgtgaagtaggcaaaattaaaatagacggtacggacgtaaatgactggaatttgacaagtttaagaaaagaaatttcagtggttgagcaaaaacctttattattcaatggaaccatcagagataacctaacttatggtttacaagatgaaatacttgaaattgaaatgtatgatgcattaaaatacgtaggaatccatgactttgtaatttcatcacctcagggcttggatacacgtattgatacaactttactgtcaggtggacaagcgcaaaggctttgcatagccagagcacttctgagaaaatcaaaaattctgattttagatgagtgtacttcagccttggattctgtcagctcctctatcatcaatgagatcgtcaaaaaaggtccacctgctctactaacaatggttataacgcatagtgaacaaatgatgaggtcttgtaactcgattgcagttcttaaagatggtaaagtggttgagcgaggtaacttcgacactttatataataatcgcggggaattattccaaattgtttccaaccaaagcagttaa

SEQ ID NO: 77430 - DNA, 816 bp, Saccharomyces pastorianus
atggtgagctatggaagtcatagtagtgaggtttcgaaagttcttaaaacgccgaagtttgtgcttaggtatggaaatgtatccagcaaacaacgttttgccctaaagcggaagataaattacaaactacgtgaaagcaaatatcaagaatacttgaatgaatacaacaccttcgtgctttacgactgggaaaacagtggcgctggtagtcttgtcgattcttcctacaatctcccctctttatggaaggaattcataacagagggcatatctaaaggagcaataaacgacaaactaccgacagtctttatgaagaggaagttgacaaactcagcgttgggtcactgtttgggacttgatttcctgactgatccgagcgagtcagaacatgaatacaggtgcatgtttcagacagttcaggacatcccatctctctcgcaactgatcttattcaacagcatgccaaacgttccagtaagattgaaattgcataccattggtataaatataaatttcggctgcaaacgttccctgataagcaacggtggtgatcaagacactgaaatgagcgaagcagtctcttatatccagcctttattggaagaatcctcgagaatgtaccgcaatttaaactactggaagctgttaaaaatagcacgaaataacaagaaggatgaaccgttggatcagagcacgcgtatcaagtcgcaagttaagcttttactgagtcaattggcgacgaaccgaattacctcaccttccgtcacggatcatgggggtcacaactggctcatattcaccagaagacggttgtaa

SEQ ID NO: 77431 - DNA, 804 bp, Saccharomyces pastorianus
atgagctgcctggtgttgccattagtaagcgtagggaatataccacaattgagtattgactggctgctgaattcacaagcaaatgaatgggaatatttggaggcgttagattcgaaataccttgtggaatttgtgggaccattagacagaccagaggatggtagcgactcgctatataaagacgctgatatgaagtatagcagcgctttggaagttttctacaataagaagcgaggactttttgccatacagcaacgaacaccactcgtgtccgttaactatctgaataatttcatcgtagagatcatcttgccgttcttgagcaagtataatatatcggaaatatgcatttgggactctctatatgcaatggaggatgaaaatggtgtgattgtacgtccacaggaggtatattcgctcggagagttttatttcgacgatgaagctgagcttttatcgaacctccatctaaacgatcaagagtcgatggtcaataactggttacattttactcctaccagtttccaagacaagatatccgttgatcagccgatcttcaaaatacttttccaaatactgaatgcgtcgcagaggcctaaagccctccgcagcattaagtactgtagttgtttggccaatgagggggacaactcattagattctcaacagttcttacaatggataatctctcaaaaagttatcaaaaacgcgccaccaattgtaaagtttgtcaggcctatatcatggcaaggtgcatacggaatggcggatgcaagagataaatttgtagatttatacaattga

SEQ ID NO: 77432 - DNA, 3303 bp, Saccharomyces pastorianus
atgctagaacggattcagcagctggtaaatgcagtgaacgatccacgctcagatgtggccactaagagacaagccatcgagctgctaaatgggattaaatcatcagagaatgcattggaaatctttatatcattggtcatcaacgagaattcaaatgatttgttgaagttttacggactgtccacattgatagaattgatgacggagggcgtgaacgctaatccaaatggtttgaatctggtaaagtttgaaataaccaaatggctcaaatttcaagttttgggcaataagcaaactaagctgcctgactttttaatgaataagatttctgaagtgctgactacgttgtttatgttaatgtacagtgattgtaatggaaaccagtggaacagtttttttgacgatctgatgagtctattccaagtggattcggctatttccaatacgagcccgtctaccgatggtaacattcttctaggtcttgaattttttaacaagctctgtttgatgattaattcggagattgctgaccaaagctttattaggtctaaggaatctcagttaaaaaataacaatataaaagattggatgcgtgataacgatatcatgaaattgagtaatgtgtggtttcagtgtttaaaactggacgaacaaattgtgtcacaatgtcccggattgatcaattctaccttggattgtattgggagttttatctcatggatcgatattaatttaattattgatgcaaataattattatttgcaattaatctataaatttttaaatcttaaagaaaccaaaatttcatgttataattgcatactggccatcatctctaaaaaaatgaaaccaatggacaaactggcttttctgaatatgatcaatttgaccaacgaattgacttactatcatcaagccatatcaatgaatccccaaattattacatttgataatttagaagtctgggaaagtttgaccaagttgattacttcctttggcatagaatttactatcattattgaacaagtcaacgatgatcaaaaattggatacattatacaaacaatcggtcatttcaaatgttgattccatattattggagaaaataataccaatacttttggaatttatgaataatgagtttgattcaataacagcaaaaaccttcccattctggtcaaattatctggctttcttgaaaaaatataaagcatcttcaccaaattttgtaccattgcataaggattttctagataatttccaacaaatttgctttaaaagaatgaagttttcagacgacgaggtcacacaggatgattttgaggaattcaacgaaaccgtaagatttaaattaaaaaatttccaggagatcatcgtggtaattgacccaagtctgtttttaaataacatttctcaagaaatttcagcaaacctaatgaattgtaaaaacgaaagctggcaagttttcgagctaactatttatcaaatcttcaatttaagtgaatgtatcaagaacaactatttcggtttgaacaagaatgaaattatgacctcacaaccttcgctaactttagtacgatttttaaatgaattgttaatgatgaaggatttcttattagccattgataacgaacaaatccaaatactattcatggaattaattgtgaaaaattacaatttcatattttcaactagtgctaacacagcaaatgctactgatgatgatgaaaagtatctattaatattgaatattttcatgagctcatttgctatgttcaataaaagagaaaacgtcagactaaggtcatggtatttatttacaagattcttgaagttgacaagaatcaatttgaaaaaaatcctctttgccaacaaaaatttggttaatgaaataactaataagataagtcctctacttcacataaaagtaacatctatcaacgcccaagggacggatgacaatgatacaatttttgataatcagttgtacatatttgagggtattgggtttataatcacattgaataatagcagtcaggagctcactgctgccactgccaacacccccatcgattacgatatattggaccagatattaactccgctatttacacaattagagggttgtattacccaaggagcttcgccagttgtgattctggaatgtcatcacattcttatggctattggtactttagcgagaggtttgcacattggtctcgtccctgagaatcaggtcaacaatatggttgtcaacaaaaaattaatcaatgactctttaatccataaattctctaatatagctgaggttatattagtaacattctcttttttcaataagttcgaaaatatccgcgatgcatctaggtttacctttgccaggttaattccaattttaagtaataaaattttaccatttatcaataaattgattgaattgatcttatcgtccacagatttaaaatcatgggagatgattgattttcttgggttcttatctcaactgattcatatgtttcacacggacacagactgttaccagctgtttaaccagttacttactccgcttatcaacaaagtccattctattatcgaagagattgatgaacaacacgaccaacaatcaagcggtaacaaacctatagacactgcagtcacagccacctccgtaaataagaatatcgtggtcaccgattcgtatagagataaaatactattgaaaaaggcttactgcacatttttacagtcatttactaataattccgtcacttcgatactattgtcagatataaacagagcaatcctgccggtcatattaaacgatttggtcacctatacgccgcaagagatccaggaaacatcaatgatgaaagtgtcactcaatgtattgtgcaattttatcaaatgttttgggaatgggacctgcttggataatgacgacatcaataaagatcccaaccttaaaatagatggtctcaacgaatacttcatcatgaaatgtgtcccaataatctttgaaattccgttcaatccaatatacaagttcaatatcaaagaagggaatttcaaaacaatggcatatgatttggcaagattactgagggagctatttatcgtcagcagcaaccccaccacaaatgagaatgaatgtgtaaaatatttaactcagatctaccttccacaaatccaattaccacaggaattgacgattcagttggttaatatgttaaccacaatgggtcaaaagcaattcgaaaaatggtttgtagataatttcatttctgttttaaagcaaggtcaatag

SEQ ID NO: 77433 - DNA, 1899 bp, Saccharomyces pastorianus
atggaactcaacaacccttcaattatatcaagcagccagttttcaggtgaattgtctgacagcgatactgcagccgctactcacaaatcgcaacaagccatctcaaatttattccaaaaattagccaaaaagggcagagaagagaagccaatcggtagcgtagaatcttcaactgatagctctaacatttctgttgctacgagcggtaacaataaagaaagcaataagaaaaaaaataagaaaacggccatgctaaatttcagcagtttgacggaccctataacgaactacaaaccaatggatctgcaatacaagacatatgcatactccatgaatgaactttatcatttgaaaccatctttggcaagtgcttcgtacgaagaagacccacttatttcggaacttgtgaggagtttacccaaaagaaagttttggcgattacgcatgggacctccagatcaaaagcatgctaacaaccatcattttaatgggaacaatggcggaggcagttggaaggctggttacaagaatggtaaaaacgatgagagaagaatgagtagaaccaaaaacatgcagggaggcaaacgaagatctcaacaagatgatgaagaaaaaaagattgaccaagaaatgctggagatggacaagaatcttcaattaggaggtgacgtcggccattcaattgcagattttgaagattggaaggcaaagatgaaggaattagaattgaaaaaactttcaaaatctaaaggaatcagtaactctaccgcaattgctcccagggaaagcgcctctcatgaaacacccaccgatttaagaccggtcattccaaggggccctagttcaataacagattttttgaatttaaagaggcaagataagaaggaagaatcttcacaacaaacacctggtattcctgttggacagccaagcctatccaaaaccagtatagaacaagttaacgaattagaaactaattcagatttgggtaaaagttcatcatctcggttttcatcatttttcaataaatctgccacttcgttgccttcattagataataataatcaagtgccatcgtcaaacgtgtctgtagtaaacaacgatggcaacagtacacctcatcaaagtggttcaagactgatgtcgtttttcaaagaatctagatcgagcactccaaatgcagaatcgcagttgttatcagcctcagacaaagataatggaaagatgcagactcttccgcaattccagcagcaaccgcaacaaatgcaaccaatggcatttacccagcatcctcctaataacaacgcatttttcaatgggctattgaataaaggtaaaagtgaaactagtactcctcctcctccacccccaggactaattgctcatcagggtccacaatttcctatgatgggtgtaccaccaaattttccacaacgcatgatgccaccgccaccaggtctcgttcaattccagaaagattctaaagatgtaaataagaaggaagacaggcaattaaggcaaaataaaaatccaaacggaacaagaaatagcaagggaaaacaagaggaaacagcaacgccagatctgcctcaacagcaatacatgcctccacccccacctccagggttttttccaatgcatcctaactttcctaacggcccaatgccaccattaccacaggggttcccaatcccaccaaatggtatgttaccggtaacaggacaacagccacagccaccttatccaaatatgatgctacaaggaaatttcccccctaatttccagcaaggttttggtagtaactcccctatgccaattccatctattattaatgccaatggcaaaaatgttacaaaccagttaccaccaggattaaactctaaaaagaatataaaatga

SEQ ID NO: 77434 - DNA, 7425 bp, Saccharomyces pastorianus
atgaataaatacattaacaaatacaccacgccacctaacttattgtctttacgacaaagggccgaaggcaaacacagaacaagaaagaaacttacacacaaatcgcactcccacgatgatgagatgtcaactacttcaaacacagattccaatcacaatgggcccaatgactctggtagagtgatcactggttctgctggtcatattggtaaaatatcctttgtagattcagaactagatacaacattttctactttaaatttgatttttgataaacttaaaagcgatgtgccacaagaacgagcctctggcgctaatgaattaagcactactttgacctcattagcaagggaagtatctgctgagcaatttcaaaggtttagcaacagtttaaacaataagatatttgaacttattcacgggtttacttcaagtgagaagataggtggtattcttgctgttgatactctgatctcattctacctgagtacagaggagctgccaaaccaaacttcaagactggcgaactatttacgtgttttaattccatccagtgacattgaagttatgagattagcggctaacaccttaggtagattggccgtgccaggtggtacattaacatcagatttcgtcgaatttgaggtcagaacttgcattgattggcttactctgacagcagataataactcatcgagctctaagttggaatacaggagacatgctgcgctattaatcataaaggcattagcagacaattcaccctatcttttatacccttacgttaactctatcttagacaatatttgggtgccattaagggatgcaaagttaattatacgattagatgccgcagtggcattgggtaaatgtcttactattattcaggatagagaccctgctttgggaaaacagtggtttcaaagattatttcaaggttgtacacatggcttaagtctcaatacgaatgattcagtgcatgctactctgttggtatttcgagaattactcagcttgaaagcaccttatctcagggataaatatgatgatatttacaaatctactatgaagtacaaggaatataaatttgatgttataaggagagaagtttatgctattttacctcttttagctgcttttgaccctgccattttcacaaagaaatatctcgataggataatggttcattatttaagatatttgaagaacatcgatatgaatgctgcaaataattcggataaaccttttatattagtttctataggtgatattgcatttgaagttggttcgagcatttcaccctatatgacacttattctggataatattagggaaggcttaagaacgaaattcaaagttagaaaacaattcgagaaggatttattttattgcattggtaaattagcttgtgctttgggcccagcttttgctaagcacttgaacaaagatcttcttaatttgatgttaaactgtccaatgtccgaccatatgcaggagactttaatgatccttaacgagaaaataccctctttggaatctaccgttaattcgaggatactaaatttactgtcgatatccttatctggtgaaaaatttattcaatcaaaccaatacgattttaataatcaattttccattgaaaaggctcgtaaatcaagaaaccaaagtttcatgaaaaaaactggtgaatctaatgacgatattacagatgcccaaattttgattcagtgttttaaaatgctgcaactaattcatcatcaatattccttgacggagtttgttaggcttataaccatttcttacattgagcatgaggattcgtctgtcagaaaattggcagcattaacgtcgtgtgatttatttatcaaagacgatatatgtaaacaaacatcagttcatgctttacactcggtttctgaagtgctaagtaagctattaatgatcgcaataactgatccggttgcagaaattagattggaaattcttcagcatttggggtcaaattttgatcctcaattggcgcaaccagacaatttacgcctacttttcatggcgctgaacgatgagatttttggtattcaattggaagctatcaaaataataggcagattgagttctgtcaaccccgcttatgtagttccttctttgaggaaaactttactggaactattaacgcaattgaagttctcaaatatgccaaaaaaaaaggaggaaagtgcaactctattatgtacgctgataaattccagcgatgaagtagcgaaaccttatattgatcctattctagacgtcattcttcctaaatgccaggatgcttcatctgccgtagcatccaccgctttaaaggttttgggtgaactatctgttgttggaggaaaagaaatgacgcgttacttaaaggaattgatgccattgatcattaacacatttcaggaccaatcaaactcttttaaaagagatgccgccttaacaacattaggacagctggctgcttcctctggttatgttgttggccctttactagactacccagagttacttggcattttgataaatattcttaagactgaaaacaaccctcatatcaggcgtggaactgttcgtttgattggtatattaggcgctcttgatccatataagcacagagaaatagaagtcacatcaaactcaaagagttcagtagagcaaaatgctccttcaatcgacatcgcattgctaatgcaaggggtatctccatccaacgatgaatattaccccactgtagttatccacaatctgatgaagatattgaatgatccatcgttgtcaatccatcacacggctgctattcaagctattatgcatatttttcaaaaccttggtttacgatgtgtctcctttttggatcaaattattccaggtatcattttagtcatgcgttcatgcccgccgtcccaacttgacttttattttcagcaactgggatctctcatctcaattgtcaagcaacatattaggccccatgtcgagaaaatttatggtgtgatcagggagtttttcccgatcattaaactacaaatcacaattatttctgtcatagaatcgatatctaaggctctggaaggtgagtttaaaagatttgttcccgagaccctaacctttttccttgatattcttgagaacgaccagtctaataaaaggatcgtttcgattcgtatattaaaatctttggttacttttgggccgaatctagaagactattcccatttgattatgcctatcgttgttagaatgactgagtattctgctggaagtctaaagaaaatctccattataactttgggtagattagcaaagaatatcaacctctctgaaatgtcatcaagaattgttcaggcgttggtaagaattttgaataatggggatagagaactaacaaaagcaaccatgaatacgctaagtttgctccttttacaactaggtaccgactttgtggtctttgtgccggtgattaacaaggcgttattgaggaataggattcagcattcagtgtacgatcaactggttaataaattactgaacaatgaatgcttgccaacaaatatcatatttgacaaggagaacgaagtacctgaaaggaaaaattatgaggacgaaatgcaagtaacgaaattaccggtaaaccaaaatatcctaaagaatgcatggtattgttctcaacagaagaccaaagaagattggcaggaatggataagaaggctatctattcagcttctaaaggaatcaccttcagcttgtttacgatcctgttcgagtttagtcagcgtttattatccgttggcgagagaattgtttaatgcttcattctcaagttgctgggttgagcttcaaacgtcataccaagaggatttgattcaagcattatgcaaggctttatcatcctctgaaaacccacccgagatttatcaaatgttgttaaatttagtggaatttatggagcacgatgacaaaccattgcccatcccaatccatacattaggtaagtatgcccaaaaatgtcatgcttttgcgaaggcactacattacaaagaggtagaattcttagaagagccgaaaaattcaacaatcgaggcattgattagcattaataatcaacttcaccaaactgattctgctattggtattttgaagcatgcgcaacagcacaatgaattgcagctgaaggaaacttggtatgaaaaactgcaacgttgggaggatgctcttgcagcatataatgagaaggaggcagcaggagaagattcggttgaagtgatgatgggaaaattaagatcgttatatgcccttggagagtgggaagagctttctaaattggcttctgaaaagtggggcactgcaaaacccgaagtgaagaaggcaatggcgcctttggctgccggcgctgcctggggtttggagcaatgggatgaaatagcccagtatactagcgtcatgaaatcgcagtctccagataaagaattctatgatgcaattttgtgtttgcataggaataattttaagaaggcggaagttcacatctttaatgcaagggatcttctagttactgaattgtcagctcttgttaatgaaagctacaatagagcatataatgttgttgttagagcgcagattatagcagagttggaggaaatcatcaaatataagaagttgccacaaaattcagataaacgtctaactatgagagaaacttggaataccagattactgggctgtcaaaaaaatattgatgtgtggcaaagaattctgcgtgtcagatcattggtgataaagccaaaggaggatgctcaagtgaggattaagtttgccaacttatgcagaaaatcgggtaggatagcgctagctaaaaaagtcttaaacacattgcttgaagaaacagatgacccagatcatcccaatactgctaaggcatcccctccagttgtttatgcacaactgaagtacttgtgggctacggggttgcaagatgaggctttgaagcaattaattaatttcacatctagaatggctcatgatttaggtttggatccaaataatatgatagctcaaagcgttcctcaacaaagcaaaagagtccctcgtcacgttgaagattatactaagcttttagctcgttgtttcttgaagcaaggagaatggagagtttgcttacagcctaaatggagattgagcaatccagattcgatcctaggctcctatttgctcgctacacattttgacaacacatggtacaaagcgtggcataactgggcactggccaattttgaagtcatttctatgctaacatctgtctctaaaaagaaacaggaaggaagtgatgcttcctcggtaactgatattaatgagtttgataatggcatgatcggggtcaatacatttgatgctaaggaagttcattactcttctaatttaatacacaggcacgtaattccagcaattaagggtttttttcattccatttctttatcagaatcaagctctcttcaagatgcattaaggttattaactttatggtttacttttggtggtattccagaagcaacccaagctatgcacgagggtttcaacctaatccaaataggcacatggttagaagtgttgccacagttaatttctagaattcatcaacccaatcaaattgttagtaggtcattactctccctattatctgatctaggtaaggctcatccgcaggcattagtgtaccccttaatggttgcgattaaatccgaatctctctcacgacagaaagcagctttgtccatcatagaaaagatgagaatacatagtccagttttggtcgaccaggctgaacttgtcagccacgaattgatacgtatggcggtgctttggcatgagcaatggtatgagggtctggatgacgccagtaggcagttttttggagaacataataccgaaaaaatgtttgctgctttagagcctctgtacgaaatgctgaagagaggaccggaaactttgagggaaatatcgttccaaaattcttttggtagggacttgaatgatgcttacgaatggctgatgaattacaaaaaatctaaagatgttagtaatttaaaccaagcgtgggacatttactataatgttttcaggaaaattggtaaacagttgccacaattacaaactcttgaactacaacatgtgtcgccaaaactactatctgcgcatgatttggaattggctgtccccgggacccgtgcaagtggtggaaaaccaattgttaaaatatctaaattcgagccagtattttcagtaatctcatccaaacaaagaccgagaaagttttgtatcaagggtagtgatggtaaagattataagtatgtgttgaaaggacatgaagacattagacaggatagcttggtcatgcaattattcggactagttaacacgcttttgcaaaatgacgctgagtgctttagaaggcatctagatatccagcaatatccagcaatcccattatctccgaagtctgggttactgggttgggtaccgaatagtgacacgttccatgtattaattagggagcatagagaagccaaaaaaattccattaaacattgagtattgggtcatgttacaaatggcacctgattatgacaatttaacgttgttgcagaaagtagaagtcttcacttacgccctaaataatacggagggacaagatctttataaggtgttatggctgaagagtaggtcatcggaaacgtggttggagcgtagaactacttacactcgatcgctagccgtgatgtccatgaccggttatatattggggttaggtgaccgccaccctagtaatttgatgttggatagaatcactgggaaagtcattcatattgattttggtgattgtttcgaggctgctatattaagagaaaaattccccgaaaaagtaccttttagattaactagaatgttaacatatgcaatggaagtgagtggaattgaaggtagcttccgtattacttgtgagaatgttatgaaggtacttagagataacaaggattcattaatggcaatccttgaagcttttgctttcgatcctttgatcaattggggttttgacttaccaacaaagaaaattgaggaagaaacgggcattcaacttcccgtgatgaatgccaatgagctattgagtaatggggctattaccgaagaagaagttcaaagggtggaaaacgagcacaagaatgccattcgaaatgcaagggccatgttggtattgaagcgcattactgacaaattaacggggaacgatataagaaggtttaatgacttggacgttccagaacaagtggataaactaatccaacaagccacatcagtggaaaacctatgccaacattatatcggttggtgtccattctggtag

SEQ ID NO: 77435 - DNA, 615 bp, Saccharomyces pastorianus
  modified_base (152)..(192): a, c, g, t, unknown, or other
atgcagcagtatgtaaaaaatgacggtaatgaatatataatacaaatgcatagaggaaaggctatagaaatgaagagattcatgaattttcagtcaggttctccgacttttaattgctgtgcccctcctcctgcttctttttttcctcttcnnnnnnnnnnnnnnnnnnnnnnnnnnnnnnnnnnnnnnnnncttcatcttcattcttcttgttttcctcttcctgcttctttttttcctcttcttcgttcttcttcttttcttcatcttcattcttcttattttcttcatcttcattcttcatcttttctccttcttcctgcttcttcttctcttcttcttccttcttctttttctcctcttcctcctgcttcttcttttcttcttcttcctatactattttctctcttcttacttccttctattttcttctcttactactatccttctattaactctactatacctcttccttctatatcttttcttcttcttccttcttcttcttttcctcttcttccttcttcttcttctcctcttcctccttcttcttcttctccctccgctttctttcttcaagtaacttggcataagcatagtcctcgtatacaataa

SEQ ID NO: 77436 - DNA, 3132 bp, Saccharomyces pastorianus
atgacgacgaccaagaggttgaagtttgagaatctgagaatccaattctccaatgccatagtaggaaactttttaaggttaccgcattcaattataaacgcgttagagtcaaccaactacgctatccaggaattcggtatagcagtccattctcataattcagatatacctattgttcatcttggatgggatggccatgattctggatcgagtgagaatgttgtttttatcaatcctgttttggccacagtatatgatttaaatcaaaagtctccattggtggacttatacatccagcgatatgaccacacacacctggctacggaggtgtatgtcacgccagaaacgagtgatgattgggaaattatcgatgccaatgcgatgaggttccaaaatggtgagattttgcaccaaacccgtatagttaccccaggtgagactttgatttgttatttggaaggaattgttacaaagttcaaaattgacagggtggagccatcaatgaagtctgcgaggatcacagatggttccttggttgttgtggcaccaaaagtcaataaaacacgtttggtgaaggctgagtatggtcatagtaataagacaatactaaaaaatggggctatccaacttttaaagaaggtaatattgaggagtactgtgtgcaaaatggacttccctaaagataacctttttgtcgtatatatcagtgacggggcacaattgccttctcagaagggctacgcttctatcgtaaaatgtagcttaaggcagtccaagaaaagcgattcagataataaatcagttggtatcccttcgaagaagattggggtttttataaaatgtgatagtcagatacccgaaaatcacattgcattaagctctcatctttgggatgcattctttacgcacccaatgaacggagcaaaaatcaaactagagtttctacaaatgaatcaagcaaatataatatccggaagaaatgcaacagtcaatatcaaatattttggcaaggacgttcctaccaagagtggggatcagtattctaagttgttgggcgggagcttattgaccaataacttaatacttccaacagagcaaattataatcgaaataaaaaaaggtgaatccgagcagcagttgtgtaatttgaatgaaatttccaatgaatccgttcaatggaaagtaacccaaatgggtaaagaagaagttaaagatattatcgaaaggcatttgcctaaacattaccacgtcgaagaaactggcgaagtttcgcgcactagtaaagatgaagatgatttcattacggtaaatagtatcaagaaagaaatggtcagttatttgacatcgcctattattgccacaccagctattatattagatggtaagcaagggatcggtaaaacaaggttattaaaagagcttataaatgaagtggaaaaagatcatcacatcttcgttaaatatgcggattgtgaaacattgcacgagacatcaaatttagataaaacccaaaaattaattatggaatggtgttctttttgttattggtatagtccttctttgattgtgttggataacgttgaggctctatttggaaaacctcaagccaatgacggagatccttctaataatggccaatgggataatgcaagcaaacttttgaattttttcatcaatcaggtgacaaagatatttaacaaggataataaacgaatcagagttttattttcaggcaagcagaaaactcaaattaatccgctattgtttgataagcattttgtttcagagacgtggtctttgagagcacctgacaaacatgcaagagcgaagttactggagtattttttctcgaaaaaccagatcatgaaactaaatcgagatttgcaattcagtgatttgtcgttggagacagaaggattttcgccactagatttgaaaatattcacagaaaagattttctacgacttgcagttggaaagagattgtgataatgttgtaacaagggaacttttttcgaagtcgcttagtgcgtttacaccatctgcgttgcgtggagtaaagctaacaaaagaaacgaacatcaaatggggggatattggtgctttagcaaatgccaaagatgtccttctagaaaccttagagtggcccacaaaatatgagcctattttcgttaattgtcccctaagattgagatcaggaatcttgctttacggttatcctggttgtggtaaaacgcttctggcgagcgccgtggcacaacaatgtgggttaaactttatctccgttaagggaccagagattttaaacaagtttataggtgccagcgaacaaaacataagagaattgtttgaaagggcacagtccgtcaaaccctgtattctattttttgacgagttcgattctattgcgccaaagagagggcatgactccactggtgtcacagaccgtgtagtcaatcaattattgacccaaatggatggtgccgagggccttgatggtgtatatatactagcagctacaagtagacctgatttgattgatagcgcattgttaagaccgggaagattagacaaaagtgtgatctgtaatataccgactgaatcagagaggttagatatcttgcaagctatcgtcaattcaaaagacaaggatacgggacaaaaaaaatttgcattggagaaaaatgcagacttgaagttgatcgctgaaaagacagctggtttttcgggtgctgatttacaggggctctgctacaatgcttatttgaaatctgtacataggtggctgtctgctgcaggccaatcggaagtggtacccggcaatgataatatagaatacttcagtatcaatgagcacgggcgtagagaagaaaatagactacggctaaagactctattgcagcaagatgtggtgcacgagacaaagacaagcacttcagctgcttctgagctgacagctgtggtcacaataaacgatttattggaagcctgtcaagagacaaaacctagtatttcaacaagtgagttggtcaaattaagggcgatttacgataggttccagaaggataggaacggtgagatgcccaatggtgagaattccatcgacattggtagccgactctcccttatgtga

SEQ ID NO: 77437 - DNA, 1284 bp, Saccharomyces pastorianus
atgctgaaattgtggaacaccaattaccaactggaagtgggctcgatccaaagagtgtgtattatcagtaaaatgcttcgcaacttagtcgtcaggaatgcgtgcagaaacaggccgtcaattcaagtggcaagggggttatgccgacaccaaacaagacgtctcatggcgtcctcccctcagttcggtaggaactccaatcaggaaaaaacagcgggctttataatggggattctttctatggctggtgctttatattttattgctcctaataggaagcctcttttcgcctcaaggaaggtagaatccgataaaaccgcagaggaagagctttccagtggtggtgagcaatcaccagaaaatgaagatgacaacgacagcaaaagcgatgaaaatggagatgacaacgacagcaaaaacgatgaaactgaagctggccctcaattagggggtgataaaattggtgcttcaaaagtagctgaagatggtgaattggttgttctagcagaagaagacaacaagtcttccgaagataaagatactgatgaatcaaaggtatcaaccaaagatgatgagcaatccaatgaagacaatgccaccgctaacaatcaaaaggatgaaaacataagttctgagaactcggaagaaaatactagtgacaaaacactagacaacaatgctggatcttctgaaaaaaaagatccagaacattcagatgatgaaaaatcgcaacagggacaatctgatgacaagacaactactgaagataataacggagaagaagaatcctcaaaaaaaactgtaagtgactcggaaaattcagttaagcaatctgaatctagcgatgaagagaaagaagaactaagaaaacaagaggaaaagcaaatgggtcctactgaagaagaggttcaacacgaaggtgcttataacccagacactggtgagataaattgggactgtccttgcttgggaggtatggcccatggaccctgtggtgaagagttcaaatctgcattttcttgcttcgtctattctgaagctgaaccaaaaggtattgactgtgttgaaaagtttcaacatatgcaagactgtttcagaaaataccccgagcattatgcagaacaactaaaggaaacatctgatgatgaggaacctcaagacaaagcaaaggtcaacacaatagaatcagcgccaaatgtttcaagcgcaaaggaaaatgctgcgaaaaaagcagagcaatcagatgtgaaaagggaaccattgaatgaggaatccaaaccttaa

SEQ ID NO: 77438 - DNA, 1389 bp, Saccharomyces pastorianus
atgaaaacacaacttgtaagatggcattattctcgcaatgctctttggaatcgtgctttctactctacgagaaaggccactaagaacgcttcgtcggcgactccagctactatgacatccatggtatctcagaggcaagatcttttcatgacagatccactatctcctggatccatgttctttcttccaaatggtgctaagattttcaacaaattgatagagtttatgaagttacaacaaaagttcaaatttggttttaatgaagttgtgacgcctttgatttacaaaaagactctttgggaaaagtctggtcactgggaaaattatgctgatgacatgtttaaggtggaaactacggatgaagaaaaggaggaatacggtttaaaaccgatgaattgcccaggccattgtctgatcttcggtaaaaaggatagatcgtataacgaacttcccctacgcttctctgatttttcaccactacatagaaatgaagcttctggtgcactgtcgggattgactagactaaggaagttccatcaagacgatggtcatatcttttgcactccttcccaagtgaaatcagaaattttcaactctttaaaattaatcgacatagtttacaacaaaattttcccctttgttaaaggaggttctggagcagagagcaattattttataaacttttctacaagaccggatcacttcattggagacctcaaagtttggaatcatgctgagcaagtactcaaggaaatcttggaagaatcaggcaaaccgtggaaactgaaccctggtgatggtgcgttctatggtccaaagctggatataatggttacggaccatttacgcaaaactcatcaagtcgctaccattcagttggactttcaactacctgagaggttcgatttgaaattcaaggatcaagacaactcgtacaagaggccaattatgattcatagagctacttttggttctatcgaaagatttatggctttactgatagattctaatgagggccgttggccgttttggttgaatccttaccaagctgtaattattcccgtcaatacgaaaaatgtgcaacagctagacatgtgcactgccttgcagaaaaaactacgtaatgaactggaagccgacgacatggaaccagttcctttaaatgattggcatttcaatgttgatctcgacataagaaacgaacccgtagggtataggatcaagtcggccattttgaaaaactattcctatttaattatcgtgggtgatgaggaagtacagttacagaaatacaacattcgagaacgtgataatagaaagagtttcgagaaacttacaatgtctcaaatttgggaaaaatttattgagctggaaaaaaactacaagtaa

SEQ ID NO: 77439 - DNA, 1017 bp, Saccharomyces pastorianus
atggataagaattcagttaacaaagatagtgaagaaaaagacgaaagacacaagattgaggttgtagatgatacaaatcctgacttcatcactgcagattcggaactgacacaagatctgcctgatgatgtagaggttattgacttggtccatttaaaaatcaaatcgttagaagatttgaacctttataggtttaagaatttgaaacaattatgtctcagacagaacctgatcgaaagcataagcgaagtggaagttttaccccatgacaagattgttgaccttgatttttacgataacaaaattaaacatatctcctctaatgttaataagctcaccaaattaacgtctctagacctgtcgtttaacaagatcaagcacatcaaaaatctagaaaatttgactgatctggagaatttatacttcgtgcagaacagcatttccaaaattgaaaatctgtccactttgaaatcactgaaaaacttagaattaggtggtaataaggttcattctattgaacccgattccttcgaaggtctgtcaaacttggaagaaatttggttgggtaaaaattccataccaagacttattaacttacatcctttaaagaatttgaagatattgtccatccaatctaataaattaaaaaaaattgaaaatctagaagagttgaccaatcttgaagagctctatctgtcacataatttcatcaccaagattgaaggtctagagaaaaacctaaaactaactactttggacgtgacctccaacaaaattacctctctggaaaacttgaaccacctgtcaaatttaactgacatatgggcctcctttaacaagatagatcaatcctttgagagcttgggtgaaaacctgtccggcctatcacgcttggagaccatttatctggagggaaaccctattcaactggaaaataagacttcgtatagaagaaaactgactatgaacttacctccatccctacagaagattgatgcgacatatataagaggctga

SEQ ID NO: 77440 - DNA, 378 bp, Saccharomyces pastorianus
atgtttagatccgtttgccgcatttcttcccgcgtggcaccttctgcgtaccgcactataatgggccgttccgttatgtccaacaccatactcgcacaaagattttattctgcaaacttgagcaaagatcaggtttctcaaagggtcattgatgttatcaaggcgtttgataagaactctcccaacattgccaacaagcaaatctccagcgatacccaatttcacaaggatttggggttggactccttggacactgtcgagctgctcgtagctattgaagaagaatttgatattgaaatccctgacaaagtggctgatgagttgagaagtgttggtgaaacggtcgattatatcgcttccaatcccgacgcaaactaa

SEQ ID NO: 77441 - DNA, 1605 bp, Saccharomyces pastorianus
atggaagttgcaccggccttatcgactactcagtcggacgtggcgtttcagaaggtggagacacatgaaattgacaggtcttcatacttggggccatgttataatagcgatgagcttatgcaacttatctcggcttattacaatgtcgagcctctcgtgggttatctggaacagcacccggagtaccaaaacgtgaccttgcagtttcccgacgatttaatcaaggactcctcgttgatagtaaggctgctgcaatcgaaatttccccatgggaagataaagttttgggttttagctgacacagcgtacagtgcatgctgtgtagatgaggttgctgctgaacacgtacgtgccgaagtcgtggtacattttggtgacgcatgtttgaacgccatccaaaacttgcccgtggtttactcattcggaactccatttttggatttggcactggtggtggagaactttcagagggcattcccagatctatcctccaaaatctgtttgatggcaaacgcacccttctctaagcatttgtcacagctgtacaatattttgaagggcgacctgcactacacaaatatcatatattcccaagtgaacacctctgcggtagaagaaaaattcgtaaccatacttgacacctttcacgttcccgaagacgtagaccaggtgggtgtgttcgaaaaaaatagcgtgctgtttggtcagcacgacaaagcagacaacatctcgcccgaggactatcatcttttccatttgaccaccccacaggatccgagattactgtatttgtctactgtgtttcaatctgttcatattttcgatccggctttacctggcatggtaacggggccatttccctctctgatgaggcgttacaagtacatgcatgtggcaagaacagcgggatgtataggtattctggtcaacacgctgtcgctacgtaatacaagagaaactatcaacgagctggtcaagcttatcaaaactcgtgagaaaaaacactatttatttgttgtcggaaagccaaatgtggccaagctagcaaactttgaagatattgatatttggtgcattctcggttgtagccaaagcggtatcatcgttgatcaattcaacgagttttacaagcccattattacaccttatgaattaaacttggccttgagcgaagaggtcacatggaccgggaaatgggttgtggacttcagagacgccattgatgaaatcgagcagaatttgggcggacaagataccatctctgccagcacaacttccgatgaaccggagtttgatgtagttaggggaagatatactagcacttcaagaccactgcgagcgctaacgcacctggagttagaggcggccgacgacgacgattccaaacaactgactacaagacatactgcctcaggtgccgtcattaaaggtactgtatccacttcagcatcagcactgcagaatcgttcgtggaaaggtctaggaagcgatttcgactctactgaggttgataatactggagcggatatcgaagaaggtatttccggtgtcgcacgtggttatggatttgatcgcgaagacgctataaaaaaggaaaacaaatga

SEQ ID NO: 77442 - DNA, 1200 bp, Saccharomyces pastorianus
atgtttaagaaatacaaaaatcaagacttggacatggcattttggtggaagaaaaaccccaagaccccttccgattatgccaggttgatcatcgaacaactaaataaattcagctcaccctcgctgactcaggataacaaacgaaaggtacaagaagagtgcacaaaatatctaattggcactaaacattttattgtcggtgatacggatcctcacccaactccggaagccattgacgagctttatactgccatgcatcgtgccgacgtgttctatgaactgctacttcattttgtggacttggaattcgaagcaaggagagagtgcatgcttatattctctatatgccttggatactctaaggataataaattcgtcacagtagattatttagtctcgcaaccaaagaccatatctttaatgttgaggactgcggaagttgctctacaacaaaagggttgccaagatatctttttagcggtagggaatatgattattgaatgtatcaaatacgaacaactttgtaggattatattaaaggaccctcaactatggaaattctttgagtttgcgaaactgggtaatttcgaaatcagtacggaatctttacaaatattaagtgccgcatttactgcacatcctaaattagtgtctaaggaattcttcagtaatgagattaatatcataagattcattaaatgtattaacaagttaatggcacatggaagctatgtaacgaaaaggcagagcactaaactgttggcgtcattaattgtgataagatctaacaacgcgttgatgaatatatatatcaactctccagaaaacttaaagctcataatgactttaatgactgacaaatccaaaaacttacaacttgaagctttcaacgtattcaaggtgatggtagcaaacccaaggaagtcaaaacctgtttttgacattcttgttaaaaacagagataaactattgacgtattttaaaactttcggtttagattctcaggattctacttttcttgatgaaagagaattcatcgttcaagaaattgattccttgccgcgtataatttcgtccacaacagaagtttctaataacaatgcatcctcaagtaacgccgccagtataacttcgccatcatcagtaatgaacaatcaatcatccatcttaacacattcaacttcacctgattcaagataa

SEQ ID NO: 77443 - DNA, 2253 bp, Saccharomyces pastorianus
atgaggatcgaaaagcaccgtacccccctgtcgaagggaattatttggacgatattgtctgtgtgccttttattcatgttcaccacactgatattggttattgtagccactgctggctccaccgccaactacaagcccttaacgaatatatacatcggtgaagccgatatcaaacacatcaatgtaagcaaggtgatcccgcagataggccctattttgacaatattagggtccgctttgacggctccgaacagctccttggatgatatttttggcgccatgaaaaatattgctgatactcccgcgctgacgccgctattgacgcttttgtctaatgctgacaataccacagtaaccatcgaatcattgaccgaattggctcccttagcgatcagcggcaatcctgcttctagcacgaggcagttgacagagattaatgggctgctgaagtattcagacaacgcaactgaaacactagatggcctctcaagattagtttctgcttcgctgtcttccgcaagctctaactcttccagtgactcaactactttggttctggacttattaaaagactccgataacccacagaattccacagatgcattgctaactctgaataatctgacaatgtcagaaaaggcgcaattgttaccggtattcaggctattcgctttctccacgaaccaaacagctacaatgacggctctggcgaccttgatgaacactactatttcatcttctttagcccaaacactattaactcagttacaaaacacaatttcaaacggaggttccctaaataacacgtttagtactttgcaaccactagtgccgcaggcaagcgcccccgcatttaatgcagtggaattgctgctaaaccagaccacctctacaaatcagacattgagcactctatctgatttgctggaacaaaacgtcactcagtcatcatctgcaaaaaaggcgtttgctgccttaacccaattgatggaaaattcggacaactcgacaatggttgtcacttcggtccaatctctagctgcggtgacaaatacaactcaatctactcaacagctaattggattagatgatgtgataagctcctcgagtaacaccaatgaaaccttgtccatcttgtccgaattacaatcgggcctatccggtaattcaagctccgtacagtacatcccatatctcttcagtcttttaggggcatcctctgatcctaaaacaacattttcatctttagtgacgctgacttcctgggctcaagaaaaccctcagaccttcttgcccattttagatatattagcggatgccaaatccgtccaaccgatttccgcagaagaattgaacgccatgacgccgaatatactagagtatctgaaaattccgatttactatcgcttatccattttcacgctatgccatgctaacctggaaaacaagatcctagattgtaactccccacatgctgtacaaaacttggattttagatcgattatttatgacgcattagtcacatcagacttccaaccatatctgaacgccctgaatattagcgccaacgatctttacttagaagggaaacttttacacagagagcaccaatatgtgccagcagtgaggtctgttttggctttgaacctcttagcgatcatcttttccttctttaccatgatttttattatattactgtactttaacagatatatgttcaaacaaccattatggctcattgccctagctctacacgtttgcgttggtgtagccactgtattggcagccattatcatatccgttatgattgccattataaagagcggtacggcagatgataaatatggtgttgtgtttaaagccggtcccgcctatacagggctgatatggacagcatttgcgttgtcttttatcgccacaggattgataatttatacgtggtggaggaacagacggagtggtcgttacatgtccggatctgtaacgaatagaaaaggcgaaaattacacgtatagggatggttctgccatttctgcagaccgtttcggcgaccataacttgggtgatgatgatgatgctgatttcgaaaaacaggtgtatcgtaatgaaataaccgctatcgacaacagtagttctgccaataatacagatgtcacaggtagcacgagtgatagaacagagctaagtcaccccgacgtgacaccgaaagattcaaatggacctgttaacaataatgcacatttggtagcatga

SEQ ID NO: 77444 - DNA, 555 bp, Saccharomyces pastorianus
atgaacaccaatagtaatactatggtaatgaatgacgcaaatcaagcacaaataacggccacatttacgaagaagatattagcgcatttggatgatccggactccaacaaattggcccaattcgtacagctttttaatccaaacaactgcagaataatatttaatgctacccccttcgcgcaagcaacagtttttctgcaaatgtggcaaaaccaggtcgtacaaacacaacatgccctaacaggagtagactatcatgctattccgggatccggcacgttgatatgcaacgtcaattgcaaagtcagattcgacgaaagcggcagagacaagatggggcaagacgcgacagttcccattcaaccaaataacactgggaacagaaatcgacccaacgatatgaacaagccaagacctctatggggtccatattttggcatttccctgcagctgatcatcgacgaccgcatatttagaaatgattttaatggtgtaatatcggggtttaactataacatggtttacaaacccgaggattctctgctaaaaatttag

SEQ ID NO: 77445 - DNA, 1401 bp, Saccharomyces pastorianus
atgtctagtactcaagtaggaaatgctctatctagttccactactactttagtggacttgtctaattctacggttacccaaaagaagcaatattataaagatggcgagacgctgcacaatcttttgcttgaactaaagaataaccaagatttggaacttttaccgcatgaacaagcgcatcctaaaatatttcaagcgctcaaggctcgtattggtagaattaataatgaaacgtgcgaccccggtgaggagaactcgtttttcatatgcgatttgggagaagtcaagagattattcaacaactgggtgaaggagcttcctagaattaagccattttatgccgtcaaatgtaatcccgataccaaggttttgtcattattagcagagttgggcgttaatttcgattgcgcttccaaagtggaaattgacagagtattatcgatgaacatctcgccggatagaattgtttacgctaatccttgtaaagtagcatctttcattagatatgcagcttcaaaaaatgtaatgaagtctacttttgacaatgtagaagaattgcataaaatcaaaaagtttcatcctgagtctcagttgttattaagaattgctaccgatgactctactgctcaatgtcgactttccaccaaatatggttgtgaaatggaaaacgtagacgttttattagaggctataaaggaactaggtttaaacctggctggtgtttctttccacgtcggttcaggcgcttctgattttacaagcttatacaaagccgttagagatgcaagaacggtatttgacaaagctgctaacgaatacgggttgccccctttgaagattttggatgtaggtggtggatttcaatttgaatccttcaaagaatcaactgctgttttgcgtctagcgctagaggaatttttccccgtaggttgtggtgttgatataattgcagagcctggtagatactttgtagctacagcgtttactttggcatctcatgtaattgcgaagagaaaactgtctgagaatgaagcaatgatttacactaacgatggtgtatacgggaacatgaattgtattttattcgatcatcaagagccccatccaagaaccctttatcataatttggaatttcattacaacgattttgaatccactactgcggtcctcgactctatcaacaaaacaagatctgaatatccatataaagtttccatctggggacccacatgtgatggtttggattgtattgccaaagagtattacatgaagcatgatgttatagtcggtgattggttttattttcctgccctgggtgcctacacatcatcggcggctactcaattcaacggttttgagcagactgcggatatagtatacatagactctgaactcgattga

SEQ ID NO: 77446 - DNA, 213 bp, Saccharomyces pastorianus
atgtattcaatgatcttgctataccgtagtaacgttctgttcatgaactttttctctgtttttgtatgtacaattggtactttatttttggttttcgcagatgtctatgttcttgcgtcggcatttttccaaagtaaaaaggaaagagagacaaaatttaagcattttcactaccaaaaaagatcctgtttctttctagcaaatatacactaa

SEQ ID NO: 77447 - DNA, 921 bp, Saccharomyces pastorianus
atgatgaaaaaaaaaccaaagtgccaaattgcaaggaccaaaccatcggtcgaaaacgtcataccatataaccaattcaagaagacgcagccgcgattcaacggcaacttttcggcactgaataatgaagaatacataatactctttggcggaggtcgggacctgatactaggctccctgacaccttgttcgagctctcatttgtccaatcaagccaacccacaagacaccagtgagtatggcacagacctgtttatactcaacagctgcattatcatttggttcaacggcttgggatatgggctggaaattccctacagcagcgttttgtaccatgcatcaagacggctaccagatggtagggaagggcttcaattagaaattttgctgactttggaaagagacgaagtgttggacatgctctaccaaagcctcgcgccacaggcctgcgaattcgacggcgaagaagcacatgccttcaccgtgcgcagcgtggaattgaccatcaggcccaaatattcaatatacgatcgccattataacaacgaaatcgaaacccttttcaccttcgaaaacttcggcgtgaacaggggcgatgacctggtaaacaattgtaacgaagcactagccgtatgcatggacctgcacggtgaggacgtacaagatcaagaccaggaacaataccaagatccaagcatggcgtttgagggtgcgcaagatctcaacgccacgtattctgggcttggagacacccttcacgggccgcccgtgtatcagaacgacgggctggcagacgatctggatggcgacctcgttatggacaacgtggtctctaggggtggtccagaagcaagtatgtctatggagttctacgcaaatcaaaatcttgctggcagaaagaactccagagacgatgaatga

SEQ ID NO: 77448 - DNA, 1284 bp, Saccharomyces pastorianus
atgcgtaagtgtaaaatttttgttggtaactctcacccagagttgggtaatatggtttgccaaagattaggtatcgaaccagctccatgtacattaaaaaaatttgcaaatggtgaaacgtcagttcaaatcggtgtatctgttcgtgacgaagatgtgtatgtcattcaatctggttctccatccataaatgatgacattatggaactgttgattttagtttctgcctgtaggggcggatctgctaggaaaattacagcagtcattcctcaatttccttactctaaacaatgtaaaatgaagagacacagaggcgctattactgcaaggatgttggccaatctgttggtcatggctggcgctgatcatgttgtgtctatggaccttcatgcttctcaaatgcaggggtttttcaccaaaccagtcgataacctatacgggggcccaagtttagcgaaatggattagagaaaatgttgaagactatgaagatgcagtagttgtctctaagaatccaggtggtactaaaagagttacagccctggcggattctttgaagatcaactttgctatgatccatactgatcgtcgtcgttctaaggatctgtattctcaaaacaaggatttgcaacaactaaagttgagaaagcaatcaatgttgaggaaaaatagaccgatcatcagacaaggtgaccatccaaatgaggaggaaaacattattttaagtaacggtattcaaactgctaggatccgtaacggccacgttatcggtgacgatgaggcagacgatgatgaagacgctatcttagaatctgacagcgaattgcattctattgatggcttagactcgcatggcttgggcggtacatatgatgctgtcgactccgaagacgaagaggaaatcccagttctctatagggaacaactgattacattggtcggaaacgtccgtggtcgctctgccatcattctagatgatatgattgatagacctgggtcatttattagcgctgctgaacatttggtgcaaaattgtggtgccaaaaaggtttatgttgttgctactcacggtatattcactggagactgtttggaagaacttgaaaagtccgatgccattgacacaattgtggtcacaaatacatatccgatttctggcgaacgcatagctgggtccaagaaattggttactatcgatgtttctccaattttcgcagaatgtatccgtcgtgatcattatggtgagagtatttccgttttatttgactctttggcagctctgtaa

SEQ ID NO: 77449 - DNA, 2040 bp, Saccharomyces pastorianus
atggatacgtcagtatattctcatgcattggatatttgggccaaggcagatttaacgaatcttcaaagagaattggatgctgatgttatagagattaaggataaagaaaccctgtccttgaattcaagaaagtcattagccactgagactaaaaaatttaaaaaactcgaacctgaggaaaaattgaacaatgtgaataaaataattaagcagtaccaacgtgaaattgataatttgacacagagatcaaaattctctgaaaaggttctttttgacgtatacgaaaagctttcagaggctcctgatccacagccgctactacaaagttcgttggaaaaattgggcaaaattgatgactcgaaggaacttaaggaaaaaataagctatttggaagataagctagccaaatatgcagattatgagactttgaaatcaaggttattggacctagagcaaagctctgcgaaaacattggcaaaaagactgactgcgaaagctcaagaaatcaattctacctgggaggaaaaaggaagaaattggaaagagagagaagcagatctattgaaacaattaacaaatgtacaggagcaaaacaaggcactagaggccaaaatatctaaaaatatagatatagaaggtaatggaaacgaagatggtgaccaagaaaacaatcaaaaagaagtatctacaaggattgctgaatataatctagtaacccaggagttggaaactacgcaggctagaatatatcagttagagaaaagaaatgaggaactaagtggtgctcttgcaaaggcaactagtgaagcagaaaaagaaactgaattacatgcaaaggaactaaaacttaaccagctggaaagcgaaaatgcattgttgagtgcatcctatgagcaggaacggaaatcaacatcacatgcaataaatgagttaaaagaacaattaaatagcattgtggcggaatcggaatcttacaagtcggagctagaaactgttagaagaaaactaaacaattattctgattacaataagataaaagaagaactttctgcattgaaaaaaattgagtttggggtaaacgaagatgattctgataatgacattcgctctgaagacaagaatgataatactttcgaaagttccttactatctgcaaataagaagctccaggctactttggcggaataccgctcaaaaagtacggctcaagaggaagaacgaaacgaattgaaaaaatccgtggaccagttgaagcagcaaatagctattcttaaagaagcaaatgaaaaattagagacggacctagaaaaagtagaaaacgtcagtcctcacttcaacgagactgcaagtatgatgtctggtgtaacaagacaaatgaacaatcgtacgtcccataaaatgtccccaacgagttctattattggtattccagaagatggggaactttctggaaaccaatcaacccttttgccaatagttactaaacaaagagacagatttcgttcgagaaatatggatctggaaaagcaactaagacaaggaaactcagaaaagggtaagcttaaactagaaatttcgaagctaaaaggcgacaatacgaagctttatgaacggattaggtatctgcaatcctataataataacaacgctcccgttaatcaaagtacagagggtattgacgtggaatcccaatactcaagggtgtatgatgaatcgttgcatccaatggcaaattttagacagaacgaattaaaccattacaaaaacaagaaattatcagctttagagaagttattttccagttttgcaaaagtcattttacaaaataaaatgacaaggatggtattcctctgttactgtatcggtttacacggactcgtattcatgatgagcatgtatgtgattaatattagcggctacatgacacctgaggttggtatagtacaatcggcaaagtcttcttcaaatctcaacggaggacttgggggagcagaaaaagtagctgcaggcgttggttcagttcatggcataaaccgatag

SEQ ID NO: 77450 - DNA, 1413 bp, Saccharomyces pastorianus
atgtcatacaagtcagcaataatagggctttgtttgctagctgtgatactattagcgccccctttagcatggcattcacataccaagaatattccagcaatcattttgataacatggcttcttacaatgaatttaacgtgtattgtagatgcggcaatatggagtgacgacgatttcctcacgagatgggatggtaaaggttggtgtgatattgtcatcaagttgcaggttggtgcgaatattggcatatcatgtgccgttaccaacatcatttacaacttgcatacaattttgaaggcagatagtgttttaccggatctttcatcatggacgaaaatcgtcaaggaccttgtgattagcttgttcacacctgtcatggtcatgggattttcatatctgttacaagtatttagatatggtatcgctcgttacaacggttgccaaaacttattgtctccgacatggattaccactgttttgtataccatgtggatgcttatatggtcatttgtgggcgctgtttatgccaccttagtactgttcgtgttttataaaaaacgcaaggacgttagggatattttacactgtaccaattcaggtttaaacctgacaaggttcgcaaggctgatgatattctgtttcattattattttagtcatgttccctttttctgtttacacctttgttcaagatttacagcaggtagaaggacactatacttttaaaaatacccattccagcaccatctggaataccattattaaatttgaccctggcagaccaatttataatatatggctttatgttttgatgtcttacctagtatttctaatctttggcttaggttctgatgctttgcatatgtactctaaattcctgcgttccatcaaactaggatttgtacttgacatgtggaaaagattcattgataagaataaggaaaaacgagtaggcatattgctaaacaagctgtcctcacgcaaagagagccgtaacccattttctacagactctgagaactatatctccacgtgtacagaaaactattctccctgtgtaggtacaccaatatcacaagcgcatttctatgtcgactataggattccagatgatcctagaaaatctcaaaataaaagcaaaaaatatttgtttgctgataaagaaacagatgatattcttgatgaaatagacctaaaagaaagtaggcacatcccttacgtcacgcaaggacagagctttgacgacgaaatatcacttggaggattctcaaaagttactctcgattattcagaaaagcttcataattctgcaagctccaattttgaaggggaaagtctttgctactctccagcttcaaaagaagagaattcaagctcaaacgaacatagttcagaaaatactgcaggcccttaa

SEQ ID NO: 77451 - DNA, 339 bp, Saccharomyces pastorianus
atgatgttggtaacggcacatgatatgccaatattcgcaccaacctgcaacttgatgacaatatcacaccaacctttaccatcccatctcgtgaggaaatcgtcgtcactccatattgccgcatctacaatacacgttaaattcattgtaagaagccatgttatcaaaatgattgctggaatattcttggtatgtgaatgccatgctaaagggggcgctaatagtatcacagctagcaaacaaagccctattattgctgacttgtatgacatgaaaattttgatagtattttgcctttcctacacaaatttaattgcctctaaagttaaaaagcaataa

SEQ ID NO: 77452 - DNA, 2487 bp, Saccharomyces pastorianus
atgttgggtaatttactgagaaataagacgagttcgtctggttttgagaagagctcagagcattccgatttttcctccgtagttcccaatgtccctgtatactgcaaagcggcaagcacaggaactactaagaccgctgctggagctcttttagatactgcagtcaatgtggaaaagccttcggaaatgctatcaacgacttctccgcccattttagatcatatatcggatgacttaaaactgaagcttttcggctcgagggatattccttatagtcgtcctatcgatacgttacaaaacaacggaggtcttggtactgataaaatcacgtctattaacgaaaaaacgtatgcattcaggattttgatcattgaggaagcgggtcaaatggcgtgtaggaacaactaccgtgatatcttcgattacactacgtcaaagatttcaaattcgatggagcagatacggccgagtgaattgaaggaatatatatttggttctcccgtaagatcttccgatttgacgcagtgcgacaagataaggacgattcctaactcggatttggtactcataactagaattttctattacacacaccaatacaaccgcatcgcaattagcttatgcataccgaggatattgttgcccgtagttgcagagtcgtggtcttccatttcatcatggttgacccagactcaaagaatgctcattggtttcttgactaaaaaccgtattatgcaagaaaatactggcaattacagcaataattcagccataaaattgtcaaatattgacatcaggacgcattatcccaaggaaattgaaataatggtgcaaactttacaaaaaagagtcataccaggtttacgttctatgtctgagattcctaggcttttcctttaccctgagacatttaaagaattcgttcacgtttggttcaaaagtatatttaattggattgaaatcaaagatggaccgaaactaggcttccttcctctcctaatggcaatgattatatctgattacaggcacactataagagaactaaagacatccaagatcgtaatcctgtcaggaaacatggtagttgctaacaagttactgttcatcttatcggctttattggagccaaagtacaagggacaaataacgatacggcgggaaaacataagatcggattcgtccgctgtatcaagaaataagtctaacaataattttgtcgataagcctgagacggaattgagcacactgacttcaacagacaaccttttgagtcgcacagaaaataatagcaatcataattgcaacaacagtaatgtgagctctaacagcattggatcacccaatttccattctttgaggaaaggatggcaaatacccaatcggaggaactcgaacacttcagtatctgtgtcttctagtgagtctttagcggaagttattcagccatcttccttcaaaagtgggagtagttcattgcattatctatcgtcttctatctcaagccaacctggttcgtacggttcttggttcaacaaaaggccaacaatttctcagttctttcaaccaagcccttctttaaaacacaacgagtcgtgggagaggctgcaaacaactgctggaaatatgcaaaggacttcaagttcgtcttctttgcagcaagcaacctccaggttatcactaaccactccgcaacaatcaccgtctatcagcgaatatgatgagtatccttggatgggcacacctggctctcctaatgttggagatgtgtctcacgcacccccattggttaagaatatatcatataaatttccactaaagaacgttgagttgaaaagagattgccaaaggatctctcaggatgatcttttggatgaggcttttgaaagaatatgtcagccctctttggctgaccttaattccacttacgaaatttttccaggtaactcttcttatgcggatattttgactactgattctgatattgatgatggcttgatgaataaacctctggaactattgccgaaatatacaatgtatttaacccattttaacaattttttccagttgcaagcatgtcctgctggtcaagaatcagagagcagaataacaaattctatgaagattgacctgttaaaggcggattacacaagaagtctattagtatcgttacgttcaagggacattagggatgtcgcattgaaaagagagtttactggcaataacaacaataacagcaaccagaatatctatgatgagaattttgtcggaaaaaggaagtacgtgttgaaacagaagaccagaaaaatcttttcctgtggcaagattggcaagctaagtactagtttggaaaactgcgttaattttgttgaaaatagtataaagagtgcaatgatgttatatgatgataatggaatagatagtgagcttcgcgattcagaagctttacggattttttcatctcttgtccattattgtaatgcaggttaa

SEQ ID NO: 77453 - DNA, 1512 bp, Saccharomyces pastorianus
atggaaaaaattcccaggtggttgttgttttctcttatatcgtcggtgctgtgcatacttggggccctgtgtgtgccgttgttatcggttgccttcgatagcaagcgcaatagccaatctaagttggtcaactatggtctttctctaagtgccggatctatgatcactacttcactatacatgctattgcctcggatcgaaaaatcaaaccggttcaaggtttttcctggattgcttttgggtatttgcctcagttttttcttaaactacctagtccacgctttcgccagcgaatcgttggtacactgtgctgatagcggtgaccatgctacaggttcacatatacactccaaatcacattcgcattcgcactcacactcacatgcggattcgcattcgaattttagcaacgatcatgatttagaaaatgctccctctgagcatggttatgcaacatcttcttccagtgtttctgaaaatgacccgttgattacaaaggatagcgatagaccccaaatgaaaaagaaaatgtccctaattgacttactaaccagaaggaaatcagaaggcgagtgttgtgacctaaacaagtgcactccgctcttgcaatcagagcagccagaatatattgcatgtgtcccaccagtgataaagtcttctcaaagtgaaagaaacgtgccacatggatgcgagggatcagaagataatggacaatccgatgacaaggatcatcgtggccttgtatgcgtggaaaataatatcggttacgatcttgaaaacctatcgttgtaccgtaagaattttctttcgagccgccatcatcattcctctgaatcgcccgaaaattatggttccaaccagttgtcgcactctttttcgtcacctttgggaaatgatgtaactgagaatccggccgcattggcagacacacaataccatcccgaaaatggttcattatacccccaccatcatcacttagagacccctttttccaaattactgtctattggtatgcaaacttgtctagtccttgcattacacaaatttcccgaagggtttattattttttacactaacaggtcagattcgtcaaagtccttgggattttccatttttttaagtttgacgatccataattttgtcgaaggatttgcaatgacgttaccattctacactgttttcgaatctaaatgggttgccattttgattactgccgttctcggtggtggatctcaaccattaggtgcattgataggttatttcatctttaaaggtagtactccaagggatcacgaacccaacatggattttttactgagcgttactgcagggttcctattagtaattggtttacaaatgttccaaactggtatcggatttagcgatggacatcatcatcatcaaggagaaggtgatgaagaaatgaaacagtcccatagctcaggcacaacttgcttgaaatggtgctgcactggcgttttgctaattctagcgagtgcccttttcacttga

SEQ ID NO: 77454 - DNA, 1857 bp, Saccharomyces pastorianus
atgccagagtatacgctactggctgataatataagggagaatatcgttcatttcgatccgaatggtttgtttgataacttgcacaccattgttcatgaagatgacagtcaagagaacgaggaggccgagcatttcaattatgatcaggtgttggataaatcgttattgtcaagaggttctattgtcggtctcggtttaggactaatgagtcccgttttaggaatgtgcactagtatggccattgggctaattaatggtggtccgttaactataatgctaggttttttaatcagtggagtgtgtatatggttttcgtcgctttctcttggtgagattgtttcaaaatttccgatggaactgcatgttgggagtgccatgttggccccggagaaattgaaattagtatgttcgtggtacactggctggttaatgctcatagggaattggactatgagtaccagtattacttttgcaggcgctcaacttaccatttctttgattctgatgacgaactccaacctaatatccgaggcacacttgattttttacacagtcattgtattttacttagttgtgactgttgtaggcctcgtgaatttgaaatttgcaagatttattgaaacaataaacaaagtctgtgtttattggatcatatatgccattatatttattgatattcttctactagtattccacaaaggtaaatttcgatctttgaagtacgcgctatttcactttgataataatctatcagggtataaaagcgcatttctttccttcatcattggattccaacagtctaatttcacgttacaaggtttcagtatgttacctgctttagctgacgaagtcaaagttcctgagaaggatattccacgtggtatgtcgaatgcggtattgttatccgcgttctctggagtcatttttcttataccaataatgttaatcctgccagataatgatttgctttttaccaatcataaggttctgccaatagtgaacatttttacaaaatcgactgattcggtggtcttgtctttttttttagtgctcctaattttaggaaacttactgttttccggaattggctcgattactacatcttctcgtgcggtatatagttttagtcgtgaccaggccataccatactacgataaatggacctacgtcgaaccggattctcagtcaaaagtccccaagaattctgttgtattgagtatgataatatcatactttttaggactgctggctttgatttcaacggccgcatttaatgcttttataggcgctgcagtgctctgtctttgttctgcgacttttattccgttagtcttagtgctgtttacgagaagaagagctatccgaagcgcgccagtaaaaatcaggtataagtttggttggttcatcaacattgtttctattgtgtggctcttgttatctatggtttctgtttgcctaccaacgcaagtgcctgtaactttcaaaacaatgaattatgctttaatggtgtacgtattctgcattttagttatcactggtctttacttcaaatgggggaagtataattttagattacccttggcagatgacatcaaggctccaattcccagtgatgcggaagaaactgtttttgaactagaggatagcaatgttgaacatactctaaactcgggaaccacagtgaaagagtctgtagaaaataattctgaagaaggtttcatcaaggtgcatcctaaaagtagtacagaaaatccctttgaggaaaatgaggaaaacgtgataaccgattatggtgatgagcaccatacagcagaacaagaatttgatcttgccgatgatcgtagatatgatatatga

SEQ ID NO: 77455 - DNA, 3027 bp, Saccharomyces pastorianus
atggaaggtgacgatttattcgatgagtttggaaatttgatcggagttgatccttttgactcggatgaagaagaaagtgtgctggatgagcaagaacaatatcaaaccaatacgtttgaggggagcggcaacaacaatgagattgagagcagacaacttacctcgttaggaagtaaaaaggaacttggaatttccttagagcacccttatggtaaggaagtggaagtattaatggaaactaagaacacacagtcaccacagactccactggtagagccggttacagaacgaacaaagttgcaagagcatacaatttttacacaattaaaaaaaaacattccgaagactagatataatcgagactatatgttatcaatggctaacattccggagaggataataaatgttggtgtcattggacctcttcattcaggtaagacctctttgatggatctcctagtaatcgactcacacaaacgcataccagatatgtctaagaatgtagaacttggatggaaaccgctaagatacctggataatttgaaacaagagattgaccggggtctttccattaaacttaatggttccactctgctctgcaccgatttagaatccaagtctagaatgataaactttttggatgcaccagggcatgttaattttatggatgaaacggcagtcgcacttgcagcaagtgatttggttttaattgtgatagatgttgtagaaggtgttacatttgtggtagagcaattgataaaacaaagtattaaaaataatgtagcaatgtgttttgttataaataaactcgacagattgattctagatttaaagttgccaccaatggacgcatacttgaagttaaatcatataattgcaaatatcaattcctttacgaagggaaacgtgttttcaccaatagacaataacataatatttgcgtctacaaagctgggcttcacattcactatcaaggaatttgtttcttattattacgcccactccataccttcttctaagatagacgactttaccacaaggctatggggtagcgtatattaccataaaggtaatttcaggacaaaaccatttgaaaatgtagagaagtacccgactttcgttgaatttatcctcatcccgctttataaaatattttcctacgctttatctatggagaaagataaattaaagaatttgttaaggtctaactttagagttaatttaagtcaagaggccctccagtacgatccgcaaccttttttaaaacacgttctacagttaatatttaggcaacaaaccggtcttgtagatgcgttaaccagatgttatcaaccatttgaattattcgacaataagacagctcatctttcaattccaggaaaatctacaccagaaggcactctttgggctcatgtactgaaaactgtggattacggtggagcagagtggtcccttgtacggatatactctggacttttgaagagaggggatacagtacgtatacttgatacatcacaatctgaatctcgccaaaaaagacagttgcatgatatctcaaagacggaaacctccaacgaagatgaagatgaagatgacgaaacgccttcatgtgaggtcgaagaaattggcttattaggtggcagatatgtctatccggttcatgaagcacacaaaggacagatagtattaataaaaggtatttcaagtgcatatattaaatccgcgacgttgtactctgtaaagagtaaggaggacatgaaacagctaaaatttttcaaacctttagattatattaccgaggcagttttcaaaattgttcttcaacctttactgccaagggaattacccaagttattggatgccctgaacaaaatttcgaaatactacccaggcgttattattaaagttgaggaatctggagaacatgtaatactaggaaatggagagctgtatatcgactgtttgttgtatgatctaagagcgagttatgcaaagatagaaattaaaatatctgatcctttaactgttttttctgaaagttgctcaaatgaatcgttcgcttcaatacctgtaagtaattcgatatctcgccttggtgaggaaaatttaccaggtctgtcgattagtgtagccgctgaaccaatggactctaaaatgattcaggatttgagcaggaacacattgggaaagggtcaaaactgcttggatattgacggaataatggacaacccaaggaaactatccaaaatattgagaaccgagtatgggtgggattcgttggcatcaagaaacgtttggtctttttataatggcaacgtgttgattaatgacactttgccagatgaaatcagtcctgaattattatccaaatataaggaacaaataatacaaggattttactgggctgtaaaagaggggcctttggcagaagaaccaatttatggtgtacagtataaattgttatcgatctcagtaccttccgacgtaaacattgacgttatgaaaagtcaaattattccgctaatgaaaaaagcctgttacgttggcttactgacagcaatcccaattttattggaacccatctatgaagttgacatcacggtccacgcccccttgctgccaatagtagaggaacttatgaagaagagacgtggaagcaggatatacaaaacaataaaagtggcagggacaccattgttggaggttcgtggacaagttccggttattgaatctgcaggattcgagacagatttgagattatctacgaatggtcttggtatgtgtcaactgtacttttggcacaagatatggaggaaggttcctggtgatgttttggataaagatgcgtttattccaaaattgaaacccgcacctatcaacagtttaagtcgtgatttcgtgatgaaaacaagaaggcggaagggtatttctacaggaggatttatgtcaaatgatggtcctacgctagaaaagtatataagcgctgaattatacgctcaattaagagaaaatggcttagtaccgtga

SEQ ID NO: 77456 - DNA, 1278 bp, Saccharomyces pastorianus
atggctaaaggtttcaagttgaaggagttgctttcgcatcagaaggaaattgaaaaagctgaaaagcttgagaatgacctaaagaaaaagaaatcccaagaattgaagaaagaagaaccaactatcgttacagcttctaatttgaaaaagcttgagaagaaagaaaagaaggccgatgttaagaaggaagttgctgcagatactgaagaatatcaaagccaagccctttctaaaaaagagaaaagaaagttgaaaaaagaattgaaaaaaatgcaagaacaggacgctaccgaagctcaaaagcatatgtctggcgatgaagatgaatctggcgacgatagagaggaagaagaagaagaagaagaagaaggaagactggatcttgagaaattggccaaaagtgactctgagtctgaagatgattctgagtctgaaaatgattctgaagaggatgaggatgtcgttgctaaagaagaaagtgaggaaaaggaagagcaagaagaagaacaagacgttccattgtcagacgtggaatttgattctgatgcagatgtcgttccacatcataaactaaccgtcaacaacacaaaagcgatgaaacatgccttagaaagggtacaattgccatggaaaaaacattcattccaagagcaccaaagcgttacatcagaaactaatacggatgaacatattaaggacatatacgatgatactgaaagggaattagcattttacaagcaatcactggacgctgttttagtagcacgtgacgaactgaaacgactaaaagtacccttcaaaagaccattggattattttgctgaaatggtgaaaagtgatgaacatatggacaagattaagggtaagttgattgaagaagccagtgacaagaaggcacgtgaagaagctagaagacaaaggcaattgaagaaatttggtaagcaagtccaaaacgctaccttacagaaacgtcaattggagaagagagaaacactggaaaagatcaaatctttgaagaacaaaagaaagcacaacgagatcgatcactccgagttcaacgtcggtgtagaggaagaagttgaaggaaaaaggttcgatagaggcaggcctaacggaaagagagccgcaaaaaacgctaagtatggccaaggaggcatgaagagattcaagaggaagaatgatgctacctcttctgctgatgtcagcggcttttcttccagaaaaatgaaggggaagaccaatagaccaggaaagagtagacgtgccagaagattttaa

SEQ ID NO: 77457 - DNA, 2787 bp, Saccharomyces pastorianus
atgtttacgtcgcagcgacagcttcgacaaaatgggagtccgatgtcatcatcacgttcatcacaacattcctctggtacagcgtcgccgatatcagactctccagcatcgaatcgcagctatggaagagatctacgaggcttaatgggaattgatatacctgctaacgaaccagcttttaacagggccaatagcagtgatacaatctatttcaggcctaagaagatttacaaaatggaacatgagcacccatcacgatctactttagtacaactgcagacaagatcgcagccggacgatgtcgcaagtagtcaagtaaaccctgaaggcggaaccgacgatctagagctgggcgatccgtgtggcaatcaatctttatacactataggggcggagtacgttccagatttagactttacaaagctagtgaatgagtggcaaaagtccaccgaggatttgtatgagttcagaagcagtgccactccgcaggtacaaatcaaagacagtggaaagggaaactacgaactttggagctcaccggatgcaatattgactcaaaacaaacttcgaagagatagtttttcgcaagagaacagtgattcgttaagtccagaagattctattttatcaagaaatttgcattctaaggtcaaacccatccctctgcccagaaacagccagcaaatattcacacccctgtccaacttagaggcggaaaggcgatcctcatatacaactagtagcaacaacaatagcataacacagaataataaattctcttttgcgaagttaaagtattcacttccaactcaaagttctgcagttcctgcgtcgttcgattcaaatgcttcgtcactaaattttcttccgactactacattatcgaccttatcagagctacaaataagccccaacgatatgatggatttgattcagaagcttcccagaaattttttgaacttgccgtatactcaaaggaaaaaggtgattatcgagcatgcaccatctcatgactacaaggccatgatgtccctagttaagaagtttatgttaacatcttctagaagtaacttttctctcgctgggtttgccaataatgcttcagtttcgcaggccacggctaatgatgataacatcaatagtaggaacacgcccaataatagcaatgacatctacgtaaatacgcgtccacttcaaagatctaggcacggttccattgcatcccaatttttaagttctttttcaccttcgatgacgtcaatagctaaaatgaattcgaacccattgagtggaagcgcaggtggcagtgcgagaccagacgataagggtatggaaatactaggtcatcggttgggtaaaatcataggtttcggcgcatgggggatcatacgggaatgctttgatattgaaactggtgttggtagagtgataaaaattgtgaagttcaaaggacaccaaaatatcaagaaacatgtgctgagagaagtagccatatggaggactttgaagcataacagaatactcccccttttagattggaagcttgatgacaactatgcaatgtattgtttaacggaaagaattaacgatggtaccttatacgacttggtaatatcttgggacgaattcaaacgttcgaagataccatttgtagagagatgcagattgaccatttttttaagcttacaactattatctgcattaaagtacatgcattccaaaaggattgttcatggtgacatcaaattagaaaactgtctgttacaaaaagaaggtaaaaaatcggattggaaggttttcctatgcgattttggaatgagttgccacttcgatgagaagcatgtttatcgtaacgatacttttgatgaaaacttgagtagtggcaacagccatagaaagagaaaaagtattgaacaaactaatttgataaagtatcccacaaccaattttttacctgacgaccgaactaatgattttgacgctagtgaaaacttaaaataccaatttgaaaatcgaaagcatcaaccgtttacaccgaaaggaatggttagctccagttcacattcattaaagcatctcaatcaaccatcctcttcttcttcttctaatctatttcacaagccagcctctcaacctcaaccacagcataggagtccctttcatgggaggcacaagacaaccgatttttcaaacctggaacccgaaccttctaaatatatcggatctctgccttacgcttcgccagaacttctaagatactcagatgcaagacgttcaaaatcagttgaaatgcatatttatgattcaccagactcctctcaatcggaaattagcgcagcatcatcatcttcctctaatttatcttctctgtcatcctctacaaaggcatccgcagtcacgaattccggtgtaactacaagttcaccgtctggttcatcgactgattttccatgtattgtttctcctttaggaccagcatccgatatttgggccttgggagtaatgctatatacaatgttagtaggaaaattaccctttaatcatgagttcgaacctaggttacgctctctgattaaagtaggcgaatttgaccgattttctttagctcaggtctgtaaatttgacaggaaaaaaaatgaaggaacgattggtcaaggcttgtatgacacagtcattggatgtttgacgattgacttggataagaggtggaaattgaaaaggattgaagaagtccttcaaaacgaaatgaacttaagcgaggccattcacgataataatggctcatga

SEQ ID NO: 77458 - DNA, 414 bp, Saccharomyces pastorianus
atgtctaaggttgcacaacagttaaaatttttgaataaaattagcgccactaccagactaccgcagattctagtcgatcctaaaaaatactcaggtcttagattgacttttcaaacgaaaaaccacaatggacatatgggtgctagagttttttggcataactacctacccactttgcagttctataatccaagaatgaagtttgacgtgataaggataaagaacgaagacaagcaaaaaagcgttccatgcaaactggagattttatctcatgaaggctccgttgtagagactattgatatgcgtaataaaatgcatgaagatataatgaaagacttacttgacaaaatagagcacgttcctcttcctgaaaatgagatcataagagttagaccgcaagaaagtattatataa

SEQ ID NO: 77459 - DNA, 1197 bp, Saccharomyces pastorianus
atgtatgttgatcccatgaacaacaatgaaatcaggaaattaagcattactgccaagacagaaacaactccagataacgttggacaagacattcctgtaaacgcacattcggtgcatgaggaatgttcttccaacacacccgtggagataaatggaagaaacagcggaaagttgaaagaagaagcgtctgcaggtatttgtttggttaaaaaaccaatgctacaatatagagatacctcaggaaagtattccctaagtgactttcagattttaagaactttgggaactggctcatttgggagagttcacctaattcgttccaatcacaatgggaggttttacgctttgaagacattgaaaaagcacactatagtgaagctgaagcaggttgaacacaccaatgacgaacgccgaatgctttcaattgtttcacatccattcatcattcgaatgtggggaacgttccaagattctcagcaagttttcatggtaatggactacattgaaggtggtgaattattttctttactacgtaaatctcaaagatttcccaacccagtagccaaattttatgccgcagaggtatgcttagcgttggaatatttgcacagtaaggatataatatatagagacttgaaaccagaaaatatccttctagataaaaacggccatatcaagataaccgactttggcttcgcaaaatacgttcccgatgtcacatacacattatgtggcacaccagattacatagcgccggaagtggtcagtacaaaaccgtataataaatcagtggattggtggagttttggtgtgctaatctatgaaatacttgccggatacactccattttacaattcgaacaccatgaaaacttacgaaaatatactgaacgccgaattgaagttcccaccatttttccatccagacgcgcaggacttattgaagaagctaattaccagagacttaagtgaaaggttgggtaacttacaaaatggaagtgaagatgtcaagaaccatccgtggtttaacgaagtgatatgggagaaattgttagcaagatacatagaaacgccgtacgaaccaccaatccaacagggccaaggtgacacttctcaatttgacagataccctgaagaggaattcaactatgggattcaaggggaggatccaaatatggatttaatgaaagaattttaa

SEQ ID NO: 77460 - DNA, 234 bp, Saccharomyces pastorianus
atgcagtttccggtattttttttccgttgcttcagctacgggatttcttcgatgccattgaaaaataaagttgtgttcaatgagaatatggaaagaaaagacactttttaccagctgatcttaaaagttttgtctgctttattacttctatcggtaagaaactcgagtggacatacgagacactttgtgcagtcgtcggagaaaatttataggcgatcactctttaagcaataa

SEQ ID NO: 77461 - DNA, 969 bp, Saccharomyces pastorianus
atgcaatataaaaagccattagttgcctccgccttagttgctacatctttagctgcctatgctccaaaggacccgtggtccactttaactccatcagctacttacaagggtggtataactgattactcttctactttcggtattgctgttgaaccaattgccactactgcttcctccaaggctaagagagccgctgctatctctcaaattggtgacggtcaaatccaagccactaccaaaaccactgctgctgctgtttctcaaattggtgacggtcaaatccaggccactactaaaaccaaagctgctgctgtctctcaaattggtgacggccaaatccaagccaccaccaagactacctcagctaagactaccgctgcagccgtctcccaaattggtgacggtcaaattcaagccactactaaaaccaaagctgctgctgtctctcaaattggtgacggtcaaatccaagccaccaccaaaaccactgctgcagctgtttctcaaattggtgacggtcaaatccaagccaccaccaatactactgttgctccagtctcccaaatcactgatggccaaatccaagccacaactttaacttctgcaaccattataccatctccagctccagctccaattactaatggtactgacccagtaactgctgaaacatgtaaaagcagtggcactttagaaatgaacttaaagggtggtatcctgactgacggtaaaggtagaattggttctatcgttgccaacagacaattccaattcgatggtcctccaccacaagctggtgctatctatgctgctggttggtccatcaccccagaaggtaacttggccatcggtgaccaggatactttttaccaatgtttgtcaggaaacttctacaacttatacgatgagcacattggaactcaatgtaatgcagtccacctacaagctatcgacttggtcaactgttaa

SEQ ID NO: 77462 - DNA, 1140 bp, Saccharomyces pastorianus
atgcaatataaaaagccattagtcgtctccgctttagctgctacatctttagctgcctatgctccaaaggacccgtggtccactttaactccatcagctacttacaagggtggtataacagattactcttcgagtttcggtattgctattgaagccgtggctaccagtgcctcctccgtcgcctcatctaaagcaaagagagccgcctctcagataggtgatggtcaagtacaggctgccactactactgctgctgtttctaagaaatccaccgctgctgctgtttctcaaataactgatggtcaagttcaagctgccaagtctaccgctgccgctgcctctcggatttctgatggtcaagttcaagctgctaagtctactgccgctgctgtttcccaaataactgacggtcaggttcaagctgctaagtctaccgccgctgctgtttcccaaataactgacagtcaagttcaagctgctaagtctaccgccgctgctgtttcccaaataactgacggtcaagttcaagctgctaagtctactgccgctgccgtttcccaaataactgacggtcaagttcaagctgccaagtctaccgctgccgctgcctctcagatttctgacggccaagttcaagctgccaagtctaccgctgccgctgcctctcagatttctgatggccaagttcaggccactacctctactaaggctgctgcatcccaaattacagatgggcagatacaagcatctaaaactaccagtggcgctagtcaagtaagtgatggccaagtccaggctactgctgaagtgaaagacgctaacgatccagtcgatgttgtttcctgtaataacaatagtaccttgtcaatgagtttaagcaagggtatcttaaccgataggaagggtagaattggctctatcgttgccaacagacaattccaattcgatggtcctccaccacaagctggtgctatctatgctgctggttggtccatcaccccagaaggtaacttggccatcggtgaccaggatactttttaccaatgtttgtctggtgacttctataacttgtatgataagcacattggttctcagtgccatgaagtttatttgcaagctatagatttaattgactgttga

SEQ ID NO: 77463 - DNA, 153 bp, Saccharomyces pastorianus
atgaccctccaccacaagttggtgttatctatgctcctggggttgtctatcacaccagaaggggatctgccccttagtggcgaagatatcttttatcaatactcgttcagcagtttttacaatatacacgacgaaaggattagagaacaatga

SEQ ID NO: 77464 - DNA, 1209 bp, Saccharomyces pastorianus
atgatgaaaagattacaccccttgagaattcaagttcgtctgaaatctgattacccactgtttactttcgagcaattactcactacaaatgggataagaagaggccaaactgcgagaatttctttgaaagattacatagagtggcaaaatttcccaaacataatgaaaagagaaaatttttttacgcaaaagaagcctgtaactacaacagcaaaagaagatcccttttcatttgataacattcttgactgtgagccacaatttagcaaatgccttgccaaatggctactggttaattacaaattaaatgactatccttattacgatcttaacattgtgaatatttatacggatttaccccaagcaattcagatttgcaaaaatttaatgtcatatctcaagtctactttatctgataacatgttccagaaaataaaatatttcatggtacctctatacaagtgtgacaaaataccttcgaagctcttagacggaatacctggatcagtcagtttggtacaagattatccggtttccccatattttttacagaagaaatttcacatagaggatccaatccaaattttgatgcttaatgatgttataaaatacacaacccacgatttagtaaggtactcttcagatgacaaagggtggcaacagtgctttgtggatatcaatgataatggacaaaaatccaagagctttgatagcgccattgactactcatgtgaacttgcattagaacaaatgttcaacgatcgatcccatgtaagtcctggtaaagaactttatatccccactaaattaattgagatattgatgacaatcaagaataatattccagaacatagacttttcattgtagacaccccgcaaagatcgagcccaacaatagtatcgttattaaagagtttaataagcccacggccgacgggatctagccagatagtacagccatattcggattcaatattttcagacaaacggagtgaaagaatatgcttcatgacggacttcttacagttacagaacatttataatggtattaacagttcttctagtagctgcgaagtcgaagacgttgctgattttgttgaaaaatggattagcccaagtgagagaagcacactttcgtcgcagaatggaaataggcctcaactagaagacataaaaaatagctctttggcggtgctacactccacgtga

SEQ ID NO: 77465 - DNA, 438 bp, Saccharomyces pastorianus
atgggtaaaagaaagaagtcaacaagaaagcctaccaagagactggtccaaaaattagatacgaaattcaattgtttattttgtaatcatgaaaaatcagtttcatgcactctggacaaaaaaaatagtataggaactttatcgtgcaagatttgtgggcagtcgttccaaacgcgcataaattcattatcacagcctgttgatgtatatagtgattggtttgacgccgtcgaagaagtcaattctggccgtggaagtgacacagatgatggtgacgaaggttctgatagtgattacgaaagtgattcagagcaagatgctaaaacgcaaaatgatggcgaaatagattctgatgaagaggaggtagactcggacgaggagaggataggccaagttaaaagaggcagaggcgccttggtagatagtgacgatgaataa

SEQ ID NO: 77466 - DNA, 636 bp, Saccharomyces pastorianus
atgggtaatattataacggatacgataattataacctcggataagtgcgacattgttgataatgataatgttgaaagaatccaggtttggctatccaagaatatcttaaggaagtttcaaatcaatgaaaatgaaccactacagttgattattttgaaaaggtttaaaagaatactgttgatctgccccagtcatgatatatctcagcatgttatggatgcgtctcgtgctttagaaatggaaaattttaacttcagctactccttgcaagacggacaaaggaatttaactaaacaatacttgaaggtaccagagagtgaaaaaatgttcctgatatcgcccccagcatcaccacctcccgaattcgatttcagcaaatgtgaggatgcgccacaaaggcatatacaaagtcatatacaacaggaccagcagcagcggttggaagctagccaactattgcctaataatccagacaaaaataacaatggtactttcacgttattgaaatcaaaggtgggcgcaattaccattgatagatgtcccacgaacgatggaaatggacagatgcaattagcggaccacgttaaaaccgctttcccaccaaaatctatattcgatactgatgacgatgattaa

SEQ ID NO: 77467 - DNA, 303 bp, Saccharomyces pastorianus
atgccaattgttcggtggctattattgaaaagcgcagttagaggttcttctctaataggcaaagctcacccttgtttaaggtctattgctgcacaccctagatatttatctaatgtgtactcaccaccagcaggcgtcagtagatcactgcgcatcaatgtaatgtggaagcagagtaaattaactcccccaagatttgtgaagatcatgaatagacgccctctgttcacagaaactagtcacgcctgtgcgaagtgccaaaaaacgtcacaattactaaagtatgtttacacaaaagcttaa

SEQ ID NO: 77468 - DNA, 117 bp, Saccharomyces pastorianus
atgttcaaacaacctgggcacttaacgtctaggaagtacgatcttggaccttggactaatgtctttaatttgtgctttcttgcttcagaagctgcagttgggtgcaataaatcttga

SEQ ID NO: 77469 - DNA, 1887 bp, Saccharomyces pastorianus
atgatgaaaagatgcttcagtatcctaccacaaaatgtccggttcagctcaaagttcacaagttttaacttaccaaagttagatttggcggattttatagactcaaataaaagaggaatcaatgttcttccgtcgtacagagatgaaaccgctagcaccactcaagcaactaattctaaagagctcagattactttccaaaacacttcagggccagtcgtaccgggaccaattagagttgaatcctgatgtaagcaaagcaatcaacaataatattatggctgtacatattcccaataatcttagaagggttgctacaaattattacaaagagattcaggaaccaaattcattacatcgtccctgtagaaccaaaatggaagtggatgcacatatagcgtccatttttttacaaaattatggttctattttccaaagtctgaaagaattacaaaaaagggtaggtcctgataattttaaacctcaaagaatccttgatgttggatatggcccagcgactggtatagttgccttgaatgatattttaggcccaaattatagacctgatctaaaagatgccgttattttagggaatgcggagatgcaagaaagagccaaaatcattttgagcagacaacttaacgaggtggtcgatactgtagaagaaaatgtgtctacagagaaagagcaggaaacagatagacggaacaaaaactttcaagaggatgaacatattggagaagtgatgacaaaaaagataaacattatgactaacttgcggtcttctattcccgcatctaaggaatatgacctcataatattaacgcatcaacttcttcatgacgggaatcaatttccaattcaggtggatgaaaatattgagcactacttaaatattctagcgcctggaggccacattgttattattgaacgaggcaacccgatgggattcgagattatagccagggcaaggcaaattacgcttagacctgaaaactttccagatgaattcggaaaaataccaagaccttggtctaggggagtaacagtcagaggcaaaaaagatgctgaattaggaaacatttccagtaattattttctgaaggtgattgcaccttgtccacatcaaaggaaatgtcccttacaggttggaaatcctaacttttatactcataaagagggtaaagacttaaagttctgcaattttcaaaaaagcatcaagcgtcccaaattcagtatagagttaaagaagggtaaacttctcgctacttcatgggatggttctcaaggaaatgcgtcgaggctaaaaggaacgggaagaagaaatggtcgtgactatgaaattttaaactactcctatttaatattcgagagatcacataaggacgaaaatacgttgaaagaaattaagaaattacgggatgaaaatgtgaacggcaaatatgacattggatcactgggtgatgacacgcaaaattcctggcctagaattatcaatgatcctgtcaaacgtaaaggtcatgttatgatggatttatgtgcgccatcaggagaacttgaaaaatggacggtttcgcggtcgttttctaaacaaacataccatgatgccagaaagagtaagaaaggtgatttatgggcttcagcggccaaaacacagattaaagggctgggagacttgaatgttaagaagttccacaagctagaaaaggagagaatcaagcagttgaaaaaggaagaacgtcaaaaagctagaaaggctatggaatcttataatgaattggaggactctcttcaatttgatgatcatcagttctcaaactttgaggtaatgaagaaattgtccactttccacggtaacgattttttacaacatgtaaatagaaaatag

SEQ ID NO: 77470 - DNA, 735 bp, Saccharomyces pastorianus
atgcttagtaatacacttattattgcctgtttattggtgatagggacaaccatagcgctaatagcagtgcaaaaggcatcctccaagacagggatcaagcaaaaaagttatcaaccatctattatcattgcaggtcctcaaaattctggaaaaacgagcttgcttacgctgctaaccacagattcagtaagaccaactgttgtttctcaagaaccgttattagcagcggattacgatggttccggcgtcacgttagtggacttcccaggccatgtcaagttgcgttataaactctcagattatttgaaaacaagagccaaatttgttaaagggttgatatttatggtagactcaacagttgatcctaagaaattaacaacaacagctgagttcttggtagacatattatcaattactgaatctagttgcgaaaatggtattgatatcttaattgcatgcaataaaagcgaatcgttcactgcaagaccaccatcaaagatcaaggatgctttagaaagcgaaattcaaaaggttattgaaagaaggaaaaaatcgttgaacgaggttgaaagaaaaactaacgaagaagattatgcagagaatacactagacgttttacagtctaccgacgggttcaaatttgcaaatttggaagcatctgtagttgcttttgagggcagtattaataaaagaaaaatttcccaatggcgcgaatggatagatgaaaaactgtaa

SEQ ID NO: 77471 - DNA, 510 bp, Saccharomyces pastorianus
atggagggaaaaagaaatcatcaaatcattcattcttcagacttatttcttaccttggttggcaacagcagcggcaccagcagcggcagcttctgggtccaagtagtaagatggcttagatggcttcaagttttcgtccaattcgaagaccaatggaataccagttgggatgttcaacttagcaatgtcagcatcagagataccttccaagtgcttaaccaaacctctcaaggagttaccgtgagcggcgatcatgacggtcttaccactcaacaagtccttggcaatgacatcttgccagtatggcaacaatctgtcaatgaccaaagccaaagattcagtttctggcaagacatttgggtcaacgtacttgtatctttcatcacccttttgagagaatggagaagaagcgtcgattggtggaggtggaacatcgaaggatcttctgtaggtgttgaatttttcttcaccgaacttcttcaaagtttcagccttgtccttaccttgtaa

SEQ ID NO: 77472 - DNA, 744 bp, Saccharomyces pastorianus
atgccaaagttagttttagttagacacggtcaatccgaatggaacgaaaagaacttattcaccggttgggttgatgttaaattgtctgccaagggtcaacaagaagccgctagagccggtgaattgttgaaggaaaagaaggtctacccagacgtcttgtacacttccaagttgtccagagctatccaaactgctaacattgctttggaaaaggctgacagattatggattccagtcaacagatcctggagattgaacgaaagacattacggtgacttacaaggtaaggacaaggctgaaactttgaagaagttcggtgaagaaaaattcaacacctacagaagatccttcgatgttccacctccaccaatcgacgcttcttctccattctctcaaaagggtgatgaaagatacaagtacgttgacccaaatgtcttgccagaaactgaatctttggctttggtcattgacagattgttgccatactggcaagatgtcattgccaaggacttgttgagtggtaagaccgtcatgatcgccgctcacggtaactccttgagaggtttggttaagcacttggaaggtatctctgatgctgacattgctaagttgaacatcccaactggtattccattggtcttcgaattggacgaaaacttgaagccatctaagccatcttactacttggacccagaagctgccgctgctggtgccgctgctgttgccaaccaaggtaagaaataa

SEQ ID NO: 77473 - DNA, 1014 bp, Saccharomyces pastorianus
atgttagcagaattgtctcatagagaattgataaagttggcgcagaaaagatgtataccacctttattgccaaagtttcataagggacagtctggtgggagagtttgcattattggaggatgcgaagattatacaggggcaccgtatttcagcgccaatgctacagccttgatgggctgtgatttgacacatgtcatctgcgaatacaacgctggtacggtcattaaatcgtacaccccaaacctaatggttcatccataccttcgtatgagtaacaccaaattagacgttgatatggacgaacaaaggaagaaaatcaattccttattggatagaatccacgttgtggtaattggacccggcttgggtagggaccccctaatgttaaaatccattaaggatatcataagatatatacttgaaaaacatgagggcaagatcccgttagtaattgatgctgatggactgttcttagtaactcaagatagcgaagtcaaagaaatgctgaaaagctaccccaaaggtagagtgatcttgacgcccaatgtggtagaattcaaaagactatgtgatgccataggcaagaagggagactctcactccgagatgggcagcttgatcgcccaggaattgaattgtattgtggtggagaaaggtcagtcagataagatattctcacccgatagtgaaaaagacatgttgacgaacagcgaagagggcagcaacaagagggtaggaggccaaggtgatactttgacaggagctatatcatgcatgcttgcatttagtcgtgcaatgtatgactttaagatttgtgagcaggaagaaaagggagaatcttctaacgataaacccttgaaaaactgggtagactacgctatgttgagttgctacgcaggctgcacaattacacgagaatgctcccgcctaggatttaaggctaagggacgtgcaatgcagacgacagatctaaatgaccgtgtcggtgaagtgttcgccaaacttttcggttaa

SEQ ID NO: 77474 - DNA, 1218 bp, Saccharomyces pastorianus
atgactaaattgcgaattgctgtacaagggtgctgtcatggtcagctaaaccaaatttataaagaagtgtcacgaatccatgcaaagactcccatcgatctattaattattcttggagattttcaaagtattcgtgatggtcaggattttaagtcaatagccataccaccaaaatatcaaagactcggtgatttcatatcatactacaataatgagattgaagccccagtccctactatttttattggcggtaatcatgaatcgatgagacatttaatgcttctgccacatggtggttatgtagcaaagaacattttttatatgggatactctaacgttatatggtttaaaggcataaggatagggtcattgagcgggatatggaaagagtgggatttcaataagcaacgaccagattggaataacctagaaaataacaattggaaagctaacataagaaatctgtatcatgtaagaatttctgatattgctcctctttttatgatcaagcatcgtattgatattatgctgagccacgattggcccaatggagtcgtttatcatggcgatactaagcacttgttgaagcttaagcctttttttgagcaagatattaaagagggaaaactaggcagcccagtgacctggcaactactaagagatttgcagcctcaatggtggttgagcgctcatttgcatgtcaggttcatggcctccattaagcataataaaagaagccacgaaccgcctaataagtcaacttcaaagacaaaaaaaaacaataatgaaatagatttggatttatccagtgacgaggacgaaaggtctggtattatgaattgccaagaagagaatgagtatgattccaaatacggcgagacacggttcttggcgttggacaagtgcctgccaagaagacgttggttagaaattctggaaatagaaccggatacatcgcatgcttcgtggaaggacgagaatcaccgtatgttctgggatcctgaatttatcaataatttggtaatttgtcaaaaaaataagaatctcctaagcaataaaccgtttaatagcgtcaattggatagaactgtctcaatctaatagagaggaaggaagggatattgattgggaaaattatgccattcctgcatacaccttagatattcagaaagatgaagtacgacaaactaaagcatttatctctaaattcatgacttga

SEQ ID NO: 77475 - DNA, 1923 bp, Saccharomyces pastorianus
atgctatcgctaaaaaaatcagcgctctccaagttgactttgctcaggaacacaagaacatttacatcgtcagctttggtgcgccaaacgcagggctctgtaaacggttccgcgtccagatctgcagacgggaagtaccacataatagatcacgagtatgactgtgtggtaatcggtgccggtggtgccggccttagagcggcctttggtcttgccgaggcgggctacaagactgcttgtatatccaagcttttccccaccagatcccacactgttgctgctcagggtggtatcaatgccgccctgggaaatatgcacaaggataactggaaatggcatatgtacgatactgtgaagggatctgattggctaggtgaccaggactccatccattacatgaccagggaagcgcccaaatcgatcattgaactggaacactatggtgttcctttttcaagaactgaaaacggtaagatctaccaaagagcctttggtggtcagaccaaggagtacggtaagggtgctcaggcctatagaacatgcgctgtcgcagacaggacaggacatgctcttttacacacgctttatggccaagctttaagacatgacacacatttctttattgagtactttgccctcgatctgttgacccataatggcgaggtcgttggtgtcatcgcttataatcaggaagacggtaccatccacagattcagagcacacaagaccattattgccactggtggctatggtagagcatacttctcttgtacctctgctcacacatgtacgggtgacggtaatgccatggtttcgcgtgctggtttccccttgcaagatttagagtttgttcaattccatccttcaggtatatatgggtctggttgcttaatcactgaaggtgctcgtggtgaaggtggttttttggttaattctgaaggtgaaagattcatggaacgttacgctcctacggccaaggatctagcttgtagagatgtcgtttccagagcaatcaccatggagatcagagaaggcagaggtgttggtaagaaaaaggaccacatgtacttacaattgagccatctacctccggaagttctaaaggaaagattgccaggtatctctgaaacagcagccatttttgctggtgtagacgtcaccaaggaacctattcccattattcctaccgtccactataacatgggtggtattcccacgaagtggaatggtgaggcattaaccattgatgaagaaactggcgaagacaaggttattcccggtttaatggcttgtggtgaagccgcttgtgtttctgtccatggtgccaatagattaggtgccaattccttgttggatcttgttgtctttggtcgtgctgttgcccatacggttgctgacactttacagcctgggttgccacacaaaccactaccttctgatttgggtaaagaatccatcgcaaacttggataaactaagaaatgctaatggttcaagatctacggcagaaattagaatgaatatgaaacaaactatgcaaaaggatgtttccgtctttagaacacaatcatctttagatgaaggtgttcggaacattactgcagtagagaagacctttgatgatgtgaagacgaccgatagatcaatgatctggaattctgacttggttgaaactctggagctacagaacttattaacctgtgcctcccaaacagctgtttccgctgctaatagaaaggaatcccgtggtgctcatgcaagagaggattatccaaatagagatgatgaacattggatgaagcatacattatcctggcaaaaggacgtcgctgccccagtgactttgaaatacagaagggttatcgatcacactttggacgaaaaggaatgtccttccgtacctccaactgtaagagcctactaa

SEQ ID NO: 77476 - DNA, 2079 bp, Saccharomyces pastorianus
atgaatggaaaagaggtttcaagtggctctggaagaacgcagagcaacaacaacaaaaaaaataacaacggaggcagtacaggaatctcgcatgcgtctggctcacctttaacggacggcaacggtggcaatagcaacggtaatagtagaagtagaagcagaagtagaaaatctagtggaactacaggtggtttgctaaaaaagccgccgctgcttgtgaacaatgaagcggtgcatgctagcgtacccgacgcgtcgcacacttcctgtaacaatggcacgcttgaagtgagcataaataaccctgagccacatgtggtagatgccgtggcacgccacttgataagaaacccgagtaacagcctacaattgcaaggcggagacattacaagagatctgtataagtggacaaacgaccatccttcatcaccatcgcagtatcagtacccaagtcaacctgcactttccacctcaataccttcacaagcgccctcattctcgaatcgtaaaaggtctatgagcttttctgccgcttctatagcatcttcctctcaccttaacaacaactcggaggcgaatgggaatcctctagcggcaataggcctggcgcccgcaccgatgacgcacgaagaaatcagggctcctggtggattcagaagatctttcataatacagaagcgcaggaaacataacgttgatgcgcccataccgaattttttcaccaggaactttattgaatttttgaccttgtatggccacttcgctggtgaagatttatcggaagaagaggaggaggaggaagaaactgaagaggagccagaggaggaagctttggaaacggaaagcacccagctagtttctcgtgaacacgggcgccatcctcacaaatcatctacggtaaaggcggtgctgctcttgttaaagtcatttgtagggacaggtgtgcttttcctaccaaaggctttccataacggtggttggggatttagcgccctttgtctactctcgtgtgccctcatttcttatggatgtttcgtatcattgattaccaccaaggacaaagtaggcgtagatgggtacggtgacatgggtcgtatactatatgggcccaaaatgaaatttgccattctttcgtctatcgccttgtcacaaatcgggttttctgctgcatacactgttttcactgcaactaatttgcaggtcttttctgaaaatttcttccatttgaaatcgggcagcatcagtctagccacctatatctttgcacaagtactcatctttgtcccactatctttgacaagaaacatagccaagttaagtgggaccgcgttaatagcagatctatttattttactgggattggtttatgtttacgtttactccatttattatattgctgttaatggtgtcgcatccgatacaatgcttatgttcaataaagcggactggtcgttgttcatcggtaccgccatattcacctttgaaggtataggcctacttatccccattcaggagtcaatgaaacacccgaaccatttccggccatcgttgtccgcggtgatgtgtatcgtggcagtgattttcatatcatgtggtctcttatgctatgccgcttttggatctgacgtgaaaactgttgttttattgaattttccgcaggacacttcctatactctcactgttcaattactgtatgcattagccattttgttatccacgccgttgcagctatttcccgcgatacgtattttggaaaactggacttttccctcaaatgcatctggtaaatacaacccgaaagtcaaatggttgaaaaactatttccgttgcgctattgtcgtcctgacatctatcctcgcttgggtaggcgccaacgatttggacaaatttgtatcactggtaggctccttcgcgtgtatcccattgatctacatatacccgccattgttgcactataaggcgtccatcttatctggaacctcgagagccaggcttcttttagatttaatcgtcatagtgtttggagttgctgtcatggcctacacgtcatggcagacgattaaaatgtggagccagtaa

SEQ ID NO: 77477 - DNA, 1404 bp, Saccharomyces pastorianus
atgccaccaaaagaagactgggaaaaatacaaggcacctttggaagacgatgataaaaaacctgatgatgacaagatcgtacccttaacagaaggtgacattcaagtcttaaaatcatacggtgcagctccatacgcagccaaattaaagcaaactgagaatgacttaaaagacattgaagcgagaatcaaagaaaaggccggtgtcaaagaaagcgatacagggttagcaccctcccatctatgggatattatgggtgataggcagagactgggcgaagaacatcccttacaagttgctcgttgcacgaagatcattaaggggaatggtgaaagtgacgaaactacgacagataataataacagcggcaatagcaatagtaatagcaatcaacagtctactgatgcagacgaagacgatgaagatgccaagtacgtgataaatcttaagcaaattgccaaatttgtcgtcggattaggtgaacgtgtttctccaacagatatagaagaaggtatgcgtgtaggtgtcgataggtcgaaatataatattgaacttccattgcctccaaggattgacccatcagttactatgatgaccgttgaagaaaagcctgacgttacatatagcgatgtcggtggctgtaaagaccaaattgaaaagctgagagaagttgtcgagctgcccttattatctccagaaagatttgctactcttggtattgatccaccaaagggtatcttattatatgggccacctggtactggtaagacattatgtgctcgtgctgttgctaatagaactgatgcaacttttattagggtcattgggtctgagctagtgcaaaaatatgtcggtgaaggtgctcgtatggttagagaattatttgaaatggctcgtaccaaaaaggcttgcattatattcttcgatgaaatcgacgctgttggtggtgctcgttttgatgatggtgctggtggtgataatgaagttcaaagaactatgttagaactgattacacagttagacgggtttgaccctcgtggtaacattaaagtgatgtttgccaccaataggcccaacactttagatccagctttattgagacccggtagaattgatcgtaaggtagagttttcattacctgacttggaaggtcgtgcaaatatcttccgtattcactcgaaatcgatgagtgtggaacgtggcatcagatgggaacttatctccagactgtgtccaaactctaccggtgcagaattaagatctgtttgcacagaagccggtatgtttgccattagagcaagaagaaaggtggctactgaaaaggatttcctgaaggctgttgataaagttattagcggatacaagaagtttagttccacatcgcgttatatgcaatataattga

SEQ ID NO: 77478 - DNA, 93 bp, Saccharomyces pastorianus
atgggccacctggtactggtaagacattatgtgctcgtgctgttgctaatagaactgatgcaacttttattagggtcattgggtctgagctag

SEQ ID NO: 77479 - DNA, 639 bp, Saccharomyces pastorianus
atgtttatcctttcaaaaatcgctgacttggtacgaatcccgcccgatcaattccatcgcgatacaatatcggcaatcacacatcagttaaataataagttcgccaacaagattattcccaatgtcggtctatgtattacgatttacgacttattaaccgtcgaggaaggccaattgaagccaggcgatggatcatcctatattaacgttacatttcgagccgttgttttcaaaccgtttctaggtgagatagtaactggatggatttctaaatgtacagcagaaggcataaaagtttcactgttaggtatatttgatgacatttttatcccacaaaatatgttattcgaaggatgctattatacccctgaagaaagtgcatggatttggcccatggatgaagagacgaaactatatttcgatgtaaatgaaaaaattagattcagaatcgaaagagaagtttttgttgatgtgaagccaaagtcacccaaagaacgagaattggaggaaagagctcaattagagaacgagattgagggtaagaatgaagaaactcctcaaaacgaaaaacctccagcatatgccctattaggtagttgtcaaactgatggcatgggactcgttagttggtgggaatga

SEQ ID NO: 77480 - DNA, 1392 bp, Saccharomyces pastorianus
atgtcgaagaaatttagctctaaaaactcccaaaggtacgtggtggtacacagaccccatgatgatccttcattttatgatacagatgcctctgcgcacgttttggttcctgtctccaatccaaataaaacttctccagaagcagatcttcgaaaaaaagacgtgagttcaacaaaaccaaagggtaggagggctcatgtgggagaagcagctttatatggtattaattttgatgattctgaatacgattatactcaacatttgaagccaataggtctcgaccctgaaaactccatctttatagcatccaaaggcaatgaacagaagatcgaaaaaaaaaacattgaagatttattcatcgaacctaagtatagacgtgatgaaattgagaaggatgacgcgctacctgtgtttcaaagagggatggcaaagccagaatatttactacaccaacaagataccaccgatgaaattagaggtttcaaacctgatatgaatcctgcattaagagaggtgcttgaagctttagaagatgaagcatatgttgttaatgatgatgttgtggttgaagacatcagcaaaaagacacaacttcaaggcgataactatggagaagaagaaaaggaagatgacattttcgcacaattactagggagcggtgaagcaaaagatgaagacgaattcgagaatgagtttgatgaatgggatattgataatgtagaaaattttgaagatgaaaactacgttaaggaaatggcgcaatttgataatatcgaaaacctggaggacttggaaaatatcgattatcaagctgatgttcgaagatttcaaaaagataactctatactagaaaagcataactcggatgatgaattttctaatgcaggtttagacagtgtaaatccctctgaagaggaagatgtgctgggcgaattgccctctatccaagacaaaagcaagacggggaagaagaaaagaaagagccgtcaaaaaaagggtgccatgtcagatgtatctggattttccatgagttcaagtgccattgcgcgtacagagacgatgacagtactggatgatcagtacgatcaaatcatcaatggttacgaaaattatgaggaagaactagaagaggacgaagaacaaaattaccaaccatttgacatgtcagcagaaagatctgattttgagtcaatgcttgatgactttttggacaattacgaactggagagtggtggccgtaaactggctaagaaagataaagaaattgaaaggctgaaggaagctgctgatgaagtaagcaaaggtaaactgtctcagagaagaaatcgtgaaaggcaagagaaaaagaaacttgagaaggtcaccaatacactaagcagcttaaaattttag

SEQ ID NO: 77481 - DNA, 660 bp, Saccharomyces pastorianus
atgtctaacgaaattgaattactgcagaagcaagtctctgaattacaagacttagtgaagaagcaaagtctgattatctctaagacaggagagcgtgtactggaattgcagttagataaacaaaagcacgacgtaactgattttgattcgaaattctctaaatctatctcgaagaaatcaggatccgctactcaattcgatgccactgattttgccacaaatgaagatctagtggaactagtcaaagaactacagggtgagctaaatttcatcgaggaaaggtctatcagaagacttgttaactctttgaaaaaagatgatgatgacgttatagcgccactgcctaatgcagatggtgatattcctgctatttcagacggagtgttccctaagtcgttgaaagaatttaaagacatcccagacttaaaactggtaagacttgctaaattctacgaaagattgccaccaactctaaaggaacaagaagattttgaaaacttcctggaaggtaaggtggaagcctttcacattaatgagaccactgatgaagagatttctaaggagttggaaaagttctccaaagatgagctagatgatgcatttaatgatgttgcccgctatctaggtctctcccttagaagaggaaccgaaatatggtaa

SEQ ID NO: 77482 - DNA, 597 bp, Saccharomyces pastorianus
atgtctgcaatgatggtcaagttaggactgaataagtcggctctattactgaaaccctccgccttttcaagagcagctgccttgagctcctcgaggaggctgctttttaatacagctagaacaaacttcctttctacctcaccattgaagaatgtggccagtgaaatgaacaccaaagcggcaattgctgaagaacaaatattaaacaagcaaagagcaaagagacctatttctccacatctgaccatttaccagccacaattaacttggtacctgtcttctcttcaccgtatttcgttggtgcttatgggactaggtttctacttgtttactatactcttcggagtctctggtttattaggtcttggattgactaccgaaaaggtttctaattggtaccatcagaagttttccaagattaccgaatggtccatcaagggttcctttgcttacttatttgcaattcactatggtggcgccattagacacttgatctgggataccgctaaggaattgacattgaaaggcgtttacagaactggttacgccctcattggtttcaccgccgttctcggtacttatttattaactttatga

SEQ ID NO: 77483 - DNA, 1647 bp, Saccharomyces pastorianus
atgtacttcccctttttaggcagattatcgataacagattacattatagtcgtcttggtatacatagaaagcattatttcatcagtccttaaacttataccacaaccaatgattaaccttttcgaatggctaataaatttctcaacgtcctccgatgacaataccatcgaagaaaagttaaggtcagctccaactatccatgaaatgtgtgcaatttttgatatatctgtcgaggatcatttggtaagaactgaagacaattatatcttgacactgcatagaatcccaccgatttctaaaaacagatttaacaataaagtggtatacttacatcacggtcttttgatgtgttctgatgtttggtgttgcaatattgaaagacataaaaacttaccgtttgtattgcatgatttaggttacgacgtctggatgggaaataatagaggtaataaatattcaactgcccacttgaacaaaccaccaaaatcgaacaagttttgggatttttctatcgacgaatttgcgttctttgacattccaaactcaattgaattcatcttagatataacaaaagtggacaaggtcatctgcatcggattctctcaaggctctgctcaaatgtttgctgcattttcgttgagtgaaaaattgaatcgaaaagtctcccattttatagccatagcacccgctatgactccaaaggggttgcacaacagaattgtcgatgccttggccaaatcatcgcccggctttatgtatcttttctttggtaggaaaattgtgttaccttcagctgtcatttggcaaagaactttacatccaacacttttcaatttgtgtatcgatatcgcaaacaagatactgttcaattggaagtcgtttaacattctaccgagacaaaagattgcttcttacgcaaaactttattcaacgaccagtgtaaaatccattgttcactggttccaaatattaagatctcagaaatttcaaatgtttgaagagtctgataacatgctaaattccttaactaggccttaccaaattgctaattttcctactagaacaaatatcaagattcccattcttttaatttatggtggcatagattctttagttgatattgatgtgatgaaaaaaaatctacccttcaactccgtctttgatgttaaagttgacaattatgaacacctggatttgatttggggcaaagatgccgataccttggtcattgctaaagtcttgaggtttattgaattttttaaccctggtaatgtttcagtgaagactaaccagttactaccatcagcaagtctggttgaggaattaccaagcacgacatggaagacaactcatccaacgcatggtctcagttatagaactcactcggcagaccgttctccgttgtctgtacaagctgatgaagcggatgaggtccacaatgctgacaattcaaggttcttaagacgagtgttttctactagtgccatagacgagaacaacgaaaatgagcaccaggatgatacagaagatcaaatccataaggagcagcaaagacggttaagtgcctatctggaatcatccaaagatttacgacaactagatgccaactcttcgacaactgcgctggatgctctaaataaagaatga

SEQ ID NO: 77484 - DNA, 210 bp, Saccharomyces pastorianus
atgaacgctaacaaacaaaggcagtataatcagcttgcacacgaacttagagagcttcaaacgaatttacaggaaacgacaaaacaactagatatcatgtcgaaacaatgtaacgaaaacttggtaggccaattgggtaaggtacatggaagttggttgataggtagttacatttattatatggagcagatgcttggaaaaacacaataa

SEQ ID NO: 77485 - DNA, 396 bp, Saccharomyces pastorianus
atgtttggcccattcaaattaacaagccccgtcgctggtggcctactatggaaaattccatggagaatgtccacacatcaaaaaacccgtcaaagggaaagattaagaaacgttgatcaagtcataaagcaattaactttaggtctccacgtccaaagatgtcaggataaaggtcttacttatcaagaagccatggagagcaaaaagaaatacaagccaagaagtaaatcgttaaggttgttaaacaaaccatcagtctttccaaaggagaatcaaatgtcttctaaagataaatattggacttttgataaaaaagctgttggttataggaagggtattcataaggtgcccaagtggacgaagatttccattagaaaggccccaaaattcttttga

SEQ ID NO: 77486 - DNA, 399 bp, Saccharomyces pastorianus
atgtatggtataatacttaagttcactacaacggacgtttatagtcagaataaatcgaggagatcctgtgacactatattgccgcccgaaacatcgggattgtttttaccaccagaagatataccgtttgagtcgccacctagtttcagctccttcaacccttgtacagccttggtatcatttgtatttatttgtgtggcatcctcagatggtccgaaatcaaataaatcatccaaatcgcctaaagttgttgaagtattcagcattcctgcatttgtatttgttacatcatctctttcatcaaaatccaatagcacatcatcgttagccttgctagaaatttcattttttgccatgctttctaattcctctatatgttttcctttaactatattttga

SEQ ID NO: 77487 - DNA, 2319 bp, Saccharomyces pastorianus
atgcttcgcacgataatattgaaagctgggtccaatgcctccataccgtcactttcccgccaaaataagttactcaggttcttcgccacagccggcgcagtctctaggaccagtccaggaagcattaagaagattttcgacgacaattcatactggagaaatattaatggtcaggatgctaataatagcaagatctcacaatatctttttaaaaaaaataaaaccggacttttcaagaacccttatttgacttctccagatggtttgcgtaagtttagccaggtttctttgcagcaagcacaagaacttctcgacaaaatgaggaatgattttagcgagagtggtaaattaacctatattatgaacctggacagattaagcgatacgctatgtcgagttattgatttgtgcgagtttattaggtcaacacatccagatgatgcatttgttagggcagcacaagattgccatgaacaaatgtttgaattcatgaatgtcttgaacactgatgtttccttatgtaacatgctaaagtcggttttaaacaatccagaagtgtcttcgaagttaagcgcagaagaacttaaagttggtaaaatattattggatgattttgaaaagtcaggaatctatatgaatccagatgttagagaaaagtttatccagttatctcaggaaatcagtttagtaggtcaggaattcatcaaccatacagactatcctggttcaaattctgtgaagataccatgtaaagatctggataatagtaaagtgagtacatttctattgaagcaattaaataaagatgtaaaagggcaaaattataaagtacctacatttgggtatgcggcttatgcattattaaaaagttgtgaaaatgagatggtaagaaaaaagttgtggaccgctcttcacagttgttctgacaaacaggttaaaagattgagtcacttaatcaaactaagggcaatcttggctaatttaatgcacaaaacaagttatgcagagtatcaattggaaggtaaaatggcaaagaatccgaaagatgttcaagattttattttgacgttaatgaacaatactatagagaagacagcaaatgaattgaaatttatagctgaactcaaggccaaagatcttaagaagccgttgactacaaacacggacgaaatattgaagctcgtgagaccatgggatagggattactatactggcaaatatttccagctcaacccgtcaaactctcccagtgccaaagaaataagctattattttacattaggaaatgtcattcagggcttgtcagatttgtttcagcaaatatatggtattagattagagccagcaattactgatgagggagaaacatggtccccagacgtgagaagattgaatgtgatatctgaagaggaaggaatcatcggcataatttattgtgatttattcgaacgaaatggcaagacttcaaatccggctcatttcacagtttgttgctctaggcaaatatatcccagtgaaactgatttctcaaccatccaagtcggtgagaatccagacggtacctactttcaattacctgttatttctttggtgtgtaatttttctccaatactaatcgcttctaaaaaaagtctttgttttttgcagcttagtgaagttgaaacgctcttccatgaaatgggacatgcaatgcactcaatgttagggagaactcatatgcaaaatataagtggtacaagatgtgctactgattttgtagagttaccaagtatcctgatggagcacttcgctaaggatatacgaattctgacaaggattggcaaacattacgggactggagaaacaattcaggctgatatgttacagcgcttcatgaaaagcactaacttccttcaaaattgtgaaacatactctcaagcaaagatggctatgctggatcaatcatttcatgatgaaaaaatcatttctgatattgataactttgacgttgtggaaaactatcaagcactagaacgacgtttaaaggtcctagtggacgatcagagtaattggtgtggaagattcggccatttatttggatacggggcaacttattacagctacttatttgataggacgatagcttctaaaatctggtacgcccttttcgaggatgatccgtacagtcgaaaaaatggtgataaatttaaaaaacatttactaaaatggggagggctaaaagacccttggaaatgtatcgctgatgttttagaatgccccatgctagagaaaggcggtagcgatgcgatggaatttatagcacagtctcacaagtcttag

SEQ ID NO: 77488 - DNA, 1293 bp, Saccharomyces pastorianus
atggatgatataagcggaaggcaaactttacctcgaataaaccgtttgttggagcacgttggaaatccccaagatagtttgtcaatcctacatatagcgggaacaaatggtaaggagacagtatctaaatttttgacatccatattgcagcatccggagcaacagcggcaaagggtcttgattggtaggtatactacatcttccttgctaaacgccaaagaagaggatattagcattaataatgaagccatttccttgataaagtattctaggatcgagaaggaacttatagaagcagataggtctttgaaattacagtgcaacaacctcgaattgctaacaagcgtagctctcgtatacttcgctaagaaaaattgccaatggtgcataatagaaactggtttagctggaaaacaggaccctggaagtataattgctggtcaaaatagagtctgttgcgccattactaacgtgggcattagcgatgaagcttttttatgcaagtttttgtctcaaattactgaaagttccacaaataaagcaatttttctattagacggttctaatgatgaatttgtacgaaatacgataacgaagcggtgccatgatgttggatgtccattagaaatcaccgacccttctcttaaggattacaatgtatacacagacacatggggcactcttgaagtttgcctgccatacagtgaagaagaatatcaaatatttaatttgagagttgcgatagcggttttagactttttgagcaaggaaaaaaaggtttgtatttcaaaggatcaactatctcaaggtttaatatctgtggattggccaagaagtttacatcgcttggattactgttatgaatctactagtggaaagaaaatcgcattactattagacaacgcaaataatgcgaaggcagctcgaaatttagcctgccatttaaggaccacgtacggtgatacgccattaacatttgtcattgctataacaactgggaaaaaggtgtctcccttacttgatccgctaatacgtccacaagattatgttatcgtgactagatttgggtcagtggttggaatgccgtggatccaatccctagaaccggtgaatcttctcgcatttatcaaaaaccggtatacgagaaatgttaacatgcagccggatcttcaaagtgtctggaccttccttgaaacaagtgggttaaagacgattgttccagttatcgtatgtggatcactgtatatctgcaaagagctattgcgcttacacaactgtcacttgccagtatag

SEQ ID NO: 77489 - DNA, 522 bp, Saccharomyces pastorianus
atgcaccattggcaatttttcttagcgaagtatacgagagctacgcttgttagcaattcgaggttgttgcactgtaatttcaaagacctatctgcttctataagttccttctcgatcctagaatactttatcaaggaaatggcttcattattaatgctaatatcctcttctttggcgtttagcaaggaagatgtagtatacctaccaatcaagaccctttgccgctgttgctccggatgctgcaatatggatgtcaaaaatttagatactgtctccttaccatttgttcccgctatatgtaggattgacaaactatcttggggatttccaacgtgctccaacaaacggtttattcgaggtaaagtttgccttccgcttatatcatccatctgcttcttatgtaatctgttgccggccaaacgagcaatattattctatatcaaaatcgtcaggaaactggtcgacttgactcaagtttcattaagacaagaatataaatttaaaaaatcattattgacctaa

SEQ ID NO: 77490 - DNA, 3813 bp, Saccharomyces pastorianus
atggctgtcataaaaaagggagcacgcagaaaggacgttaaggagcccaagaagagatctgcaaaaatcaaaaaggctacatttgatgcaaataaaaagaaagaagtaggtatttctgatttgacacttttgtcaaaaatatctgatgaatctatcaatgaaaatttgaaaaaaagatttaagaatggaattatttatacctatattggccatgtgttaattagtgtaaatccgttccgcgatttgggaatatatacaaatgccgttttagagtcatataaaggaaaaaatagacttgaagctccaccacacgtgtttgctattgcggaatctatgtactacaatctcaaatcatacaatgaaaaccagtgtgttattatttctggtgagtctggtgccggtaagacagaagcagccaaacgtattatgcaatatattgcagctgcatctaatagccattcagaatcgattgggaagatcaaagatatggtccttgctactaatccacttctcgagtcattcggttgtgctaaaactctgcggaacaacaattcttcaaggcacgggaagtatctagaaattaaattcaactcacaatttgaaccttgcgcaggtaatatcacaaattatttgctagagaaacaaagagttgttggtcaaattaaaaacgaaagaaactttcatattttttaccaattcactaagggagcatccgatacatatagacagacgttcggcgtgcaaatgcctgagcaatatatttacactgctgcggctggctgtactactgcagacacaattgacgacgtaaaagattacgaaggcacgttagaggctatgagaaccattggtttagtccaggaagaacaagaccaaatttttaggatgctggcggcaattctgtggattggtaacatttcctttatagaaaatgaagagggcaatgctcaggtaggagatacctcagtgactgattttgtcgcttatttgttgcaggttgatgcttcgttactggtaaaatgtttagtggaaagaatcatgcaaaccagtcatggaatgaagagaggctcagtttatcatgtacctttgaacccagtccaagcaactgcggtgagagacgcccttgctaaggcaatttataataatttattcgactggattgtcgatagggttaacgtatctttgcaggcatttcctggtgctgataaatcaattgggattctagacatttacggcttcgaaatttttgaacacaactcttttgagcaaatatgtatcaattatgttaatgaaaagttacaacagatttttatccaattgactttgaaggctgaacaagaaacttatgaaagagaaaaaatcaaatggacccccatcaaatactttgacaataaagttgtctgtgatttaatcgaggcgaaaaatccaccgggcattcttgctgcaatgaatgactctattgcaactgctcatgcagactccaatgccgctgaccaggcgtttgctcaacgacttaacttatttaattcaaatccatacttcgaattaagggccaacaaatttgttattaaacattacgctggagatgtcacctatgacatcaatggtatcaccgataaaaataaagaccaacttcaaaaggacctaattgaattaattggaacaacgacaaatacattcctttccacaatttttcctgatgatgttgacaaagattcaaagagacggcctccaacagcaggtgacaaaattattaaaagtgcaaatgaactggtggaaactttgtcaaaagctgagccttcttatatcagaacaatcaagcctaatcaaactaaatcaccaaatgattatgatgatcaccaagtgctacatcaagtaaaatatttgggtttgcaagaaaatgttcgtatcaggagagccggtttcgcttacagacaaactttcgaaaaattcgtcgaaagattttatttactatctccagattgttcatatgctggtgattacacttgggatggggacacccttgaggcagtcaagcttattttaagagatgccatgataccagaaaaagaatttcaacttggagtgacaagcgtattcattaaaactccagaatctctatttgctctagaagacatgcgtgataaatactggtacaacatggctgctagaatccagagagcatggagaaggtttcttcaaaggcgtattgatgctgcgataaaaattcagcgtactatcagagagaaaaagggtggaaacaagtacgtcaagcttcgtgattatggaaccaaacttttagcgggtaaaaaagagagaagatccatgtctttacttggatacagggcttttatgggtgattacttatcctgcaatgagtctaaaacgaaaggatcgtacatcagaagacaggtaggaattaaggataaagttgttttttcgataaagggggaatgcctgcactctaaatttggcagatcagctcaaagattgaaaaaagtgtttatcttaacaaaaaagacattttatattattggacaaacacgggaacagaatgctatgaaatatacacaagattataaaattgatgtcggtaaaattaaacaagtgagcttaacaaacctccaagacgattggatgggcgttatccttgttaatagtacacaacccgatccactcattaacacgcctttcaagacggaattaatgacacgtttgaaaaaattaaatgaaaagataatgataaaagttggtcccacgattgagtatcacaaacaaccaaacaagttgcacactgtccgctcaaagataagcgattcagcaccgaaatacggtgacatctacaagtcaagtacaatatacgtgcgtcgtggacaccctgctaactccaaatcgaataaaaaacctaagaatccaggtgggttgagcgggaaacctatcaaaagcaaaaagagtaaacacaaatctactcataagcatacacatagccatagaagtcatagggatgctgcaaaaaagcaacctctcccttcacaaaaacctgtgaatccgttatctttggcagctaccgctgcacaggcagcatacaatcctaaaccggataagaccgtaccaataaagtcatctgcaatccctgctgcaaaagtaagctcgaaacacagctcaaaaccctcatcgaaggaaaaagtcgcagtaaagaaagcctcctcaagccacaaatcctcatccgccaagcaaaaccaggtatcgatgccaccttcaaaaggggttgaaaaaaataaagaaccgttaaaggagacaactgcaactgcaaatataccaataccaccaccccctccccccatgggccaaccaaaggatccgaaattcgaagctgcatacgactttccaggttccggatcatcttcggagttgccattaaaaaagggcgatattgtatttataagcagggatgaacctagtggttggtctttagcaaagcttctcgatggaagcaaagaaggttgggttcctactgcttatatgactccttataaagacacaagaaatacggtgcctgttgcagcgacaggggcagtgaatgacgttacaaatcagaaatcaagccaaatcgacaataccatttcaagtgcacaagaaggtgtacagtttggaagtgcaacagttggacccactagtgataatcagagtaatccggtggggacgtttagcgacggtttagcttctgcattggcagcaagagcaaacaaaatgcgggcggaaagtgctgacgatgatgataatgacgatggcgatgatgatgatgactggtaa

SEQ ID NO: 77491 - DNA, 888 bp, Saccharomyces pastorianus
atgtcactcagagcagtcccaggatattttgctgcatatccaagcgagggttttcaaggattagactccacgaaatatgatcacttggaattgattaaccataagaattggaaggaactgtatcatgctatccctagaaataccaaaaatcgccactataagctgttgattttagctaggcatggtcaaggttaccacaatgctgccatactgaggtacggtatggagaaatgggacgcctattggtcgttgctttcgggcgatgaacatggagagtggcttgactctaaactgacacctctgggtaaagatcaagttagaagaacaggatcgaatgtcttgctaccaatggcaaagcaattaggtatgctacctcatgtgtttttcagttctccgatgagaagatgtctcgaaacattcattgagtcgtggacaccagtgttagcggagacgcaagaattaccggccggaactaaaatttctacacgcattatagaaggtctaagggagacgttgggctctcacacttgtgacaaaagagtggctcactcaatggcagttgacgaataccaggatttcagcacggaatcgggccacactgtacattggcaatatgtaccagattacccagaagatgatgaattgtggcttcctgatcatagagaaacgtgtgctgaaatggacaaacgtacactgaatggattatttgaactatttaatcaattgtcaagcgaagaaaaattcatctcgcttacttgtcactcaggtgtcattcaaagtgtcttgagaaacttacagcatcctccaatttataacctggacacaggtaaagtcgtcgctgtcgtcgtggaagtaccagtcaacacggccgatcgcggcaggctctga

SEQ ID NO: 77492 - DNA, 1713 bp, Saccharomyces pastorianus
atgtcacttctaatagattctgtaccaacagttgcttataaggaccaaaaaccgggtacttcaggtttacgtaagaagaccaaggttttcatagatgagcctcattatactgagaacttcattcaagcaacaatgcaatctatccctaatggctcagagggaaccactttagttgttgaaggagatggtcgtttctacaacgatgttatcatgaacaagattgccgcagtaggtgctgcaaacggtgtcagaaagttagtcattggtcaaggcggtttactttcaacaccagctgcttctcatataattagaacatacgaggaaaagtgtaccggtggtggtatcatattaactgcctcacacaacccaggcggtccagagaatgatttaggtatcaagtataatttacctaatggtgggccagctccagagagtgtcactaacgctatctgggaagcgtctaaaaaattaactcactataaaattataaagaacttccccaagttgaatttgaacaagcttggtaaaaaccaaaaatatggcccattgttagtggacataattgatcctgccaaagcatatgttcaatttctgaaggaaatttttgattttgacttaattaaaagcttcttagcgaaacagcgcaaagacaatgggtggaagttgttgtttgactccttaaatggtattacaggaccatatggtaaggctatatttgttgatgaatttggtttaccggcagaggaagttcttcaaaattggcaccctttacctgatttcggcggtttacatcccgatccgaatctaacctatgcacgaactcttgttgacagggttgaccgcgaaaaaattgcctttggagcagcctccgatggtgatggtgataggaatatgatttacggttatggccctgctttcgtttcgccaggtgattctgttgccattattgccgaatatgcacccgaaattccatacttcgccaaacaaggtatttatggcttggcacgttcatttcctacatcctctgccattgatcgtgttgcagcaaaaaagggattaagatgttacgaagttccaaccggctggaaattcttctgtgccttatttgatgctaaaaagctatcaatctgtggtgaagaatccttcggtacaggttccaatcatatcagagaaaaggacggtctatgggccattattgcttggttaaatatcttggctatctaccataggcgtaaccctgaaaaggaagcttcgatcaaaactattcaggacgaattttggaacgagtatggccgtactttcttcacaagatacgattacgaacatatcgaatgcgagcaggccgaaaaagttgtagctcttttgagtgaatttgtatcaaggccaaacgtttgtggctcccacttcccagctgatgagtctttaaccgttatcgattgtggtgatttttcgtatagagatctagatggctccatctctgaaaatcaaggccttttcgtaaagttttcgaatgggactaaatttgttttgaggttatccggcacaggcagttctggtgcaacaataagattatacgtagaaaagtatactgataaaaaggagaactatggccaaacagccgacgtcttcttgaaacccgtcatcaactccattgtaaaattcttaaaatttaaagaaattttaggaacagacgaaccaacagtccgcacatag

SEQ ID NO: 77493 - DNA, 2043 bp, Saccharomyces pastorianus
atgtattcttggaagtcaaagtttaagtttggaaaatctaaagaagaaaaagaagccaaacatagtgggttttttcactcctctaaaaaggaagaacagcagaataatcaagcaactgcgggggaacatgatgcttcaattactcgttcatctttagacaggaagggcacgataaatccatcaaattcatcagtggtcccggttcgtgtttcatacgatgcatcctcatcgacctctactgtacgagattcaaatggtggtaattcagaaaacacgaactcatctcaaaatttagatgaaacagcaaatattggttctacagggacacccaatgatgccacctcaagttcaggaatgatgactatcaaagtatataatggcgatgactttattttaccttttccgattacctcaagcgagcaaatattgaataaactattggcctcgggtgttccaccgccacataaggagattagtaaagaagtagatgctttaattgcacaactgtcccgtgttcaaataaagaaccaaggtccagctgatgaagatttgatctctagcgagtcagcagcaaagttcatcccatctactatcatgttaccagggtcttcgaccttaaatcccttactatatttcaccattgaatttgataatacagttgcaactattgaagcagagtatggtacgatcgctcaacctggtttcaataaaatatctacctttgatgtgacaaggaaattaccttatttaaagattgatgtatttgcaagaattccgtccattcttttgccctcgaagacatggcaacaggagatgggtttgcaagacgagaagctacagaccatttttgataaaataaattccaatcaagatatacatttagattctttccatttgcccatcaacttaagttttgactctgcagctagtattagactatataatcaccactggatcacattggataatggcttgggtaagatcaatattagtattgattataaaccttccagaaataaacctttatccatcgatgatttcgatcttttgaaagttatcggtaagggttcgtttggtaaagtgatgcaagtcagaaagaaagatacacaaaaagtatacgctttgaaggcaatcagaaaatcatacattgtctctaaatccgaagtcacgcatactttggcagaaagaaccgttctagcacgtgttgattgtccatttattgtacctttgaagttttctttccaatcaccggaaaaattatactttgttttagcgtttatcaatggtggtgagttgttttatcatctacaaaaggaaggaaggtttgatttatcacgtgccagattttataccgcagaattgttatgtgcgctagacaacttgcataaactagatgttatctatcgtgatttgaaaccagagaatattttattggattatcaaggccacattgccctttgtgatttcgggctgtgcaaattgaatatgaaggatgatgataagacagatactttttgtgggaccccagaatacttggcaccagaactattgctaggtttaggctatacaaaggcagtagattggtggacattgggagtcttgttatacgagatgctcacaggtcttcctccttattatgatgaagatgttccaaaaatgtataagaagattctacaggagccactagttttcccagatggatttgatagagatgcaaaggatttattgattggattattgagtcgtgatccgacaagaagattgggctacaatggtgccgacgaaattcggaaccatccttttttcagtcaattatcatggaagcgcctgttgatgaagggttatattccaccatataaaccagctgttagtaattccatggatactagtaatttcgatgaggaattcactagggagaagccaattgatagtgtggtagatgaatacttgagtgaaagtgttcaaaagcaatttggtggctggacatacgttggaaatgaacagctaggtagctcaatggtgcaaggtagaagcattagatag

SEQ ID NO: 77494 - DNA, 381 bp, Saccharomyces pastorianus
atgaaagaatctcttctaactttgacagagaaaataatgtttaccacgacagtcttgaaaccgacgataacaacaccgataacaatgttaataacaacgatgagaacgctggttgcaatgaaaattcgccattattggaagatgatggcaataaaagaccggaaaattcaaataccccccgtgaagtatcagatggagctatcaataagaaccctagaaataaatctactaaaaaacgtcaaagaaacagaggcaaatcttctaaaaagaagaacagatcgagaaaataagagacattatgaatttggttttttttacaatttacgcatacacaatatatacattcctactagcttttttttcttcaattcgatagtttag

SEQ ID NO: 77495 - DNA, 504 bp, Saccharomyces pastorianus
atgtctgtgaaacccattgacaactacatcacgaacagtgttcgcctttttgaggtgaatccatctcaaacgctcttctccatatcatataaaccaccaacacagaagacagacaccaaagtgtcctttagaactcataactcgcatttatccttgaactataaatttactactaataagagtaaagatgtttcaagattacttagtgcattaggcccacgaggcgtatctataactccaggtaaaattgaaaaaatagcacagtcgaagaagaaaaataacaaaataaaagaatcgagtaaaaaaataaaaggtaagagcatccaagacattgttggtttagccaccttaattgtcaacacagatgttgaaaagagcgatcctgcggctgagaaaactgctacagaaccgaagcaaaaagctaatgctgtgcaaaataacaatggcaactctgcagcttcaaaaaagaaaaaaaataaaaacaaggacaaaaaaaagcgttaa

SEQ ID NO: 77496 - DNA, 2559 bp, Saccharomyces pastorianus
atgttcaagtcgaaaacaagcactttaagctatgatgaaaccccgaactccaacgagggtgatcgcaatgcaacccctgtaaatcccaaagaaaagagccaaacgaaacatttgaacataccaggcgacaggagccgacattcctccattgcagattcaaaaagaagctcttctagatatgatggaggctactctgccgatataattcctgctcaattaagattcattgataatatagactacggcacgaggctgagaaaaacacttcacagaaactctgtggtttcaaatgggtacaataaactcagtgagaatgaccgatggtatttcgacctattcgataggaaatatttcgaaaactatctcgaagaacccacatatattaaaatatttaagaaaaaggaaggattagaacagtttgatagaatgttcttagctcaagagttgaaaattcccgacgtttacaaatctacaacctaccagggagaacctgcagttgctaattcagagctattcaagaattcaatatgctgctgtacgttcagtcatgatggtaagtatatggttattggttgtaaagatggctctttgcatctttggaaagtcataaactcaccagttaagagatccgaaatgggacgctcagaaaagtcagtcagtgcctctagagcaaactcactaaagattcaaagacatttggcgagcattagttctcataacggctccatatcaagtaatgatttgaagccgagcgaccagtttgaaggaccttccaaacaattacatttatacgcaccggttttctattctgatgtgtttagggtttttatggagcacgctttagatattttggatgcaaactggtccaaaaatggatttctaataacagcatcaatggacaaaactgcaaaactatggcaccctgagaggaaatactcattgaaaacttttgttcacccagattttgttacatccgcaatattttttcccaatgatgatcgtttcataattaccggatgcttagatcacaggtgtagactgtggtctatactggacaatgaggtttcttatgcctttgattgcaaagatttgataacatccctaacattatctcctcctgatggggaatatacaattatcggtacattcaatggatacatttatgttttactgacacatggattaaaatttgtatcttcattccatgtatctgataaaagcactcaaggaaccactaagaatagctttcatccatcttccgaatatggaaaggtccaacacggccctcgaatcacgggtttacaatgcttcttttctaaggtggacaaaaatctaagattgatagttacgacaaatgattcaaaaatccaaatctttgatctaaatgaaaaaagacctttagagctttttaaaggatttcaaagtggttcctcacgtcatagaggccaattcctaatgatgaaaaatgaacctgtagttttcacgggaagtgatgatcattggttttatgcctggaaaatgcagtcctttaatctttcagcagaaatgaattgcactgctccgcatagaaagaaacggctgagcggcagtatgagtttaaaagggctgttgagaattgtatctaataagagtacgaatgatgaatgtttgacagaaacgtcaaaccaaagcagctcacacacatttaccaactcatcaaaaaatgttcttcaaactcaaactgttggttctcaagctatcaaaaacaatcattatatatcatttcatgcccataactcccctgtcacatgtgcttccattgctcccgacgttgcaattaagaacttgtccttgtcaaacgatttgattttcgaactgacttcacagtacttcaaagaaatgggccaaaattattcagaatctaaagaaacatgtgataacaaacctaatcacccagttacagaaacaggaggattcagctcaaacctatcgaacgttgtgaataatgttggaaccattctaataacaacagacagtcaaggtctaatccgtgttttcagaactgatatcttaccggaaatacgaaaaaaaataatagaaaagttccatgaatacaatttattccacctcgaagctgctggtaaaatcaacaaccacaacaatgacagcatattggaaaatagaatggatgaaagaagttccacagaggataatgagtttagcacaaccccaccatctaacacgcacaatagtaggccaagtcacgatttttgtgagctgcatcctaataatagcccggtgatttccggcatgccatcaagagctagtgctattttcaagaattcgatctttaataaatccaatggaagttttatatccctaaagtcaagaagtgaaagtacgagctccacggtgtttggaccgcatgatattccgagagtttctaccacttatccgaagttgaaatgtgacgtctgcaatggatctaattttgaatgtgcttccaaaaaccccattgctggcggcgatagcggtttcacgtgtgctgattgtggtacaatcctcaataatttcagatag

SEQ ID NO: 77497 - DNA, 975 bp, Saccharomyces pastorianus
atgtcatctgacaactctaaacaagataaacaaattgaaaaaacagccgcccagaagatatcgaagtttggttcgtttgtggctggtgggctagcagcatgtatagctgttacagttactaatccgatcgaattgattaaaatcagaatgcagcttcaaggtgaaatgtcagcatcagctgcaaaagtttataaaaatccaatccaaggtatggcggtaattttcaaaaacgaaggtataaaaggtctgcaaaaagggttaaatgctgcttatatctatcaaattgggctaaatggttccagattagggttttatgagccaatcagatcatcattaaatcagcttttcttcccagatcaagagccacataaggtacagagcgtcggagttaacgtcttttctggtgccgcatctggtataattggtgcagtcattggctctccattattcttggtgaaaacaagacttcagtcatattccgagtttataaaaattggtgaacaaacgcactacaccggtgtttggaacgggttagtaaccatttttaaaaccgaaggtgttaagggtctattcagaggtattgatgcggcaattttaaggacaggtgctggttcctctgttcaactacctatctacaacacagcaaagaacattttggtcaaaaatgatctgatgaaagatggcccagcattacatttaactgctagtactatctctgggttaggtgttgccgtcgttatgaacccatgggatgtcattttgacaagaatctataatcaaaaaggtgacttgtacaagggacctatagattgtttggtcaaaactgttagaatcgaaggtgtaaccgctttgtataagggttttgcagctcaagtgttcagaatcgcacctcatacaatcatgtgtttgaccttcatggaacagacaatgaaactagtttattcgatagagtcgagagttttaggccataattaa

SEQ ID NO: 77498 - DNA, 648 bp, Saccharomyces pastorianus
atgttcgaaattaaactgaatgatagaataactgaatttctgcgaaagttcaagaatagcgcgaaatcaaacgaaggaattgatgaggacattgatttgttcctgaagcgacacgcaatacctatgcagtcacttcttttttatgtgaaagagtatagaaaagacagtgatctcccatgctctatcaaagaacttttgaaacctttggagttcgaattcaagcccaaggccgtcagaggttcacactattcagaggatttcaagaaaaatttagagtttttgaaatatcaggaacaagaacttgaatatcaaagtatggtcaagagaagcaagtctgtcttttcacttcaagaagacgatgaactcacgccttcacaaattaataaacagattaaggaacaagttaccactgtcttcaacgttcttgtaagtgtcatatcggttgttgtggccatttggtactggaccggatcttcaacaaactttccgatccatgttcgtcttttgttgtgcttgttctttggaatattggtcttagtagcagatgtggttgtgtataacagctatctgaaaaaactcgaagaagcaaaagtaaaagaaaaaacaaaggttgagaaaaagaaagttctaagcaagattacactgtaa

SEQ ID NO: 77499 - DNA, 312 bp, Saccharomyces pastorianus
atgtcctcatcaattccttcgtttgatttcgcgctattcttgaactttcgcagaaattcagttattctatcattcagtttaatttcgaacattagagttcttttatgtgatgccaatcgtcaattatcctatcttaccttttcttcatttctttcagcgttttcatgtgagatttgctttattttcgcttcctcgtttctcattttaaatattcacacgtccgtcatgtctattttgagtcagttaaatacacaagatttttgtaaaactgagtatttcgtgaacaatataattgttcggattcaatcatag

SEQ ID NO: 77500 - DNA, 651 bp, Saccharomyces pastorianus
atgtccgataaagttattaaccctcaagttgcatgggctcaaaggtctagtactactgatccagaaagaaattatgtcttaataactgtgtcaattgcagactgtgatgcccctgagttaaccattaagccatcatacatcgaattaaaggctcaatcaaagcctcatgttggcgatgaaaatgtccatcattatcaattacacattgatctatacaaggaaattatacctgaaaaaacaatgcataaggttgctaatggccagcactactttttgaaattgtataaaaaggatttagaatctgaatactggccacgtttgacgaaggaaaaggtgaagtacccttacatcaaaactgatttcgataaatgggttgacgaagatgaacaagacgaagttgaagctgaaggtaatgatgccgctcaaggaatggatttcagccaaatgatgggaggtgctggtggcgctggaggtgctggaggcatggacttcagcaaaatgatgggaggtgctggtggcgctggttctccagatatggctcaattgcagcaattattagctcaaagcggtggtaatttggacatgggagatttcaaagaaaacgatgaagaagatgaagaagaggaaatagagccggaagtgaaagcttaa

SEQ ID NO: 77501 - DNA, 1557 bp, Saccharomyces pastorianus
atggatgaatatagtagtatatattcacaaccaaagactcctcggttgaaacaagaaggatttcccgactccattggcgatcaacacgaaaaggcattgattgatgaaaatggtaaggaagataaaaaaatggcatccactgaagggaccactggtgattctcgcagtacacctttgactgtatctattccgacgtttgaaaatgtccaagcattacctacaccgatgacctacactccgttatccccaggcaatctgtcaatgtcacctatagatcaatcctcgttgaatatacccaaaagacgaagtcatgcacgattactggatgatatgctttctgttacacaaccaaaccaaagagttgtttctgaacttattgcaccagctaatttatccccccaaagggttgtttccttaccaacagtgactgaagaggctttagtaaatgattctgttgatagtgataactacacgaaagaaccttattttcccgaaagtagtagttctaccgaaaagtgtgacgatgatatatttcagggatttcttttagatcactgggatcgcccgttattatggaaaaaggtcaggcccattggttcaggaaattttagtaccgtacttttatatgaactcatggaccaaagcaatcctaaactgaaacaagtggccgttaaacgactcaaatatcccgaggaattatcaaatgttgaacaaatcaatacatcgttacgatataaggaaactttatcccgtttggaaaattctctgactagggaattgcaggtgctaaaatcactaaatcacccatgtatagttaaactacttgggataaacaatccaatttttgttactagcaaaaaacctttacgcgatttgattaaaaaaactcgaagagctctgccgccttgtgatatgattatgtcttattgtcctgcaggagacttattagctgccgtcatggcccgtaacggaagactagaagcgtggctgattcaaaggatttttacggaagtagtactggcagtaaaatatttgcacgaaaacagtattattcatcgggacctaaaattagagaatatattactgaaatatagttttgatgatatcaacagttttagggactcacccatttactgcaagcaaaattttattgagctagcagattttggtctctgcaaaaaaattgagaacaatgagatgtgtacagcaagatgtggatcagaggattatgtctcaccagaaatcctgatgggagttccctacgatggccatttaagcgacacgtgggccttaggtgtcatactatacagcttgtttgaggacagattaccatttgaccctcctccaaacgcttcagcaagacagcgtagcagagctacgtcacatcgtattgccaggtttgattggagatggtaccggttaagcgatggtaaaactaatgtgggaaaacagattgtggaaaatacgctaacgaggaagaaccaacgttggtcgattaatgaaatttacgaatcccccttcgttaaaacgatcgctgatactctaagtttttcttga

SEQ ID NO: 77502 - DNA, 1104 bp, Saccharomyces pastorianus
atgccttcgacacctagctttgttagatctgctgtctcgaaatacaaatttggtgcgcacatgtcaggtgccggtggaatttctaatagtgtaactaatgcatttaacactggctgtaattcgtttgccatgtttttaaaatctccaagaaagtgggtttctccgcagtatacacaggaggaaatagataaatttaagaaaaactgtgcaacttacaattataacccattgacggacgtcttaccgcatggccaatactttattaatttggctaatccggatagggaaaaggcagaaaagagttatgagtcattcatggacgatctgaacaggtgtgagcaattagggataggcctgtataacttacatccaggttctactttgaaaggtgaccatcagttgcagttaaaacaactagcctcatatttgaacaaagcaattaaggaaacgaaatttgttaaaattgtattagaaaatatggctggtactggaaatttagtaggaagttctctggtagatttgaaggaggttattggaatgattgaagataaatcaagaatcggcgtttgcatagatacatgccatacatttgcagcaggctacgatatcagcaccactgaaacgtttaacaatttttggaaagagttcaatgatgtaatagggtttaaatatctaagtgctgttcacttaaatgattccaaggctcctttaggagcaaatagagatttgcatgaacgcttgggtcaaggttatttgggtatagatgtgtttagaatgatcgcgcactctgaatacctgcagggtatccctattgtcttggaaactccatacgaaaatgatgaaggctatggtaatgaaatcaaacttatggagtggttggaatcaaagagtgagagcgaattgttagaagacaaggagtataaagaaaaaaatgatacgctgcagaaattaggtgctaaatcgcgtaaggaacagttagacaagtttgaggttaaacaaaagaagcgagctgggggcaccaagaggaagaaagccactgcagagccaagcgataatgatatcttgtcacaaatgacaaagaagaggaagactaagaaagaataa

SEQ ID NO: 77503 - DNA, 1149 bp, Saccharomyces pastorianus
atgggtattaaaggtttgaatgcaattatatcggaacatgtaccctctgctatcaggaaaagcgatatcaagagcttttttggcagaaaggttgccatcgatgcctctatgtctctatatcagtttttaattgctgtaagacagcaagacggtgggcagttgaccaatgaagccggtgaaacaacgtcacacttgatgggtatgttttataggacactgagaatgattgataacggtatcaagccttgttatgtcttcgacggcaagcctccagatttgaaatctcatgagttgacaaagcggtcttcaagaagggtggaaacagaaaaaaaactggcagaggcaacaacagaattggaaaagatgaagcaagaaagaagattggtgaaggtctccaaagagcataatgaagaagcccaaaaattactaggactaatgggaatcccatatataatagcgccaacggaagctgaggctcaatgtgctgagttggcaaagaagggaaaggtgtatgccgcagcaagtgaagatatggacacactctgttatagaacacccttcttgttgagacatttgactttttcagaggccaagaaggaaccgattcacgaaatagatactgaattagttttgagaggactcgacttgacaatagagcagtttgttgatctttgcataatgcttggttgtgactactgtgaaagcatcagaggtgttggtccagtgacagccttaaaattgataaaaacgcatggatccatcgaaaaaatcgtggagtttattgaatctggggagtcaaacaacactaaatggaaaatcccagaagactggccttacaaacaagcaagaatgctgtttcttgaccctgaagttatagatggtaacgaaataaacttgaaatggtcgccaccaaaggagaaggaacttatcgagtatttatgtgatgataagaaattcagtgaagaaagagttaaatctggtatatcaagattgaaaaaaggcttgaaatctggcattcagggtaggttagatgggttcttccaagtggtgcctaagacaaaggaacagctggctgctgcggcgaaaagagcacaagaaaataaaaaattgaacaaaaataagaataaagtcacaaagggaagaagatga

SEQ ID NO: 77504 - DNA, 2196 bp, Saccharomyces pastorianus
atggacaaattagtcgtgaattattatgaatacaagcaccctataattaataaagacctggccattggagcccatggaggcaaaaaatttcccaccttgggtgcttggtatgatgtaattaatgagtacgaatttcagacgcgttgccctattattttaaagaattcgcataggaacaaacattttacatttgcctgtcatttgaaaaactgtccatttaaagtcttgctaagctatgctggcaatgctgcatcctcagaaacctcatctccttctgcaaataataataccaaccctccgggtactcctgatcatattcatcatcatagcaacaacatgaacaacgaggacaatgataataacaatggcagtaataataaggttagcaatgacagtaaacttgacttcgttactgatgatcttgaataccatctggcgaacactcatccggacgacaccaatgacaaagtggagtcgagaagcaatgaggtgaatgggaacaatgacgatgatgctgatgccaacaacatttttaaacagcaaggtgttactatcaagaacgacactgaagatgattcgataaataaggcctctattgaccggggattggacgacgagagcggtcctactcatggtaatgacagcggtaaccaccgtcacaacgaggaggatgacgtccatacccaaatgacgaaaaactattctgacgtagtgaacgatgaagacatcaacgttgccattgccaatgctgttgcaaatgtagattctcaatcaaacaataagcatgatggaaaagacgatgatgccactaataacaatgatggccaagataatactaataataacgatcacaacaataacagcaatatcaataacaacaatgtcggtagccacggcatttcctcccactcaccatcctccatacgagacacgtctatgaatttagacgtcttcaattctgctaccgatgatataccgggcccatttgtcgttaccaaaattgagccctatcatagtcacccactagaagataacttgtcactgggtaaatttattctaactaagattccaaagattttacaaaacgatttaaagtttgatcaaatactagaaagctcttacaataattctaaccatacagtgagtaaatttaaagtttctcattacgtggaggagtccggtcttttagacattttaatgcaaagatatggattaaccgccgaagatttcgaaaaaaggttactttcccaaatagccagacgtataacgacgtataaagcaagatttgttttgaaaaagaaaaaaatgggcgagtataatgatttacaaccttcttcatcttccaataacaacaataacaacgatggcgagctttctggcacgaacttgagaagtaactctatcgactacgccaaacatcaggaaatatcaagtgcgggtacctcatcgaacacaaccaaaaatgtgaataataacaagaatgacagtaatgacgataataacggcaacaataataatgacgcctcaaatttaatggaaagtgtgctagataaaacctctagtcaccggtatcaacccaagaagatgccaagcgtcaataaatggagcaagccagatcaaataactcattcagacgtgtccatggttggcctagatgaatcaaacgatggcggtaatgaaaatgtccacccaaccttggctgaagtagacgctcaagaagctcgtgaaactgctcagttagccatagacaagatcaattcttataagagatccattgatgacaagaatggtgatggccataacaattcgtcgagaaacgtggtagatgaaaacttgattaacgatatggattcagaagatgctcacaagttcaaaagacagcatttgtcagatatcacactggaagagagaaatgaagacgacaaactaccacatgatgtggcggaacagttaaggttactgtcatcgcatttgaaagaggtagagaatctacaccagaataatgatgatgacgtagacgatgtaatggtggacgtggatgtagaatcgcagtataataagaacacaactcatcataataaccatcatagccaacctcatcacgatgaagaagatgttgctggactaatagggaaagccgatgatgaagaagacctttctgatgaaaacattcaaccagaattaagaggtcaatag

SEQ ID NO: 77505 - DNA, 336 bp, Saccharomyces pastorianus
atgagaaaaatagctcgtcttctcaactgggtatctattgacctcttaattctggttgaatgttttcatcagaaaggtcttcttcatcatcggctttccctattagtccagcaacatcttcttcatcgtgatgaggttggctatgatggttattatgatgagttgtgttcttattatactgcgattctacatccacgtccaccattacatcgtctacgtcatcatcattattctggtgtagattctctacctctttcaaatgcgatgacagtaaccttaactgttccgccacatcatgtggtagtttgtcgtcttcatttctctcttccagtgtga

SEQ ID NO: 77506 - DNA, 942 bp, Saccharomyces pastorianus
atgccactggtgctttttacgggatacccatgtagtggtaagacaacgcttgctaaacatttggtacaactactacagtccaagatcgatgcaaccccatcattaagtaaatattccataacctatcattcagatgaatctttaggcataaaacattcagattatataacttcccaagatgaaagaaaattgaggtcggagatcatctctgcagtgaaaagagatctatctaaaaacaagatagtcattgtagactcgttgaattatatcaagggtttccggtatcaacttcactgcgaggtgaaaaatttgtccaccacattttgtgtaattcaaacactgtgtccaccagagactatattcgagtggaataagacttcaaacccgaacccttgggaacccgagttattgaatcaattgattcaacgatacgaagaacctaactcaaacaaccgatgggactctccactctttgctattcttactcctcaggacaacataactgactacatcgacgatatttgtaaagtagtctttcaaacttccaaatcggctaaaaacagtggacacaatgatccgttgagtaagggcttacaaaaaccgaactcagccacggtactaaagcctgcgtctcagtccaacttcatccaggttctcgacatcgaaactagtaagataataaaaaccataatgaaccacatcaaaagcctgacttctattggcggggtaagtaacggaacaagagtcattgtttccgaagggattaccgatatcaatgatgatggttgcttcttcgtagacttgcccattggtaacgtcgttacgttggcgcaattgcagagattgaaaaggcaattcattaacttcaacaaactaagagatatagatcaagataggatcggtccgcttttcgctgattatcttaacaaaaacttgaattga

SEQ ID NO: 77507 - DNA, 1662 bp, Saccharomyces pastorianus
atgaccgcaaagacttttctactacaggcctccgctagtcgccctcgtagtaaccattttaaaaatgagcataataatattccattggcgcctgtaccgatcgccccaaataccaaccatcataacaatagttcgctggaattcgaaaacgatggcagtaaaaagaagaagaagtctagcttggtggttagaacttcaaaacattgggttttgcccccaagaccaagacctggtagaagatcatcttctcacaacactctacctgccaacaacaccaataatattttaaatgttggccctaacagcaggaacagtagtaataataataataataataacaccatttcgaataggaaacaagcttccaaagaaaagaggaaaccaagacatatccagacaatcgatgaaaagctaataaacgactcgaattacctcgcatttttgaagttcgatgacttggaaaatgaaaagtttcattcttctgcctcctccatttcatctccatcttattcatctccatctttttcaagttatagaaatagaaaaaaatcagaattcatggatgatgaaagctgcaccgatgtggaaaccattgctgctcacaacagcttgctaacaaaaaaccatcatatagattcttcttcaaatgttcacgcaccacccacgaaaaaatcaaagttgaacgactttgatttattgtccttatcttccacatcttcatcggccactccggtcccacagttgacaaaagatttgaacatgaacctaaattttcataagatccctcataaggcttcattccctgattctccagcagatttctctccagcagattcagtctcgttgattagaaaccactccttgcctactaatttgcaagttaaggacaaaattgaggatttgaacgagattaaattctttaacgatttcgagaaacttgagtttttcaataagtatgccaaagtcaacacgaataacgacgttaacgaaaataatgatctctggaattcttacttacagtctatggacgatacaacaggtaagaacagtggcaattaccaacaagtggacaatgacgataatatgtctttattgaatctgccaattttggaggaaaccgtatcttcagggcaagatgataaggttgagccagatgaagaagacatttggaattatttaccaagttcaagttcacaacaagaagattcatcacgtgctttgaaaaaaaatactaattctgagaaggcgaacatccaagcaaagaacgatgaaacctatctgtttcttcaggatcaggatgaaagcgctgattcgcatcaccatgacgagttaggttcagaaatcactttggctgacaataagttttcttatttgcccccaactctagaagagttgatggaagagcaggactgtaacaatggcagatcttttaaaaatttcatgttttccaacgataccggtattgacggtagtgccggtactgatgacgactacaccaaagttctgaaatccaaaaaaatttctacgtcgaagtcgaacgctaacctttatgacttaaacgataacaacaatgatgcaactgccaccaatgaacttgatcaaagcagtttcatcgacgaccttgacgaagatgtcgattttttaaaggtacaagtattttga

SEQ ID NO: 77508 - DNA, 1353 bp, Saccharomyces pastorianus
atgtactcatttgaactggacaaattgaaaattgagctgaaaacatgggagcatgatttcattgataaaaataaaagggaacccacaagggatgacatcaagagcctgcggactgttcggcagatgtataaacaatattccacactgaagaagaaacaatctttgcaacgacaaaaagttgacactcaagagtcggttgaactcccggcacataaaaaagaccacgacgaagtcgtagagataggccctactccccaagtttacggtaaggcgattagtatctttgacatgaatttgtcgcctataaagcctatatacatgacattcacaaataatattgatgttaacaatgataactccaagacaatttctaatgaatcttctccacgaaaaactattctcctaaaatcgtcgcctgcagatcgtacgttagtggcggaaccaatatccagtgtgaaacgccaattaaactttcaaatgctaaacgcttcttctacacgtactccgacttcatcaccatgcaagaatcgcaatgggaagttggtagaaatcaagaaatgtagtccaactattaatcctccactagaatctggcaaaccatcggggtattatggacctaattccccgctaaaattggatgaagaaaacattcaactaaacatctcacttaattcaagcactaaacgccggcttcaaatagcatatccatctttacagaagactccctcaaaggatcaagcggatatttcaacttcatttagtccgtctccactcattagaagaccactgacgaaatccctgatagagttggccagggaacatactgaaattgtaaaagaatttggtgtcttacaggaagaagatattgaagaggaagaggaaggagaagaagacgagaatgagaaaaaccacgaagacgactttgggctagaagatgaactaattagaccaaaagttgtgaaggatatattccaagaggatgatgataatgaggatagccaagcaagggaagataccttcataagaaagagacccaaaagaagaaaggttatcagaagattacgagacaatgatccagaaaccgagaccgcaggttttgagagagatgtccataaggagctggtgaaacttaaaagaaggaaagtggcagaatttttgggatccacctcacaaatctctgatactgaatttgaacatgatccggaggcaagcagcggcgttgtaagctcagagcaaaagcctacggctaagcgaaagggtagaaagaagtataatctagtgagcaataacttcagaagactaaaactgccaaagaaaaaccgattctctaatggacgatggggaagacggtga

SEQ ID NO: 77509 - DNA, 930 bp, Saccharomyces pastorianus
atgttctggaaaaaggatcccaccgtcagttgggaaagaaaaaatatcaatgacattgattttagtcattttaatgtggccataatcggtggcacaggtggacttggacgtgcgataagtagagagctggcccaaagaaatgccagggttactgttgtcgggcaaacttttagggacgaggacctaaaagataacattaactttgtcaaggctgatttaagtttagtgtcagaatgcaagcgtatatctcatagtgatgaaattccctacgaggagttaacacatctgattttcactacgggtatttttgcatcacgccagagacaagctacaagtgagggtttggaaaaggacatggcagtgagctatttgagtagatacattatcttccatgatgtagcgaagcgattaggaattagtaggacaaaaaaagacgatttgccaaaagttttcatagcagggtttccaggaaatggtcaggtgggagacccagatgacttgaattctgatgaaaagaagtatagtgcctacgctacacatatgaacactgtggcagccaatgaaagtctggtcatagacgctaaagacagatacacgaatatagatactttcggtttgaaccctgggctgatcaaaacgaacattcgtaataatcttcttggcagtgacacctacctcagccgcattacagaatggataatcagctggacctgtcaaagcgcagagacgtatgctaaaacaatttgcaccctgattgcgagccccgctatcgaatcacgcagtggtacaatgttcagcaacaaaggcgatgctattttaccttcgcctggtttgaccaaagatgttgttgagaagtttatggaaaattcggaacttttagttgaaaaggccttgcgtaatcaaagtcctttcacttccagtaacgaatga

SEQ ID NO: 77510 - DNA, 120 bp, Saccharomyces pastorianus
atgccatttccgtcgatattacatctgacaataggaagatatgcgagctatgactccaacaatcacatgagacggcgtgcaaaactcatggaagccatcttccgcatccgaacaatatga

SEQ ID NO: 77511 - DNA, 1356 bp, Saccharomyces pastorianus
atgttgaggacgaggcttactaattgcagtctatggaggccctactacacgtcatcgcttagtagagtaccaagagcacctccagataaagtcttggggttatctgaacacttcaaaaaggtaaaaaatgttaacaaaattgacctgaccgtaggaatatataaagatggttggggcaaagtgacgacgtttccctccgttgcaaaagctcaaaaattgattgaatctcatttagagttgaataagaatctttcatatttaccaataacaggttccaaagaatttcaggaaaacgttatgaaatttttgttcaaggaatcatgtccgcagtttgggccattttatttagcccatggtagaatcagctttgttcagactttgagtggtacaggcgccctagctgtagcagctaaattcttggcattatttatttcaagagatatttggatacctgacccatcatgggcaaatcataagaacatttttcagaacaatggttttgaaaatatttaccggtattcctattataaggacggtcagatagacatcgacggatggattgagcaattgaaaacctttgcatataacaaccagcaagaaaacaataagaacccaccttgcataatcttgcatgcgtgttgtcacaaccctacaggtctcgacccaactaaagagcaatgggaaaagattatagatactatatatgagctaaaaatggtacccattgttgatatggcttatcagggtttagagtctggtaacttactaaaggacgcatatttattgaggctatgtctcaatgtaaataaatatccaaattggagtaacggtatctttctttgtcaatcttttgccaagaacatgggcctttatggtgaacgagttggttccttaagcgttatcacgccggcaactgcgaacaatggaaagttcaaccctctacaacagaaaaactcattgcagcaaaatattgactcgcaattaaaaaagattgtcagaggtatgtattcttctccaccaggatacggttctcgtgtggtaaatgtagtattatcagatttcaaattgaaacagcaatggttcaaggatgttgatttcatggttcagagattgcatcacgtcagacaggagatgtttgaccgtctagggtggccggatcttgtaaatttcgcacaacagcacggtatgttttactatacaaggtttagtccaaagcaagtcgaaatattgagaaacaattacttcgtctatttaacaggtgatggtagattgtcgcttagcggagtcaatgattcgaacgttgattacttatgtgaatctcttgaagcagtctcgaaaatggacaaactcgcataa

SEQ ID NO: 77512 - DNA, 2154 bp, Saccharomyces pastorianus
atgtgtggtatctttggttactgcaattatctagtggaaagatccagaggagaaattatcgacaccttaatggatggtttacaaagattagaatatagaggctatgattccaccggtattgctatcgatggtgacgaagctgattctactttcatctataagcaaatcggtaaagtgagtgctttgaaagaggagattactaagcaaaatccgaacagagacgttacttttgtctctcattgtggtattgcgcatactagatgggctactcacggtcgaccagaacaagttaactgtcaccctcaaagatctgacccagaagaccaatttgtggtcgttcataatggtatcatcacaaattttagagaactgaagactcttttaattaacaaaggttataaattcgaaagtgataccgataccgagtgtattgctaaactatatttgcatttatacaatacaaatttacaaaatgggcatgacttagatttccacgaattaaccaagctagttcttttagaactagaaggttcatacgggttattatgtaaatcttgtcactatcctaatgaggttatcgccactagaaaagggtcccctttactgattggtgtcaaatctgaaaaaaaactaaaagtcgacttcgtggatgtggaatttcccgaagaaaacgctggtcaaccggaaattccattgaaatctaacaacaaatcatttggcttgggcccaaagaaagctcgtgaatttgaagctggttcccaaaatgccaatttactaccaattgccgccaatgaatttaacttaagacattctcaatccagggctttcctatcagaagatggatctccaacaccggtggaattttttgtttcttcggatgcggcatctgttgttaaacataccaagaaggtgctatttttagaagatgacgatttggctcatatttacgatggtgagttacatattcatagatctagaagagaagtaggcgcatcaatgacaaggtccattcaaactttagagatggagttagctcagatcatgaagggcccttacgaccattttatgcaaaaggaaatctatgagcaaccagaatctactttcaatactatgagaggtagaatcgactatgaaaataataaagtgatattgggtggtttaaaggcatggttaccagttgtcagaagagcacggagactgatcatgatcgcatgcggtacttcttatcattcatgtttggctactcgtgctatcttcgaagaattatcagatatcccagttagtgtggaattagcgtctgactttctggacagaaaatgccctgtcttcagagacgatgtatgcgtgtttgtttcacaaagtggtgaaactgcggataccatgctggctctaaattattgtttagaaagaggagccttaactgtcggaattgttaacagtgttggttcttctatctctcgtgtcacccactgtggtgttcatattaacgctggtcctgaaattggtgttgcctctacaaaagcttatacttcccaatatattgccttagtaatgtttgctctatcgctgtcagatgaccgtgtatcgaaaatagacagaagaattgaaatcattcaaggtttgaagttaatcccgggccaaattaagcaagtattaaagcttgaaccaagaataaaaaagctctgtgcgactgaattaaaggatcaaaaatctctattgttattgggtagaggttaccaatttgctgctgctctggaaggtgctttgaagatcaaagaaatttcttatatgcattctgaaggtgttttggcaggtgagttgaaacacggtgtcttggccttggtggacgaaaacttgccaatcattgcttttggtaccagagactctctattccctaaagtagtttcctctattgagcaagttactgcaagaaagggccatccaattattatttgtaacgaaaatgatgaagtgtgggcgcaaaaatctaaatcaatcgacctgcaaactttagaagttccacaaactgttgattgtttacaaggtctaattaatattattccattacaactaatgtcatattggttggctgttaataaagggattgatgttgattttccaagaaacttggctaaatctgttaccgtcgaataa

SEQ ID NO: 77513 - DNA, 1545 bp, Saccharomyces pastorianus
atggaggaacaacgtgaaatactggaacaattgaagaaaactctgcagatgctaactgtagagccatctaaaaataaccaaatcgccaacgaagaaaaggaaaagaaagaaaatgaaaattcgtggtgcatcctcgagcacaattatgaggatattgcacaggaattcattgatttcatttacaagaaccctaccacttaccatgtagtatcatttttcgcggagctgttagataagcataacttcaaatacttgagcgagaaatccaattggcaggactccattggcgaagatggtgggaaattctacactataagaaatggaactaacctatctgcctttatcctgggcaaaaactggagagccgaaaagggtgtcggtgtcattggatctcatgtggacgctttgacggtcaaattgaagcccgtctcctttaaagacacagcggaaggttacggaagaattgctgttgctccctatggaggtacactgaatgaattgtggctagacagagacctaggtattggtggtcgccttctttacaagaagaagggcactaacgaaattaaaagcgccttggttgattctacacccctacctgtttgtcgaattccttccttggctccccatttcggtaaacctgctgaaggcccatttgataaagaggaccaaactatcccggtcatcggcttccccactccggatgaggaaggtaatgaacctcccacggatgatgaaaagaaatcgcccttatttggcaaacactgcatccacctgttaaggtacgttgccaaattagccggtgtggaagtgtccgaattgattcaaatggatttagacttattcgatgtgcaaaagggtaccattggaggtattggtaaacacttcctttttgcaccacgtctagatgacaggttgtgtagtttcgcagcaatgattgctttgatttgctacgctaaggatgttaataccgaggaatcagatttattctctactgtcactttgtatgataatgaagaaatcggatcgttgacaagacaaggcgcaaaaggtggcttgttggagtcagtggtggaacgcagttcttctgcattcactaagaaaccggtcgatttgcatacggtttgggctaattccatcatcttgtccgcagacgtcaaccacctctacaacccaaactttcctgaagtctatttgaagaatcattttccagtgcctaatgtcggaatcactttatcactggatcctaacggtcatatggccacagatgtcgtaggaactgccctagtagaagaattagcacgccgcaatggagacaaagtgcaatatttccaaatcaaaaacaactcaagatcaggtggtactatcggcccatcattggcttctcaaacaggtgctcgtaccatagacctgggaattgcacagttgtccatgcacagcatcagagctgctacagggtccaaggatgtcggattaggtgttaagttcttcaacggatttttcaagcactggagatcagtctacgatgaattcggcgagttgtga

SEQ ID NO: 77514 - DNA, 306 bp, Saccharomyces pastorianus
atgtgtgctttattcgctgaggtttcatcgacagctgcagccagttgttcattcggttttctcttgtgcagcggctcaaattgtggcaggcttgtaggctccgaacgccgtaaggtactttatgtttttaatgtcaacgtttgcaagaaaatgtcatcctattactttctgaggcatgataacattgtaatcccttatctcttgcgcttgttggtatcagataaagaagcatcaaacaagaacccactccttccttttctcatggataaagagaggtcgcaccatttcgtgaggaatatgaattag

SEQ ID NO: 77515 - DNA, 4557 bp, Saccharomyces pastorianus
atgactggtcacgtttcaaaaacgagccacgtacccaaaggtcgcccgtcttcattggccaagaaggcagctaaaagggccatggcaaaagtaaattcgaatccaaaaagggcgtcggggcatttggagcgtgttgtacaatctgtgaacgacgctaccaaaagattatctcagcccgactctaccgtaagtgttgctacaaaatcatcaaagagaaaatccagagacacggtgggtccttggaaacttggcaaaacattggggaagggatcttctggtagggttcgcttggctaaaaatatggaaacaggacaattagctgccattaaaattgtccccaagaagaaagcctttgttcattgttctaataatggaactgttcctaattcttactcttcttccatggtcacttccaatgtatcttctccatcaatagcatctagagaacatagtaaccattctcaaacgaacccatatggcatagagagagaaatagtaatcatgaaattgatatctcacacaaacgtaatggcattgtttgaagtttgggagaacaaatcagagctgtacctagttttggaatatgttgatggtggcgaattattcgattatctggtctcgaagggaaagctacctgaaagggaggctatccattacttcaagcagatagttgaaggtgtttcctattgtcattcttttaatatatgccatcgtgatctgaagcctgaaaatttattattggataaaaagaataggagaatcaaaattgctgatttcggcatggcagcattagagcttcctaacaaacttttaaaaacttcatgtggctctccacactatgcgtctcctgaaattgttatgggtagaccatatcatggcggtcctagcgatgtctggtcctgcggtatcgttttatttgcattacttaccggtcacttaccatttaatgatgacaacatcaaaaagctgttgttgaaagttcaatcgggcaaataccaaatgccctcaaatttatcttctgaggctcgtgatttgatatcgaaaatattggtaattgatccagaaaaaagaattaccacgcaagagatattgaagcatcctctgatcaaaaaatatgatgatctcccagttaataaagtgctgaggaaaatgagaaaggataacatggcgaggggaaaatctaactcggatttgcatttgctaaataatgtctcgccctctattgtaactttacattcaaaaggggaaattgatgaatccatcttgaggagtttgcaaattttgtggcatggagtttctcgtgaactaatcactgccaagttgcttcaaaagccaatgtcggaggaaaaactattctactcactgttattacaatataaacaacgtcactcaatatcattgtcctcgtcaagcgaaaacaagaaatcagcaacagaaagtagcgtaaatgaacctaggattgaatacacatccaaaactgccaataatacaggcctaaggagcgagaacaatgatgtgaagactttacattctctagaaattcattcagaagatacttcaacagtgaatcagaacaacgcaattacaggggttaatacagaaattaatgcccctgtattggcacaaaaatcgcaatttagtatcaatacgctcagtcaacctgaaagtgataaggctgaagcagaagctgtaacattaccacccgctattcccatattcaatgcttcttcatcaaggattttccgtaattcatacacctctatttcatcacgttcgagaagatcgctacgcttatcgaattccagattatcattgtccgcttcaacttctagagaaactgtgcatgataatgagatgcctctacctcaactgccgaagtcgccttcaagatattcattgtcaagaagggcaatccacgcctccccatctactaaatcaatacataaatcactttcaaggaagaatatagctgcaactgttgccgctagaagaacactacaaaactcggcttcgaagagatccttgtactcattacagtcaatttcaaaacgttccttgaacctgaataatttgttagtctttgacgatcctctccctagtaagaaaccagcatccgaaaatgtgaataaatcagaaccccattcgttggaatcagactctgattttgagatcttatgcgatcagatcttatttggaaacgccttagataggatacttgaagaggaagaggacaatgaaaaagaacgcgatacccagagacagaggcaaaatgatacaaaaccctcggcagacacttttacgatctctggggtgtctacaaataaggaaaatgagggcccagagtatccaactaaaactgagaaaagtccattcaatatgtcatataaaccatctgagaatatgtcagggctctcttcatttcctatctttgaaaaagaaaacacgttaagctcaagttatttggaagaacagaagccaaagagagcggccctttcagatatcacgaactcatttaataaaatgaataaacaggaaggtatgaggatagaaaaaaagattcaaagagaacagcttcaaaaaaaaaatgaccgcccgtcaccactcaaacctattcagcaccaagaacttcgtgtaaattctttgcctaatgatcaaggtaaaccgtccttatctctagatccccgccgtaacatctcccagccagtgaattcaaaagtggaatcactattgcagggactgaaattcaaaaaggagccagcctctcactggacccatgagagaggttccttgttcatgagtgaacatgtggaagacgaaaaaccagtcaaagcctcagatgtttcaatcgaaagttcatatgtacctttaacaacagtagcaacatcttcgagagatcccagtgttttagcagaatctagtacaattcaaaaaccaatgctgtctttaccttctagttttttgaacacatctatgacgttcaaaaatcttagccagatactcgctgatgacggtgatgataagcatctaagtgtgccacagaaccaatctagaagtgtagccatgtcacaccctttgcgaaaacaatctgccaaaatatctttaactccacggtctaatttgaacgccaatttatccgttaaacgtaatcagggctcacctggctcctatttgagtaatgatctggatggaatctctgatatgacatttgcgatggaaataccaacaaacacctttaccgctcaggcgattcaactgatgaacaacgacacggacaataataaaatcaatacttcgcccaaagcatcttcttttacaaaagaaaaagtaatcaaatcggcagcctatatctcgaaggaaaaagaaccagataatagcgatactaattatattccagattatactataccaaacacatatgatgaaaaagccattaatatttttgaagatgcgccctccgatgagggttcattaaatacatcttcttcagaaagcgattcacgagcaagtgtgcataggaaagcggtatctattgacactatggcgacaacaaacgttcttactcccgcgacaaatgttagagtaagtctttattggaataataacagttctggtatacccagagagactactgaagagatactttctaaacttagattgtcaccagaaaatccttctaatacacatatgcaaaagaggttttcttccacgcgtggtagtcgtgatagtaatgcattaggcatttctcaaagtttacagtcaatgttcaaagatttggaggaagatcaagatgggcatacttctcaagctgatattcttgaatcaagtatgagctattcaaagcgaagaccatctgaggaaagcgttaatccaaaacaacgagtgacaatgcttttcgatgaggaggaggaagaatctaaaaaagtaggtggggggaaaattaaagaagagcacaccaagctagacaatagaatatccgaggaatcttctcaacttgtgttgccggtggttgaaaaaaaggaaaatgcaaataatacagaaaataactattctaaaataccaaaaccctcaacgattaaagttacgaaggataccgctatggaatcaaatacacaaacccatacaaaaaagccaattctaaaaagtgtccaaaatgttgaagttgaagaagcgccttccagtgataaaaagaattggttcgtcaaactatttcaaaacttttcttctcataataatgctactaaggcatccaagaatcatgtaacgaatatatcatttgatgatgcgcatatgctaacattaaatgaattcaacaagaatagtatcgactatcaattaaagaacctagatcacaaatttgggagaaaggtggtggaatacgattgtaaatttgtaaaaggcaacttcaaattcaaaatcaagattactagcacacccaatgcatctacggtaattactgtaaaaaaaagaagcaaacattcaaacacaagttccaataaagcctttgaaaagtttaatgatgatgtggagagagtaattcgaaatgccggacgttcataa

SEQ ID NO: 77516 - DNA, 1764 bp, Saccharomyces pastorianus
atggacaagtatttgaattcatttgttgaccacctttcagagtggtcatctcgtgcctttaggaacaattcatcaagcgctaaccaaagtgcgtcgaacaaggaattagaacaagtttttgaacagatcaatgctatagttgaaaaccacaataacaaattaaccactgcctttgataagatatcatatcgcgttgctcacaagattacacacttggtggaaagccattctttagtattcaactacgccactttagttctcatcgcaagtgctttggtcgttattggctcatttacgtctatttcttctattccatttacagctctacctcctacgagagaacactcattgtttgatcctacagattttgatgtggaccacgattgtcatgttatctaccgcgagaatgatgaagataaaaagaaaaagaagaaaagcaagaggtttttcgatatgatggatgaaaaacatgcgattatactgcccttaactagcggctgtactttactggctctctattttgtgatcaagaaactacacctaaactggctaaaatatgtggtgaaaattttgaattttaatataacactgctaaatatcccagctggcacatttgtctactcctactttctcaactcacttttcagaaacctatcacatttagcttcttggaatcccctggttgttttaccaaggtatcgtgtaacaatagctgatgataacgaagacctgaacaagataggcgggtttgttaccaatttgaattacaaagatggattgaccaactcagttgttcacaagaaaacattggatgagattgaaaaagatcattggatgaagcatttttacagaagagaattagttgaaccgaaggatattaaatcgaagaggcagatcagcaacatgtatttgaatagcgcattaattgtttcgttcgttctgtccatcgtttctaccgtatatttctatttatcacccaatgattggttaatatccaatgctgtcagtatgaatatggctatttggtccattgctcaattaaaattgaagaatttaaaatcaggggccctaatcctaattgctctatttttttacgacatttactttgtctttggtaccgatgtaatggttacagtagctactaaccttgatattcccgtaaaactaagcttaccagtcaagtttaatacagctcaaaacaacttcaatttttcaatacttggtctgggtgatattgccttgcctggtatgtttattgcgatgtgctacaaatatgacatctggaagtggcaccttgatcatgatgacactgaattccactttttgaactggtcatacgttggaaaatattttattactgctatggttagttacgttgcttctttggtatctgccatggtctccttgtccattttcaatactgctcaaccggctttattatacattgttccttccttgttgattagtactattttggtagcttgctggaacaaggattttaagcagttttggaattttcagtatgatacggttgaagtggataaaagtttaaaaaaagcgatagaaaaaaaggagaactctataacttattcgaccttcatcctatcagaatactataatgatgccgacaagtatgccttgcttggtgatgatgtaaacgaaaattttgacgatgatgaagaattcgtgcaagaggaagatctcagtgacagctctgaggaagagctttctgaagaagatctcttggatgacgaatcttcttga

SEQ ID NO: 77517 - DNA, 90 bp, Saccharomyces pastorianus
atgatcaaggtgccacttccagatgtcatatttgtagcacatcgcaataaacataccaggcaaggcaatatcacccagaccaagtattga

SEQ ID NO: 77518 - DNA, 1074 bp, Saccharomyces pastorianus
atgggcgatcataatctgccggattttcagacatgtttgaagttttctgttacagctaaaaagagctttctatgtatgtatagagacagcgtctcaaaggaaaaattagcctcttcgatgccaagtacttgtgatatacaactgaagagggcaatcaatgacgcttatccgggcggaggaataaaggtcacggttctgaactcaacaactgcaagcttggactcgttagcaactacacatgttaaggaatttgagattgttatcattccagacataaattctcttttacagccagaccaagcgaaattagtaaaaattatgagagattgcacagtggcgattgagaaggcacagtcaacacgtatatttataggagtggttcattggaataatcccgtgcagccttcaggcgccgctaaggatggggatgaagcaggtaaaccagctcccaaaactcgcatcttcctgcccacgtctttccgtatgggcgcttggctcaaacacaaattctggtttgcatgtgcacccccatatttggattttgaaagttcaactgagtctagcattaatacaagagccaataatagcattggtatggctgaggaagagaagcaggagccagagagcaagaggtcgatcatattaaatgaagaggcaaatctgaacgatgtatttgtggggtccactgtaagacggtatattctcgatatcatggtccatttgcgaacgcatagattgacgtataacgccaaagccggcggggtatatacgaattcattggacgacgtggtgttattgtctagattaattggtctacatagcggcaagatgtttgtgtcaccttcacatgtcaaagaggcgtccaggtggtacttccccatgcacttggaattggttcagcgttcctccatggatagttccttattgtacggtagcgaccccaacttggtggacgaaatgctagagaaacttgcgaagattaagtgtgaggaggttaatgagtttgagaatccccttttcctggaatctctcgtagtgaaaaacgtactaagtaaagtcgtgccgcccgtgtaa

SEQ ID NO: 77519 - DNA, 411 bp, Saccharomyces pastorianus
atgttcctatttacgtttaccattcttgagagtgaaaaacctattatatggcccgttccggccgtggtactgggtgttatggccccaaaacgcgcatattccacgccttttgggccttggccgggccccgcggagtgcctgtggaattgcccttcggagctaaggcagttcagttcgtgttgtttacctctgccgaaactgaggccgcccaggcccactttcgcttctctttggcgtgttgtggcggcgatcgctgcattgtttcaagtgccctggagacgtaaaacaggcgtgggaaaagcaatcttcagcataggttgctgctgcctagcatatcagtggcgcagaacgcggtattttgcatacaagattatgacaggaacatgcttcatgacagacttggcgccctaa

SEQ ID NO: 77520 - DNA, 150 bp, Saccharomyces pastorianus
atgaagttatttattcttgattatgagaagaaaagaacaaagataggaaaagggatggcaagaagagaattgaaaatgatgaacaagaagcctgatttatatacgattattgtatcttatttttcaattttttcgttgatttttttttag

SEQ ID NO: 77521 - DNA, 279 bp, Saccharomyces pastorianus
atgcaattctctactgtcgcttccgttgctttcgtcgctttggctaactttgttgccgctgaatccgctgccgccatttctcaaatcactgacggtcaaatccaagctactaccactgctaccaccgaagctaccaccactgctgccccatccagcaccgttgaaactgtttctccatccagcaccgaaactatctctcaacaaactgaaaacggtgctgctaaggccgctgtcggtatgggtgccggtgctctagctgctgctgctatgttgttataa

SEQ ID NO: 77522 - DNA, 837 bp, Saccharomyces pastorianus
atgtctgaaagaaaagctattaacaagtactatccaccggattacaacccactggaagctgaaaagctatccaggaaaatggctaaaaaactgaaaaccatgaataagagccacgcatcgattagattaatgaccccatttagtatgaggtgtttggaatgtaacgaatatattcccaaaagcagaaaattcaatggtaagaaagagctactgaaggagaagtacctggactccattaagatatatagactaaccatttcatgtccacgttgtgccaattccattgcatttagaacagaccccggtaattcagattatgtaatggaagtggggggcgtaagaaactatgtccctcagaaaccaaatgatgacctgaacgctaaaacagctgtcgaaagcatagacgagacactgcaacgcttagtgagagagaaggaaatggagcagaacgagaagatgggtataaaggagcaagcagatgacaaaatggatttgctggaaaaaagactagccaaaattcaacaagagcaagaggatgatgaggaacttgaaaatttaaggaaaaaaaaccttgaaatgagccagagagctgaaatgataaaccgcagcaaacacgcacaacaagaaaaagcagtaacgactgatgatctggacaacctcgtagatcaggtatttgacaatcacaggcagcgtaccaataaacctggcaataacaacgatgagaagaaaactccgttgtttaatcctacatccactaagggaaaaatacagaagaaaagctctgtgcgtacgaatccgttagggatagttataaaacgaggaaagtctctcaaatga

SEQ ID NO: 77523 - DNA, 942 bp, Saccharomyces pastorianus
atggctccgtatccatacaaagtgcagacgacagtacctgaacttcaatacgaaaactttgatggtgctaagttcgggtacatgttctggcctgttcaaaatggcaccaatgaggtcagaggtagagttttactgattcatgggtttggcgagtacacaaagattcaattccggcttatggaccacttatcactcaatggttacgagtcatttacgtttgatcaaaggggtgctggtgttacatcgccgggcagatcgaaaggtgtaactgatgagtaccatgtgtttaacgatcttgagcattttgtggagaagaacttgagtgaatgtaaggccaaaggcatacccttgttcatgtgggggcattcaatgggcggtggtatctgcctaaactatgcctgccaaggtaagcacaaaaacgaaataagcggatatatcgggtcaggcccattaataattttacatccgcatacaatgtataacaagccgacccaaattattgctccattattggcgaaatttttgccaagggtaaggatcgacactggtttagatcttaaaggaatcacatctgataaagcctatcgtgctttcctcggaagcgatcctatgtctgttccactatatgggtcgtttaggcaaatacacgactttatgcaacgtggtgccaagctctacaagaatgaaaacaattatattcagaagaacttcgctaaagacaaacccgttattattatgcatggacaagacgacacaatcaacgatcctaagggctctgaaaagttcattcaggactgtccttctgctgacaaagaattaaagctgtatccgggcgcaagacattcgattttctcactagagacaaatgaagtcttcaacacggtgttcaatgatatgaagcaatggttggacaaacacaccacgaccgaagctaaaccataa

SEQ ID NO: 77524 - DNA, 1011 bp, Saccharomyces pastorianus
atgaggatggaaaaaacaacagacaaaccactttccgcaggagatatgaacgatgaatattctcggggtccaatcgacgatatagactgtttgaactttttcgaaagggctgttcaggacccatgttgtgaggcctgtgacacagaagatgcagatgaagaactgagagcaaagcttagtagctttaattttcagcctgattcatctccgtgtaatgctaaatgtcaacagacactgaatccactgtgtaaaatagatgaagcactcccagcggagtcagaattagctccatcgagaaacggctcagtatctgaggcaaattctgatacaaattccatagcttctactgtccatgaccctgtcgactccaaatatggaggcatgcctagcttgagaaaggccaaaacaacgtcgtactttacttcatcttcatcgaacaataccacaatgaggaacccgctaaaaaaatgtaataccaatataaatggccttttagtgagctcaagctcctccagacagtctataccagagctctttagcggtgcgtgtactaaaaagaaaaacaacgtattactgaaaagtgaaacacccaattcagaattctctagtaactcacttcaacattgcaactcaaggtcgttttctctacccaggtcaagatcaaggtcttctgccattgccataccaacacatttgtatggcttggaaaagtacgtttcacctgggttggatactttgactgctgacccagaagaaagtattgaaaggttttcaaataatcggccccgtgaaatatcatcgtgttgtccgaacgatacaggggacacctcctcatcattatcacattcgaacacttcctcatcactaaatttccctttaggtacaaatacaaatcaattccaccaaccaaggcagccagtacaacagcaacagtcttcgaaaccaaactttggtgctgggaggaaaaaatctttcattgagatgtcactagcaagttcctttgcaggctaa

SEQ ID NO: 77525 - DNA, 3315 bp, Saccharomyces pastorianus
atgagctccaacaatgaaccggcccaaagtcgaacatcatatttcaaattgaatgaatttttgtccaacgttaagcattacaagaatacctttaagggtgagattcagtggtgtaataacctgtccttaaacgactggaagacacactatctgcaaattaccagtacaggtgcactaacccactcaatcgatgagttaacagcagactctactaatattcagccaattatcaaacatctacagcaatgtagaatcgagattattaaggataagcattcctcttttaaggatattaatgcaaattgtaattttataatccaagtaaacacctcaggtaaagataataaagtttacctgcgagttaaaagttggagtgatttcaagaaattgctaacatgtctgatctggtggagctcaatgaagacaaatggtatatttaataagtttcaagtatcgcgacctctagaatttaaaagcaaaaaaatggcgaaaccagaaagtttgctggtttacaaattgaatgtttttgggcccatcgttaagaacatcgtccttccgccagcaacaaatattttagaaagccctgatataattaataatgatgacaacagcgtaggttggttttccgctatgggggtgcttaaatcaaacggcatgctagatcttcttttacagagtgacggctctctgatttactcattgaatattagccagcttttaagatcagagataagaattctggattcatctgttttacaaagtgaaaacagtttgtttttaggtgaattgccattactaaggagccagttgggcctcgaaaagtttcgcatagaaaatattgccagtgctgccaccaactctagtgatatttctcaagaaattattgtagagtttcccttaagaatagacctggaggattgttttatagcgttacaatcgttcgctaggtcggaatacttatctattactggctcagataaatcaaatgatatgaagatatcgaatagctttaaaatttccatactggaagctaattttcagtcaatcaatttaaatgacaagaataatacgccatggtcaatattcacagacataacggcctggggccatacatgggctagaacatccatggtttcaaactcctctaatccattttggagagaagagtttcagttcaatgaacttttaagacttactaattcttatctggaaatcaagcagttattccacgatctcaataataaaaaacggttacgattgataggcaaaataaaaatcacacaagaaataataaatgatacaagatataataaggaaacaagactacccatcatggacgttgataacaaaaattttcaaataggaacaatctgtattaaaatttcttcaaatttgaacttcattttaccgtcaaccaatttcgttaaattggaaaaacttttgatgaacgcaaacttgtccatggtttccaatctaatttacaaatcttcttcatcaatggagaatgataacaaattgacgcaaacatccataatttttctcgatatattccaatctttgtcaagaatagaagaatggttccacgtccttatagacaaagaattggctaaaattgatggaacggtttcaagaataaaccagaaaaatttagactcaaagcatgttttcaacagtttattccgtggtaactctatcttaacaaagtcgattgaacagtactttttcagagtgggtaatgaatatttgagtaaagcgcttagtgcaatactaaaagagatcattgagtcaaacaaatcatgtgaattggatcctgctagagtaaaagaaaaagatgaagtaaaaaagaggaaaataattgccgacaactacaaacgattgtattcttgggttacgaagatttggaaaaggctgtatgcaacgagtaatgacctgccgattgaaataagaaatgttttaaaaatctttaggcaaaaactagagataatttgtatcgatgacactttgcaaataattttgaatggtatatcaggattattgtttttaaggtttttttgtccagtcatattaaaccctaagctattcaaatatgtttctcaaaatttaaacgaaacagcaagaaggaatcttaccctaataagtaaagttttacttaatctgtccactttgacgcagtttgcaaacaaagagccctggctaatgaagatgaataactttatcgataaaagacacaatgacttattagattacattgataaaatgacgcaaaagaaactagattttaattcaaagatattgaacctaagttctactatttcgagacccaaattggccattgaacaaacgatgttggatgatttgcctcagattccttatctgcttgataagaatttgagagaaactgagtttgttaacttgattgttaatttcagtcaggaagatatgaccaagatggaaaaatacaatcacatggataatggtgggaagggagaattaatcgaagaggagggcctgttaagcggtagcagcctaaatttgtctgtggataaaaaagatttggattcaccaattgaggttaagccagaaattggagagttagaatttgagaaaataactgaaaacaacacggagatcttcggagatgatttaatgaacctactgaaaagcgatgatgtaggttccagaagcagagatttggataatggcgctaattcaggcatcaaatttaattctataatcccgaaagcagaagaggaaaagcatgcaatgaaagaattggagcaagagtcatgtttactctataataggattaatcatattagaaaacggttgtcaggttatgaatgtgcttccagcactttgtttgaagacaaaaaatactccatttcactctcacataaaattttttatgaagaaataaaggagggaaaagaaattgttcttaaactactaaataaaccaacaaatgaaaactcttccgcaagattgcagaaattcttcacaaaaggtgtctctagtaaatccaataacacagttggagatagttactgtaaatttttgactattgatgtaagtgatgagaatcccaagagtagcaacaaaacatcggtacatggaacatcatcggaaaatggagccaaggatgattacttgacgcttccaaactcgcaaggtaaaggtaacttggggaatagattttccccgacaaagttatctaggataatgaggaaacctcctaacgcagatgtttctaaagaacaaaattcccgtaagctgacaagatggttcaaaaagaaaaaagaaacagggggatcttaa

SEQ ID NO: 77526 - DNA, 933 bp, Saccharomyces pastorianus
atgacaaccagcatactcgatacttatcctcaaatatgctcccccaatgctttgccaggtactcccggcaatttgactaaggagcaagaggaagcgcttttgcaatttaggtcaatcttgttagaaaagaattacaaagaaaggctggatgattctacgctattgcgatttctacgggcaaggaaatttgatatcaatgctagcgttgagatgtttgtagaaactgaacgatggagggaagaatacggtgccaacactattatcgaggattatgaaaacaacaaggaagccgaagacaaagaaagaatcaaattggccaaaatgtaccctcagtattaccatcacgttgataaggatgggagaccattgtacttcgaagaactaggaggaattaacttaaagaaaatgtacaagatcaccaccgaaaaacagatgctaagaaacttagtcaaggagtacgaattatttgccaggtaccgggtcccagcgtgttcgagaagagctggctaccttattgaaacttcgtgcactgtgctggacttgaagggtatctcactttctaatgcttatcatgtgctttcctatattaaagatgttgcagatatcagtcaaaattattatcctgaaagaatgggtaagttttatattatacacagtccatttggtttctcgacgatgttcaagatggttaaacccttcttggatccagtaaccgtgtcaaaaatctttattcttggctcttcttataaaaaggaattattaaaacaaattccaatcgagaacttgcctgttaaatatggtggtacatctgtcttgcacaaccctaatgataagttctactattccgatattggtccctggagagaccctagatacatcggaccagaaggtgaaattcccaacatttttggtaaatttactgttaccagctaa

SEQ ID NO: 77527 - DNA, 1332 bp, Saccharomyces pastorianus
atgagtatggataacaatgatgaccatgaatctaaattgtcaatcttgatggacatgtttccagctatttccaaatccaaattacaagtacatttacttgaaaacaataatgatttggatttaacgataggcttgctgttaaaagaaaacgacgataagtctacagttgataatgaattacatcaactgtacgacatgtttcctcagcttgattgcagcgttataaaagatcagtttgtaataaatgagaagtccgtagaatcgactatttctgatcttctgaattatgaaaccctgcaaaaacttaaagacaatcaagcaaattctcctgatagcgtaaaaaggaacgaaaagaaaaataattgggaatcaacaaacgatcacatagagagtataataaagtttaccgacgctcccaaaaatattgcgcaggaatacttagccgaaaatggttttgatacagtaaaggcgatcatcaaaatcattttggattattacgacaaaagggattctaaaaaagatgtggatactttcaaagtaaaacggagtcctaatacgactgtgagaggtggtcgagttcaatcatcgacggggcttgcccacgttttgaaaaagggtaaagaatccgcaaatgttgctcaagagagtctcaaaaggccaaggagttataagcactccttggatagtccgcagatggttgagttaaatgaattagttgcagataatcgcgatctcaaagccataaaccatgaatttttgcaaaaatgcctgcaattttatgatggagatgttgtaaaggtgttgaacatatcgtccttattgatcgaagatgacaagaatattacgaaaacttggaactttgacgaaggttttaccttgacatccagagataattgtaagcaacatttacccaaattttcaacaccgcagatttcccgcagaaatgaggtaggaaatacttataaattgccccttcatgacaaagaaacccccgagggagctgtgccggttataaataacctgtttcaaacatacagattggatttccatggttttcttcccagtgaagcggtttcaacactgaaacttgcattaaataagtggtggtccaaagaggtagcagaacgagagttgaactcccacaacataaactcatatggctcaaaagtacagtttgtaagcccgttaatcgtggtaactggtagaggtatccacagcatcggcgggatctcaaaggttcgactgcaggttaaaagttttcttgaaaaaaatcactacatattttgggaagaatcttcctacttcagaattgagggtaagaagaagaaataa

SEQ ID NO: 77528 - DNA, 1650 bp, Saccharomyces pastorianus
atggattatatgaaattggggcttaagtcccgtaaaactggtattgatgttaagcaagatatacccaaagatgaatacagcatggaaaatattgatgattttttcaaagatgatgaaactagtcttatcagtatgagaaggaaaagcagaagaaaatcatcgcttttcttaccatcaacgttaaatggcgatactaagaacgtattaccgccatttctacagtcatataaatctcaagatgatgaagttgtccaaagcccatctgggaaaggcgatggatcaagacgatcatctttgttaagccatcaatcaaacttcctgagtccagccaatgatttcgagcctattgaggaagaaccagaacaagaagaaaatgatatcagatgcaatgattttgccacaccaatcacacagaaattgagtaaacctacatataaaagaaagtactccactcggtatagccttgacacttcagaaagcccttctgtgaggttgacacctgatagaatcactaataagaatgtttattcagatgtacctgatttggttgctgatgaggatgacgatgatagagtaaacacttctttaaacacatctgataacgcattattagaagacgaattagaagatgacgggtttatacctgaaagtgaagaggacggtgattacattgaaagtgactcatctttggattcaggctcggattcagccagtgattcagatggagataacacctatcaagaagtagaagaggaggctgaagtgaacacaaatgacaatgaagatgattatataagacgacaagcgagtgatgtggttcgtacagattcaataattgatagaaacgggcttcggaaatctacaagagtaaaggtggcgcctctgcagtattggaggaacgaaaaaatagtatataagaggaagtccaataaacccgttcttgacatagacaaaattgtcacatatgatgaatctgaagacgaagaggagatattggcagcacaaagaaggaagaaacaaaaaaaaaaacctacaccaaccagaccttacaactacgtacctacggggagaccaagaggaagaccaaagaaggatccaaatgcaaaggaaaatttgattccagaagatcccaacgaggatattatagaaaggatagaatctggaggcatagaaaatggcgagtggctgaaacatggaatactggaagctaatgtgaaaattagcgacactaaggaggaaactaaggatgaaattattgcattcgcgcccaatttgtcgcaaactgaacaagtaaaagacacgaaggacgagaattttgcccttgagataatgttcgataagcataaagaatactttgctagcggcatattaaaactaccagctatttctggacaaaagaaattaagcaactcatttaggacatatattacgttccacgtgatacagggaatagtcgaagtaactgtatgtaagaacaagttcttgagcgttaaaggttccactttccaaataccggcattcaacgagtacgcgattgccaatagagggaatgatgaagccaaaatgttcttcgtccaagtgaccgtttcagaagacgctaacgatgacaacgacaaagaattggacagtacgtttgacacttttgggtaa

SEQ ID NO: 77529 - DNA, 1716 bp, Saccharomyces pastorianus
atgacggatgaaaaagtgaactcagatcagaatatgaacggtaagcagggagttaacttaatttcatccttgcctacaacacaagtgccggtttcaattttgaccaacaaggagagaagaaaaagtattcacgatgaatcaaacttcgaaagatctgatagtcatgaagatcaatcaaaatccaactctaataggaggaatatttacaaaaacgattatagcacaaatttgagggatttctcttttgccaatctgaagcaaaatagtgaaaggaacaaagatggccatgaaatacagatcaacaccagtatgccagctaatacaaatggccagcaaaaaagtttttcaccttcattaccttctgctgtttcatttacggtgcccgaggtggaaaggttgccgtatcatagatattcgatatccaataaacctggaaagcagcagcagcagcaggaacaactgcagcaaaatcaacaacaagaagagcagcaaaaggcacaactgcaggagcaaaatcaacgagcaaaacagcaagaagaggtgaagcaaattcaggagcaagtgcaaaaaaagcaaactgaaagacagcaactgatagacgaaaaggagaggatagcgaatgcaatatttaaggagaacactactaatgatggtactgatatcaggaaacattcggtatcgagtggtacgagcaatagcgaagatgaagtagattcaccttcgatggaaaaaaattccatcgttcatatgccaggtgattttatctacttcaatcccaagtcaaacgcttctaaacctatcactgcaaaagcggcaccattatcggctaataactccacacataaaaacaaggaagttatcactgcacccacagggcctcgtgtacccttcacagagttctttcagaaggaagacgacaagaaattccacattctcattggtgcgacgggctcagttgccacaataaaagtacctctaattattgataaactattcaagatatatgggcctgagaaaatctctattcagttgattgtcacaaaacccgctgagcattttttgaaagggctcaaaatgtcaacacatgttaaaatttggagggaggaagacgcttgggtattcgacgctgtgaataagaatgatactagcttgagtctgaacttaatattgcaccatgaattaagaaaatgggctgatattttcctgattgcgcctttgtcagctaacacacttgctaaactggccaatggtatatgtaacaatttgctaacttctgtgatgagagattggtcaccactgaccccagtgttgattgcgcctgcaatgaatacattcatgtatatcaatcctatgacaaagaaacacctgacgagtttagtgcaagactatccgttcatccaagttttgaaaccggtggaaaaggtattaatatgcggagatattggtatgggtggtatgagagaatggacagatattgtagagatcgttaggaggagaatcaatgaaatacggaaagctagggacgaggaaactggtgataaagagcaagaacaagaagagcaagagggtgctgacaatgaggacgacgatgatgaagatgacgaagaggacgaggaggacgaggaggaggaagaagctctaaatgaaacagcatccgatgagagcaatgacgaggaagacgaagacgatgaggaagacgtgaaaaccgaagtttaa

SEQ ID NO: 77530 - DNA, 675 bp, Saccharomyces pastorianus
atgatgtcttcagaccaacaggggaaatgccccgtagatgaggaaaccaaaaagctatggctacgagaacatggcaacgaagcgcatcctggtgctactgcctcaggcagtcaactagagtgctctgcaaacccacaagataacgataaaacgcctgaatatcacaccaaggtggatctctctcagtccagagaggtttcgaccataccaaggacgaattctgacagaaactggatatacccgtcggagaaacaattttacgaggcaatgatgaaaaaaaattgggatccgaactcagatgacatgaaggtggttgtgcctttacataactccatcaatgagcgggtttggaactacattaaaagctgggaagacaagcagggtggtgaagcgtgtggcggtatcaaattaacgaattttaaaggtgattccaaaaaactgacaccaagggcctggttcaggtcccgtatcttgcacctggccaaaccttttgatagacatgattggcagatagatagatgcggtaaaaccgtcgactacgtaatcgatttctattccaccgatctgaacgatgcaaactcgcagcaacaaccacttatttatctcgatgttagaccaaaattaaacagttttgagggctttagattacggttctggaaatctttaggcttttga

SEQ ID NO: 77531 - DNA, 384 bp, Saccharomyces pastorianus
atgtcactacaaagcaacagtgtaaaaccaacagaaattcctctctcagagatcagacgccccctagcgcctgtgttggatcctcaaaagatcgacgcaatggtggctacaatgaagggcattcccaccgctagcaagacatgctctctagaacaggctgaggcggctgcctcagccggggaactgccgcccgtggacgtgctgggcgtgcgagtcaagggacagacgctatattatgccttcggcggctgccaccgtctacaggcatacgaccgccgggctcgcgaaacgcagaacgccgccttccccgtgcgctgcagggtgctaccggccactccccgccaaatccgcatgtacctgggcagcagtctcgacatcgaataa

SEQ ID NO: 77532 - DNA, 1005 bp, Saccharomyces pastorianus
atgttgtcaagagtagctaaacgtgcgttttcctctacagttgccaacccttataaagtgactgtcttgggtgcaggcggtggtattggacaaccattgtctttgcttctaaagcttaaccataaagtcacggacttaagactgtacgacctaaagggcgcaaaaggtgttgccaccgatttgtctcatattccaacaaactccgtggtcaaggggtttactccagaagagccagacggattgaacaacgctttaaaggacacagacatggttttaattcctgctggtgtgcccagaaagcctggtatgacacgtgatgacttgttcgctatcaacgcaagcattgttcgcgatttggcagcagcaaccgccgaatccgctcccaatgctgccattctggtcatttccaacccagtcaattctaccgttccaattgtcgcccaagtcttgaaaaacaagggtgtttacaacccaaagaaattgttcggtgtgactaccttggactctattagagccgccagattcatctcagaagtcgagaacaccgatccaactcaggaaagggttaacgtcatcggtggacattctggtattaccatcatcccattgatttcgcaaacaaaccataagttgatgtctgatgacaagagacacgaattgattcacagaatacagtttggtggtgacgaagtcgtcaaagcaaagaacggtgctggctctgctacgttgtcaatggcccatgctggtgctaaattcgctaatgctgttttgtccggtttcaaaggcgaaagagacgtcatcgagccttccttcgtggactctcccttgttcaaatccgaaggcatcgaattctttgcatctccggtcactttgggcccagatggtattgaaaagatccatccaataggtgagttatcttcagaagaagaagaaatgctacaaaaatgtaaagaaaccttgaagaagaatatcgaaaagggtgtcaactttgttgctagtaaatag

SEQ ID NO: 77533 - DNA, 351 bp, Saccharomyces pastorianus
atgatcgaaactgccatttatggtaagacagtggatgaccaatctcgatgtgtccactggcatcttccaaaggatgtaattgccatcaggtttaaatgctgtgataagtactatgcgtgctttgaatgccaccaagagttaagttctcacccgctagaaaaatatgatctccttgacgatgcaaataaacacttgattatttgcggagtttgccgtcatgaaatgacgtttgcagagtatcacgactacaattcaaaccttatttgtcccaattgcagatccccctttaatccaggctgtaaattgcactaccatttgtatttccagaaccctccccccgctatctgttga

SEQ ID NO: 77534 - DNA, 2208 bp, Saccharomyces pastorianus
atggcagcaaatagcaatagtagagttgcatcaaaccatacctctaaaaaacaaaaggttaggaggaatatacatccattcacgaataatactcggattaaaagagctagtaaaatcgtaaagtttaatgattcaggcgagggcgaccatgtttcagaccaacgttcgaacaaggaaaatgtagttacttataaatctttgaaaagtcgggcaagcgatttactcaaaatgagagaaacacttcccgtttaccaacataagcgagaaataatgtcatatattgaaagcaatcccgttaccgtccttattggtgaaacaggttctggtaaatcaacacaaattccgcaattcgtattagaaaaattatatgatacgaagaagcatgggtcgattgctgtaactcaaccccgtcgtgttgcggccatcaatttggctacacgtgttgctcaagaacatggttgcaaactgggtgaacaagtaggttattctgtcagatttgacaatacgactactacaagaacaagacttaagtatctgactgacggtatgttacttagagaacttatgatgaataatgaccttagagaatacagcgtcatcgttatcgatgaagcgcatgaaagaactgtgcttacagatttgatattggggttcttgaaatccttgatacaagggccaagacctgatttgagaataattgttatgtctgcaacattgcaagccgaaaaatttagtgagttcttcaataatgccccaatcttatttgtagaaggaagaaaatttgatgtcaaacaatactacttgaaggcgccaacagatgatatagtagacgctgtcatcaggtgttgtatacaaataaaccaaggtgaagaattgggagatatcttatgttttttaccgggccaggaagagattgacaaagcagtgactataatggagaaaattgcaaagtatgtttcagatgaggccccagtaccattaatagttccttatcctttatatgcagctcttcccccggtccaacagtccttggtcttcgctccgataaagggtttcaagagaaaagtcgtctttagtaccaatattgcagaaacatctgttaccatatccggtgttaaattcgtcgttgattctggtcttcgaaaagtcaaagtttggagacatcagctgggattagccactctacttaccgtacccatttctcaggcaagtgcgatgcagagaagtggtcgtgctggtagagaaagtgaaggaaagagtttcagactttattgtgagtctgattatgtgaaattacctaaacaaagtgaacctgaaatagccagaagtgacgtcacatctcctgtgttaatgttgaagagatatggtgttgatgacctgctaaactggacctggtttgagaaccctggaaaggaagctatagtaatggggcttcaggaactttatgaattgggtgctcttgacactcgtggaaagataactaaacggggacaacaaatggctctgttaccgctacaaccgcatttaagtagtgtcttaattaaagccagtgaagtcggatgtttgagtcaggtcattgatatcgtctcttgccttagtgtggaaaatttactgttgaatccgtcaccagaagaaagagatgaggtgaacgagcgtcgtttgtccttatgcaacgctggtaaaaggtatggtgaccttatcatgctgaaagagctttttgatatctatttctacgaactagggaaaagtcaagatgcaagctctgaaagaaatgattggtgtaaaggattgtgtatttcgatacgtgggtttaaaaatgtaattcgtgtcagagaccagttaagagtttattgtaagcgtttgttttcttcaatcagtgaagaggatgaagaatccaaaaagattggtgaagatggcgagctaatttcgaaaattttaaagtgtttcttaactgggtttatcaagaatacagctatagggatgccagacaggtcttatagaactgtttccactggagagccgataagcattcatccatcatctatgctatttatgaataaaagctgccccggtataatgtacacggagtatgtctttactacgaagggatatgccagaaatgttagtaggattgaactttcatggttacaagaagttgtcactaatgcagccgctgtagcaaagcaaaaagtttctgattcaaaataa

SEQ ID NO: 77535 - DNA, 384 bp, Saccharomyces pastorianus
atgtcttgtttgctaattgtggcacgaacaacttctggaaaattatgttggtgttggaaccctttttctactacattgaagacgtcggcggagatgatgatgaagatgaagataatgtggacaatagcgagggcgaggaagaaagcttacttagcaggaatgtggaaggagatgataacgtggttgagcgtcattttaagcctgatccaagggtcattacactggaaaaaatatgtgaagttgctgcaagacagaaatggatataaggagaaatcaaaggaaaagaagcaagatccagcattttcttttgaaccctggaggatgctgatgcattctctatttatctggtatcaaattgtcgtacagatgatttatatatgttaa

SEQ ID NO: 77536 - DNA, 1353 bp, Saccharomyces pastorianus
atggctaaagatttattgcccaagcaagcggccaacgagccatcgttaaaggactgtacctgtaaaagatgtcttaaattgggtgcttcaaaagaaaaaaagattagaagaaagaagaaaggtgaggagaaaagagaaagacattatggaaatagacgaaagttaacattcaactttttgaagcatacgaacatggaaaatacaaattacgacgtgatcacttcggttggatatctgaatgaaaaatacggattgaaaaaatcacattacattgaaaaatttatcaaatgcatccatagaaaaataaatatcgatgttagcaaaattacggacgcctatgtaaactcgctaaacccgtgggttaaagtaaaactcttccttttattggtgacattgtctgaaaagggtggtccggaatactggttagataagacggatggtgaaaagaactcagaggcgtcttcaacagataatagtttggaaaattctactaaaggagcagacagcgctggatctactgctttgagagatgaaatggtcaaaagccataaaaaccttttcccaactcttacagagcaaatcatacagcataacatcaaccaagattttacggaatcgacttacgacgaggattatgtattttcgtcaatttgggcaaacttcatggaaggactgatcaatcactatttggaaaaagtcattgtaccttactcggaaatgaaagtctgtcagcaattatacaagcctatgatgaaaattatctccctctataacgaatacaatgagcttatggtcaaaagcgaaaagaacggattcttgccttctctacaagactccgaaaatgtccaaggtgataaaggcgaaaaagagagcaaggatgatgccgttagccaagaaagactggaaagggcgcaaaagctgttatggcaagctcgagaagatattccaaaaacaattagcaaagaattaacgttgttatcagaaatgtattctacattatctgctgatgagcaagattacgaattagatgaatttgtttgttgcgcagaggagtacattgaattggaatacctacctgcccttgtagatgtcttgtttgctaattgtggcacgaacaacttctggaaaattatgttggtgttggaaccctttttctactacattgaagacgtcggcggagatgatgatgaagatgaagataatgtggacaatagcgagggcgaggaagaaagcttacttagcaggaatgtggaaggagatgataacgtggttgagcgtcattttaagcctgatccaagggtcattacactggaaaaaatatgtgaagttgctgcaagacagaaatggatataa

SEQ ID NO: 77537 - DNA, 1584 bp, Saccharomyces pastorianus
atggctgatgaaaagagactggaggatttgagatccaaaataatggagtctataggaaaatcagaaaaggatgttgtgccgattgagaacaaaagattcaacacggataatgcagttatagatacacattttaagaggcaaaaaagtgacggtgagcttccgaaagcgccaaaaagtagaaacgtttcacattctaataacagaggaccatcgtcaataattactatgagcacgaatcgaacgacttatgaacaaacaagggcaggtcctcatcgtcaaagttatcgggatgcatcgggaagatcatataacagggagaatcggtatagtagtcacaatactggaccccaatggaacaacaatccctataataggcaacgggatgaaagaagaggaagaaatgaaaggttcgatagaaggggaagaaatggaaacggaaactacgatcgtttcaattaccaaaggaagaacgaaggttctaaattcaatggtgaccgtgataaaaggcagttgcaaactaacaaatatgacatgaactataattcccaaaatgtaatgtacccgggttcatcattcgattctccggcttactacaacatggcctcatccaaggcaaattcaaggcttgtaatttcgggcttgtctcatagcagcgacaccagcattgtagcaagattgaaagatttgctggagaattttatttcaggtctccagaaaactgagagtaatgcggaggactttaaaatttccaacttttatattggtgaaggaaggccggaccatattattgttgagtttagttctcagatctgtagcactatggttttggcctgtcgatcattctttaatgcgaagcttggtactttcgacttaaaatggagaagacctaatgattatgttcaacaacttgatcatctggtcgatttttgcaggggtacggtaattgcattggaaaatttggaaaatataggcgagggtgaagattatagaatgaaagagcttttttcgtcattgaatgtaacaaacggtaccgctaagccacttttttacaaatgttcgaccaatacaaacaacactggcaaagaatccgaattcactaaatgcattctattatcgtttgaagtcgtcactcaggatattcttgataaattaaaaccatacaaatggttcaagccaaatgatggaaagatatcacaagttacttcatggattacatttcaaagcctgccaaatctggttacccaatctgttcgtgttgaatcgagagttttgttgctcttaaattgtcttgatccattggatttgaaagatgaaacctttatcacagaaattaaagaaacattaaagtatagtatcacgggagcagatacgattaaaatatgccaacccggcgtcgattacagacttaattttgaaaacttggcttccggagccggtaatatttatatcaagttcaagaccttggaggcagcaaaacacgcaatggaagaattgccgggtacgcaattcaacgatcgcactgttctgtgtacttatatagatgaggacgactttgacatgatggaagcaacccaactttcctaa

SEQ ID NO: 77538 - DNA, 2646 bp, Saccharomyces pastorianus
atgcgaaacgttttaaggcttttatttttaacagcttttgttgctatagggtctttagcagccgttttaggtgttgattacggtcagcaaaatatcaaggccattgtggtttctccgcaagccccattagaacttgtgctcacaccagaggcaaaacggaaggagatatctggtctttcgataaaaagattaccaggttatggaaaggatgatccgaatgggattgaaagaatctacggttccgctgttggcagtttagcaacaaggtttccccaaaacacattgttgcatttgaaaccgctacttgggaaatcactagaagatgaaaccactgtaactttgtattcaaaacaacaccccggtttagaaatggtatcaacaaatagaagtaccatagcctttttagttgataatgtggaatatccattggaagagttagtggcaatgaatgtccaagagattgccaatagagccaattcactgttgaaggatagagatgcaagaactgaggactttgtaaacaagatgagttttacaattcctgacttttttgaccaacatcaaaggaaagcacttttagatgccagttcaataaccacaggaatcgaagagacatatctggttagtgaagggatgtctgttgcagttaactttgtattaaagcagcgccaatttccaccaggtgaacagcagcattatatcgtatatgacatggggagcggttctattaaggcctcaatgttctctatattgcagccggaggacactactcagcccgttacaatagaatttgaaggatatgggtataatccacatctaggtggtgcaaagtttacaatggatattggcagtttgatagagaataagtttttggaaacacacccagccataagaactgatgaattgcacgctaatcccaaggccttagcaaaaatcaaccaagcagcagagaaggcaaagttaattttaagcgccaattctgaggcaagtattaacatagaatcactgatcaacgatattgatttccgtacttctataactagacaggaattcgaagaatttattgcagactcgttattggacattgtcaaacccataaatgacgctgttacaaaacaattcggtggctatggaacaaatttacctgagataaatggggtcattttggcgggaggctcttcccgaattcccattgtgcaggatcaattaatcaaactcgtatccgaagaaaaagtgttgagaaatgtcaatgctgatgaatcagctgtgaatggtgttgttatgagagggatcaagttatctaattcgtttaagaccaagccgttaaatgttgttgaccgttctgtaaatacttattcattcaaattatcaaacgaatctgaactgtatgatgtgttcacgcgcggaagtgcttatccaaacaaaacatctattttgacaaacacgactgattcgattcctaataattttaccattgacttatttgagaatggtaaattgttcgaaactatcacagttaattcaggagctataaagaattcatattcctctgataagtgctcgtcaggagttgcgtataacattactttcgacttgtccagtgatagattattctctattcaagaggttaactgcatttgtcagagcgaaaatgacataggtaactccaagcaaatcaagaacaaaggcagccgtttggcttttacttctgaggatgttgagatcaaaaggctttctccttcagaacgttcgcgtttgcatgagcatatcaagttgctcgataaacaggataaggaaagatttcaattccaagaaaatttaaacgttcttgaaagtaacttgtatgatgctagaaacctgctaatggatgatgaagttatgcaaaatggaccaaaatcccaagtagaagagttatcggagatggttaaagtatatttggattggctcgaagatgcatcctttaatactgaccctgaggatatagttagcagaattagagaaattggaatattaaaaaagaaaatagaactttacatggattctgcaaaggaacctttgaactctcaacaatttaaaggaatgcttgaagaaggccataagttacttcaggctatagaaacccataagaataccgttgaagaatttttgagtcaatttgaaaccgagtttgcggataccatagataatgttagagaagaatttaaaaaaattaagcaaccagcgtatgtgtcgaaggcgttatctacatgggaggaaaccttaacctcttttaaaaattccattagcgaaatagagaagttcctggcaaaaaacctatttggcgaagaccttcgtgaacatttatttgagatcaaattacaatttgatatgtatcgtacgaaactagaggaaaaactgcgtttaataaaaagcggtgatgaaagtcgcttaaatgaaataaagaagttacatttaagaaacttccgcctacaaaagagaaaggaggaaaagttgaaaagaaagcttgaacaggaaaaaagcagaaaaaacaatgaaacagaatcgacagtaatcaactcggctgacgataaaactactattgtcaatgacaagaccaccgagtcgaatccaagttctgaggaagacattttgcatgatgaattatag

SEQ ID NO: 77539 - DNA, 2301 bp, Saccharomyces pastorianus
atgcaactggaagccactcatcagaaagaaaaccacctatctcctttggctagcttcatttttccagacttcagggcattgttcaacatagggtttaatttatattctaatataaactacaaagaggtagatattaatggatttgaaatttacattgtcgaacaatgggctgcccagagaaaaatatcaactctaatcacttcatatacgggcaacttacaagacaccatatctgcagtagaggttgctcttcccgaagatcctgaggaatggccatgttgtttgaagaaataccacgaagaattgttgaagttttctagtccaaaaaagactgccaaaggaactttatttgttacaaacctttcttctttcaaatctacgctaaacttattgcatgttgagtgtggtaatctaaagaaaatctggaaaaacttcaaaaccaactacgacctaaagagattacattgtggtggtcgttcagctcagctgttaaaaaagacacctagtgcctcaatagcgaagtttgcacagttatataaatttccgaattcagctttttctcatgaaataacgtcggatttccaacaaccttctcttcagaatgacaacagctcaataagtagcatagaaaatattcctgttaatcattgccctgtggtagaactaactatcctcgtgcaaatatcacttagttattttgcgctgtttgaatacaagaaggagagagatggtctcttatgcaatggaacgaaacaatcccttgaaaaatggtgggaaatatatgggaaacgataccacggcattgataagccgaagaatgaaacgatccttggtccgactacggtggcatcactacttagtcttgtattgacttgttacttcaaattaatggtagaagattgcatgtcggcaaaagatccgtttgatgaagaagagttttattctggtctttatgcatttcaaaagaaatacggtctatccaaaaacaataaacagacctccttagacgaactaacaattgataaattatttgaagtatcttccaagacttcaaacaaagatattttcaagttcaaaaaagttgtgaagtcaactgttcaagacatgactggcaaaggaaactttatgcatctatccaatgagatcctaacaactgatttagataccctggtaaagaatatacacggtggatcccttggtaagctctggaaagggagaagtgcttcaagaaaggaaacatgcatggtttgggaaagaaaaacctttctaagtttcaagtttgaacgtggagatccatccttacaattggaaaataatgagctgttttatggtacgaatgtgccaagtgagcagttaacgacttccaataaggaggacagtgatacgcaacccacaaagagaaatagtatatatgatattgccaatggctccaaatcatcgctatctatctcatccatgttctgtaattatgatgaaacccgttacaaaagtaccaacaaccttaatagagcctataggggggagtattttaggcgcaattcgatcccattttgtaacgatggtatacacgatactaaaaaaatatctgctgatcttaataagatagatggattgtatcgttgcaattcatattctgaggtacaaaacgcaatagagctgtggagcttgccattcgattcatcagtcatcagattagcaagagacttacttaagatacaaagtctaatgtcagttcaacgtcagctcgatgaaatacgtgacggatatctgggaaaaaattcacaaagatcataccagaatgatctgatgtttagacaaagcttgaacaaattgcaggaaatgtgtgagagatgtaagagaggttctaacgaatttcactgggaatatggtaacatgcaaaacaaacagcaaattttggagagtgagaaaaaagatatgagatcactttcttcgaaactgaaatataacgttcgtatcctagatagacgtgtaagagatgttgaagccagcgtagatcattttgatcgcaagttagaggatgttagaaaaaagcttctggagcaaaataatagtaaagacatatctatggccttagaaagtccttgtgataaatttgaatttgacagttttatggactctatagtgcagtcccaacagactaaatatgaagggctgtgttttaaaattttagacaagaaaagtcttcgaaagttaaaaaaggaattctggaaatggagcacttggacattcgataccttcttatacaaaaataggcccaataaggagaaagatacactatga

SEQ ID NO: 77540 - DNA, 510 bp, Saccharomyces pastorianus
atgtacattcctaaacattttgagtccatggaactctcaaggtacaaatcaccaaaaaaacccccgctaggaacactattctcctctaaggctagcaggcaaggtttcttcggatggagaacttcttccaataaagatgaccccgattttggtatgtgcgcatcacatattccatttgtattcgtggagttcgataatggagagcataaacttattgcacatttagcacggaaaaataaacaggtggaaatgctggaaagagttcaaaaatgcttagtggtatttcagagcgtcgattcatacatttctccggcgtggtacccaatgaagaaaaggacccataagttcgtaccaacatgggattttgccgctgtgcacgtttacggtacaccaaggattatccgcgacgataaagactggcttattaatatgttatcaactgtgactgaccaagaagaagagaaaagacctgagggggaaaatgtacgaagtaaagtggagcgtttctga

SEQ ID NO: 77541 - DNA, 543 bp, Saccharomyces pastorianus
atgggctcatcaaccgggtttcatcatgccgatcatgttaactattcttcaaatctaaataaggaagaaattctagaacagcttctgctttcatacgaggggctatcagatggacaagtcaattgggtttgtaatttgtcaaacgcttcgtcattgatctggcatgcgtacaagtcattaggtgttgatatcaattgggctggattttacgttactcaagctagcgaagaaaacacactgatattgggcccatttcaaggaaaggtcgcttgccaaatgattcaattcggtaaaggtgtttgcggaactgcagcctctacaaaggaaacgcagattgttccagatgtcaacaagtatcccggtcatattgcgtgcgacggtgaaaccaagagcgaaattgttgttccaatcatatccaatgatggtaagacattgggtgtcatagacatagattgtttggattacgaaggattcgaccacgtagacaaagaattcctagaaaaacttgctaaattaattaataaatcatgtgtctttaaataa

SEQ ID NO: 77542 - DNA, 237 bp, Saccharomyces pastorianus
atgcaggcaaaccattccgtcagttacctttacgaatcaagtacttcaaagaggtcaaatgggctcttttctcaaacacaaaagcaagaaagttttcaaaaagctttaagtcaaactcaggaagaaatagaagatgaagacctgatggtagacctcaacacaggatctttaactcccgttaagttaaaatattggactcaaatgagtgctatgacggaaaaatttggtaaactgtga

SEQ ID NO: 77543 - DNA, 462 bp, Saccharomyces pastorianus
atgtctagccaaacagaaagaacttttattgcggtaaaaccagatggtgtccagaggggcttagtatctcaaattctgtctcgttttgaaaaaagaggttacaaactagttgctattaaattagttaaagcggatgataaattactagagcaacattacgcagagcatgttggtaaaccatttttcccaaagatggtatcctttatgaagtctggtcccattttggccacggtctgggagggaaaagatgtggttaagcagggaagaactattcttggtgctactaatcctttggccagtgcaccaggtaccattagaggtgatttcggtattgacctaggcagaaacgtctgtcacggcagtgattctgttgatagcgctgaacgtgaaatcaatttgtggtttaagaaggaagagttagttgattgggaatctaatcaagctaagtggatttatgaatga

SEQ ID NO: 77544 - DNA, 621 bp, Saccharomyces pastorianus
atgagtttatactttacgacattatttttattgctcaccgttgagatggtaatgctcttcatcttcgttttgcctttgccattccggatccgtaggggtatttttagcacctataaccaattgacagcgaagcagcaaataaaaactataatctttataacgggttgtcttgttggcctgttgtttattgattcatggaaaaggtctcaaatccgtgtttcattataccacaacgacaacagtggctcaatcgggtcatctgctgtaactccaatacaggcactagcatcaagagcgtacaatcaaagaaatatgtatatttccgggttcatattgtacttttctatctgcatcccaactgtcatgtctattgtcaagagactggtgaaataccaaggcttaatcaacgaacaggaaaagcaaaaattgaacaaaccttcctcaaacagcaagaaagactcaaatgaagctgattccaccaaacttcaagaggaactaaggaaaaagcaaatttctctggagggcctacaaaagcaagtcaaaaacttggagaaatattttgatgagaagaatcaacctggaaatgtagcagctgctgaagcttccaagaaaggaaactaa

SEQ ID NO: 77545 - DNA, 2910 bp, Saccharomyces pastorianus
atgagcactgataactcacaaaaggatgaaggtgttcctttgctttccccttactctagtagccctcaactaaggaaaaagaagcgcaatcaaaaaagaagaaaggacaagtttgttggtcacttgaagtcagactcacgtaggccaacgcaactgctgcatgataatctgcaacacaatcacggccagattactgatttcgaccagatcgattcctggggcatgctgcatgaatctgattctacaagtaatgatataataaaaagtgaggatccatcgctcaagggcgcgttcattgatcatagaccttcaatgagccaacctagggaggggcctcaaagtgtatcaagcacagttcaaccacagccaataatgaagttttcaacaccaagttacaagaaacccgcagggttaagaccctctgatcagaatagatcattagtatcggacttatccccttcagagcttgaatcatggctgaagagaaggaaatctgttcataagagttttgttgacgaaaactcccccaccgataggagacaatcgaacgcgaataatgatgtcgtgattgatgttgatgcgttaatgaaccatgttaacaacaatgcaagtactggggttaatgataacagcaagagaagaaagaaaaagaggggttctgatgatagtagcaacaaaaattccaaatccacatccagtgattcaaacgatgaagaggatgagtataactcaaggccatcttctagtctttcttcaaataactcttctttggatgacgtttgtttagtgcttgatgatgagggtagcgaagtgccaaaagcttggcctgattgtactgttttggaagaattttccaaggaagaaacagagagactaagaagtcaagctattcaagatgctgaagctttccacttccaatacgatgaagatgaggaagatggaacatcaaatgaagatggaattcttttttcaaagccaatcgtaactaatattgatgtccctgaattgggaaacagaagggtaaacgaaacagagaatttgaagaacggccgtttaaggccaaaaagaattgcgccatggcatttgattcaacgtccaatggtccttgggtccaattcaaccaaggactcaaaatcaagaattcaaagcggattacaagataacttactagtcggcagaaatattcaatatcctccgcatattatttctaataacccagaacatttcaggttcacttattttagggtggatttggactctactgttcattctccgacaatatctggtttactgcaacctggtcaaaaatttcaagatttatttgtcgcttctatatactcccaagataatagcgctggtcatatcaagacacatccaaactctccaacacctggtataaaagcagaaactgtatctcaactccagggattgacagctaaaaacccttccactttatcgtctatgtctgtggcaaatatagaggatgttcctccattctggttggatgtcagcaatcctactgaagaggagatgaaaatattaagtaaagctttcggaattcaccctttaactacagaagatatttttttgggagaagttcgtgagaaagtggaactatttagagattattacctgatttgttttagaagtttcgatattgtagcagaaaagcatgttcgtcggaggagaaaagaaaagcaagaatctgctaccttggatcatgaaagtatttcacgtcgtaaatcacaagcctatggtgctactatgtcaaatgaatcaaatgcaaataacaataacagtacaagcaatgcaagtaggagcaaatggcttccatcgattttacgtgcacgccgtcggtcatctgcaaatagaacaaccaatacatcatcatcaagctataaacgccgtgtcaaaagcgaaaagaaaaagagggaagagaacgaaaaattcaaaagaaaatcaggagacaggcacaaaccacgtgagggagaattagagccattgaatgtttacattattgttttcagaactggtgtattgacgtttcattttgctcccacaccacatcctattaatgttcgaagaagagcaagactactaaaggattaccttaatgttacctctgattggattgcgtatgccttaatcgatgacattacagacgcatttgcccctatgatagaacttatcgaagatgaagtttatgagattgaggacgccattttgaagatgcatcagtcagatgattctagtgatagcgattctagcgatagtgattccgattcgggcgctagcgatgaggatgcatttccgttcgatgtctattctaaaaagacgtcctactctagtgcaaaatctagtgtgagttcaagaagtatgagcacttctgaagcgtcattcaatgcaaatttgataggttggaagagaaaaggagatatgttgaggcggattggtgaatgccgtaaaagagtgatgagtatactaagattgctaggatccaaggctgatgtgataaaaggatttgccaaaaggtataatgagcaatgggaagcttcgccacaatctgaaatcgcaatgtatttgggtgatattcaagatcatattgtaaccatggtctcatcgctaaaccattatgaaaaactgttaagtagatcgcattcaaattatctggcacaaatcaacattgatatgacgaaggttaataatgacatgaacgacgttttgggaaaaattaccatactgggtactattgttctgccaatgaatgtgattacgggtctgtggggtatgaatgttatcgtgcccggacaatacagggattcgttgacatggtttataggcattgtgctttttatgtgtatgctagcatgttctgcatatatgtatactaagagaagattcgggttttaa

SEQ ID NO: 77546 - DNA, 504 bp, Saccharomyces pastorianus
atgcagggcgatatcagaaggaaaaaagatcttttacctcgttataaaacaggaagcaaatataattccagaagaaggggcggttatctgactacccctatgaaaaagattatagtatacattatactgttatgtggcgtttatttcgttataaaagttgcctattctgatctgaataaagaaaccgagatcaagctagaaagccattcttctgatgtttctgcaagtgcaagcgatcataccaatattgcagccggcggtgtagctgatgcgactaacaataagcaacgacaacaagctaaagtacctaaagaaaagttcaataatgaagtcgcaaagcaacaagaagtaaagaatttggagaacgatttgaaaccacaaattgattcagaaaagcaaaaacaaataaacaaggacaaaaaagaacaaaaacagcaactccagaaagagaaacaagatctcgccaaggaaaatttggctaacaatgaaatccttgataattaa

SEQ ID NO: 77547 - DNA, 1893 bp, Saccharomyces pastorianus
atgctagtcttcggacctaatagtagtttcgttcgtcacgcaaacaagaaacaagaagattcgtctataatgaacgagccaaacggattgatggacccggtattgagcacaaccaacgtttctgctacttcttctaatgacaattctgcgaacaatagcatatcttcgccggaatatatctttggtcaattctcaatggattctccgcatagaacggacgccactaatactccaattttaacagcgacaactaatacgactgctaataatagtttaatgaatttaaaggataccgccagtttagctaccaactggaagtggaaaaattccaataacgtacagttcgtgaatgacggtgagaaacaaagcagtaatgctaatggtaagaaaaatggtggtgataagatatatagttcagtagccacccctcaagctttaaatgacgaattgaaaaacttggagcaactagaaaaggtattttctccaatgaatcctatcaatgacagtcattttaatgaaaatataggattatcgccacaccaacatgcaacttctcccaagacaaaccttcttgaggcagaaccttcaatatattccaatttgtttctagatgctaggttaccaaacaacgccaacagtacaacaggattgaacgacaatgattataatctagacgataccaataatgataatactaatagcatgcaatcaatcttagaggattttgtatcttcagaagaagcattgaagttcatgccggacgctggtcgcgacgcaagaagatacagcgaggtggttacctcttcctttccttctatgacggattctagaaattcgatctctcattcgatagagttttggaatctcaatcacaaaaatagtagcaacagtaaacccactcaacaaattatccctgaaggtactgccactactgagaggcgtggatcaaccatttcacctactaccactataaacaactctaatccaaacttcaaattattagatcatgacgtttctcaagctctgagcggttatagtatggatttttctaaggactctggtataacaaagccaaaaagcatttcctcttctttaaatcgcatctcccatagcagtagcaccacaaggcaacagcgtgcctctttgcccttaattcatgatattgaatcttttgcaaatgattcggtgatgacaaatcctctgtctgattccgcatcatttctttcagaagaaaatgaagacgatgcttttggtgcgctaaattacaatagcttagatgcaaccacaatgtcggcattcgacaataacgtagaccccttcaacattctcaagtcatctccggctcaggatcaacagtttatcaaaccctctatgatgttgtcggataatgcctctgctgccgctaaattggcgacttctggtgttgataatatcacacctacaccagctttccaaagaagaagctatgatatctcgatgaactcttcgttcaaaatacttcctactagtcaagctcaccatgcagctcaacatcatcaacaacaacctactaaacaggcaacggtaagcccaaacacaagaagaagaaagtcctcaagtgttactttaagtccaactatttctcataacaacaacaatggtaaggttcctgtccaacctcggaaaaggaaatctattactaccattgaccccaacaactacgataaaaataaacctttcaagtgtaaagactgtgagaaggcattcagacgcagtgagcacttgaaaaggcatataagatccgttcattcaacggaacgcccttttgcttgtatgttctgtgagaaaaaattcagtagaagtgacaatttatcacaacatctaaaaactcacaaaaagcacggtgatttttga

SEQ ID NO: 77548 - DNA, 342 bp, Saccharomyces pastorianus
atgggagaacaaaacaaattgtactatgatgtcgagaaattggtgaattctttgcaggaaagttttgacctggattgcgcgcaaagtgtatcacttttcaccagtaaatcaaggagcaatgaggcttggttggaagagctagagaataaattcaagttaaaagatgatgttgaacttgatgatgtggaaaatttaagagccgaaattgacatgaagttaaatatgttggaggataaagtaagctactatgaaagactttacaaagaactcgaagagttccagaatgaaataaaaattaaaacagttgtgaataacagaagacaatcgcgaactccaaaatga

SEQ ID NO: 77549 - DNA, 1080 bp, Saccharomyces pastorianus
atgggtgttgaacaaatcttaaagagaaagaccggtgtcatcgttggtgaagatgtccacaacttattcacttacgctaaggaacacaagttcgctattccagctattaacgtcacctcttcttctactgccgtcgctgctttagaagctgctagagacagcaagtccccaatcattttgcaaacctctaacggtggtgctgcttacttcgctggtaagggtatctctaacgaaggtcaaaatgcttccatcaagggtgctattgccgctgcccactacatcagatccattgctccagcttacggtatcccagttgtcttacactctgaccactgtgccaagaagttgttgccatggttcgatggtatgttggaagctgatgaagcttacttcaaggaacacggtgaaccattattctcctcccacatgttggatttgtctgaagaaaccgatgaagaaaacatctctacttgtgtcaagtacttcaagagaatggccgctatggaccaatggttagaaatggaaatcggtattaccggtggtgaagaagatggtgttaacaacgaaaacgctgacaaggaagacttgtacaccaagccagaacaagtttacaacgtctacaaggctttgcacccaatctctccaaacttctccattgctgctgctttcggtaactgtcacggtttgtacgctggtgacatcgctttgagaccagaaatcttggctgaccaccaaaagtacaccagagaacaaattggttgcaaggaagaaaagccattgttcttggtcttccacggtggttccggttctactgtccaagaattccacactggtattgacaacggtgttgtcaaggtcaacttggacactgactgtcaatacgcttacttgactggtatcagagactacgtcttgaacaagaaggactacataatgtccccagtcggtaacccagaaggtccagaaaagccaaacaagaagttcttcgacccaagagtctgggttagagaaggtgaaaagaccatgggtgctaagatcaccaagtctttggaaactttccgtaccactaacactttataa

SEQ ID NO: 77550 - DNA, 1326 bp, Saccharomyces pastorianus
atgagtagcacgatattttaccgctttaagtctcaacgaaacacatcaagaattttatttgatggtaccggcctgacagtatttgatttgaaaagggaaattattcaagagaacaaactaggtgacggcacagatttccaattaaaaatttacaacccagatacagaagaggaatacgacgatgatgcctttgttatacctagatctactagtgtcatagtaaaaagatctccagcaattaaatcattctccgtacacagtcgacttaaagggaatgtgggagcagcagctcttgggaacgcaacaaggtatgttactggtaggccaagagtgttgcaaaagagacaacacactgctacaaccactgctaatgttagtggtacaacggaagaagaaagaattgctagtatgtttgccacacaagaaaatcaatgggaacaaacgcaagaagaaatgtctgcagccacacctgtttttttcaagtcacagacgaataagaattctgcacaagaaaacgaaggcccaccgccaccaggttatatgtgctatcgttgtgggggtagagaccactggattaaaaattgtccaactaacagcgatccaaattttgaaggaaaaagaatcagaagaaccacaggtattccaaagaagtttttaaaatccattgaaatagatcccgagacaatgacaccggaagagatggctcagcgaaagattatgattacggacgaagggaagttcgtggtacaagttgaagacaaacaatcatgggaagactaccaaaggaaaagagagaaccgtcaaattgatggtgatgaaaccatatggagaaaaggccatttcaaagatcttcctgacgatttaaaatgtcccttgacaggtggtcttttgaggcagccggtaaagacaagcaagtgctgtaacatagatttctcaaaagaggcgctggaaaatgcactggtagagagcgactttgtatgccccaattgcgaaacccgcgatatccttctcgattctttagtacccgaccaggacaaggaaaaggaggtcgaaacgtttttgaagaaacaagaggaactacacggaagctctaaagatggcaaccagccagaaactaagaaaatgaagttgatggatccaactggcaccgctggcttgaacaacaataccagccttccaacttctgtaaataacggcggtacgccagtgccaccagtaccgttacctttcggtatacctcctttccccatgtttccaatgcccttcatgcctccaacggctactatcacaaatcctcatcaagctgacgcaagccctaagaaatga

SEQ ID NO: 77551 - DNA, 369 bp, Saccharomyces pastorianus
atggcagtacccgggtattacgaattatatcgtagaagtactatagggaatagtttggtggatgctcttgatactttaattagtgatgggagaatagaagcgtcgttagctatgcgtgttttagagacatttgacaaagtggtggctgagactttaaaagacaatacccaatctaaattgactgtgaaaggaaacctggacacatatggattttgcgatgatgtttggacttttatcgtaaaaaattgtcaggttactgttgaggacagccaccgcgacgcctcccagaacgggtctggagatagccaaagtgtaatttcggtggataagttgaggattgtggcatgtaactcaaaaaagagcgagtaa

SEQ ID NO: 77552 - DNA, 3114 bp, Saccharomyces pastorianus
atggcatgcctctcaagaattgatgcaaatttgctccaatattatgaaaaacctgaacccaataatacggttgatttatacgtcagtaataacagtaataataacgggctgaaagaaggagataagtccatctctacaccagttcctcagccttacggaagtgaatattccaattgtttgttattgagtaactctgagtatatctgttaccatttttcctcaagatcaacattgttgacattttatcctttgagtgacgcataccatgggaagacaattaatatacacttaccaaatgcttctatgaatcagagatacactttaacgatacaagaagtggaacagcaattactggttaatgttatcttaaaagatggttcgtttttaacgttacaactacccctaagtttcctattttcatcggccaacactctcaatggagagtggtttcatctccaaaatccctacgactttacagttagagttcctcatttccttttctatgtatcaccccagttctcagttgtttttttggaagatggcggtttgtcgggtttaaaaaaagttgacggcgtacattacgagcctttactattcaatgataattcatacttgaaaagcctaacgcgatttttttctaggagttctaaatcggattacgatagtgtgattagttgtaaattattccatgaaagatacttaattgtgttgactcagaattgccacttgaaaatttgggatttaacttcatttactttaatacaagattatgatatggtttcacagtcagattcagacccaagccattttagaaaagtggaagctgtaggggaatacctttccttgtataacaatactctagttacattgttgcctttggaaaatgggctttttcaaatgggcaccttgttggttgattcaagcggtattttgacttatacttttcaaaataacatccccactaatctttcagcttctgctatttggtcaattgtagatttagttctaacgagaccattggagttgaatgtcgaggctagttatttaaatttgatcgttttatggaaaagtggcactgctagcaagttacagatactaaacgtaaatgatgaaagtttcaaaaactatgaatggatagaatcagttaacaaatccttagtagatttgcaatccgaacatgatttggatatcgttacaaagactggagatgttgagaggggtttctgtaatttgaaatcaagatatggtacccaaatttttgaacgtgcacagcaaatattgagtgaaaataagattattatggctcataacgaagatgaagaatatttggctaatttagaaacaatattgagagacgtaaaaaccgcattcaacgaggcttcttctataacactttatggcgatgaaattattctcgtcaattgtttccaaccgtataatcattccctttacaagctgaatactactgtggagaattggttttataatatgcactctgaaactgatggttctgaattgttcaagtatttaaggacattgaatggttttgcttctactttgtcaaatgatgttcttagatccatttctaagaagtttcttgatataataacaggagagctgcctgattctatgactaccgtagaaaaatttacggacattttcaaaaattgcctagaaaatcaatttgaaatcacaaatctaaagattcttttcgacgaattaaactcttttgatatacccgttgttttaaatgatttaatcaataaccaaatgaagcctggtatattttggaaaaaggatttcatctctgcaatcaaattcgatggtttcacaagtataatttccctagaatctcttcaccagttactttccatacattatcgtattactttacaagtattgttaacattcgttctgttcgatcttgataccgaaattttcggacagcatatatctacattattggatttgcattataagcaatttttattgttaaacctttatagacaagataagtgtctgttggcggaagttcttctcaaggattcttctgaattctctttcggtgtcaaattttttaactacggccaactcattgcctatatcgattccttaaactctaatgtttacaatgcttccatcactgaaaattctttctttatgacgtttttccgctcatatatcattgaaaacacatctcataagaatataaggttctttctcgagaacgttgaatgccccttctacttacgccacaacgaggtgcaagaatttatgtttgccatgacgttatttagttgtggtaatttcgatcaatcctatgaaatttttcaactacacgattatccggaggctatcaatgataaattgccgacattcttagaagaccttaagagtgaaaactatcacggtgatagtatatggaaagatcttttgtgcacctttacagttccatataggcattctgcattctattatcaattatctctcttatttgatagaaataacagccaagaatttgctttgaaatgtatatctaagtcagcagaatattcattaaaagaaattcagattgaagaaccgcaagacttcaaagaaaaacagcatattcattatttaaatcttttaatccacttcagaatgtttgaagaagtcttggatgttttgagattgggtcacgagtgtctttccgacacagtaagaacaaattttctccaattattattacaggaagacatatattcacgagattttttcagcacacttctgcgcttgtgtaacgcacattcagacaatggcgagctatatcttcgtacagtagatattaaaatagtggatagtattctgtcacaaaatctacggagtggtgattgggagtgttttaagaaactttattgttttagaatgttgaacaaaagcgagagggctgctgcagaagtactgtaccagtacatattaatgcaagctgatcttgatgttattcgaaagagaaaatgttacctaatggtcatcaacgttttatctagctttgatagtgcatacgatcaatggattctaaacggaagtaaagtggttactttaactgatttaagagatgagttacgaggtctatag

SEQ ID NO: 77553 - DNA, 504 bp, Saccharomyces pastorianus
atgattatttacaaggatatcttctctaacgacgaattgttgtctgatgcttacgacgctaagttagttgatgacgttatctacgaagccgactgtgctatggtcaatgtcggaggtgacaacatcgatatcggtgctaacccatctgctgaaggtggtgacgatgatgttgaagaaggtgctgaaatggtcaacaacgttgtccactctttccgtctacaacaaaccgcttttgacaagaagtccttcttgacctacattaagggttacatgaaggctgttaaagctaagttgcaagaaactaacccagaagaagttcctaaattcgaaaagggtgctcaaacttacgtcaagaaggttattggttctttcaaggactgggagttcttcactggtgaatccatggacccagatgccatggttgtcatgttgaactaccgtgaagatggtaccactccatttgttgccatctggaagcacggtattgtggaagaaaagatctaa

SEQ ID NO: 77554 - DNA, 837 bp, Saccharomyces pastorianus
atgcattatttgcctgttgcgataataacaggtgccactaggggtataggcaaggcaatatgtcaaaagttatttcaaaagggtttaagttgcattatacttgggtctactaaagaaagtatagagcgcaccgcgatagatagaggccaattacaatcgggattatcatatcagcggcaatgtgctatagcaattgattttaagaaatggcctcactggcttgactatgagtcatatgacggtatcgaatatttcaaagatagaccgcccttgaaacagaaatattccacattgttcgacccatgtaacaaatggtcaaataatgaacgccgctactacgtaaacttattgattaactgcgcaggcttgactcaagaatcattaagtgtaagaaccactgcatctcaaattcaggacataatgaatgttaactttatgagccctgtgacgatgacaaacatctgtattaagtatatgatgaagtcgcaaaggagatggccggaactcggtggtcaatctgctcgacccaccatcgtaaatatttcctccatcctacactccggaaaaatgaaggttccaggtacatctgtttactccgcctctaaagccgcactgtccagatttacagaagttttagctgcagaaatggaaccaagaaacataaggtgttttacgatatctccaggtttagtgaaagggaccgatatgatccaaaatttgccagtggaagctaaagaaatgctggagagaaccattggggcaagcggtacaagcgcacccgctgaaatagcggaagaagtctggtctctatacagtagaactgctttggagacgtaa

SEQ ID NO: 77555 - DNA, 2184 bp, Saccharomyces pastorianus
atgtctacacaatttaggaagtcaaatcataatagtcatagtagtaaaaaactaaatcctgcgctaaagtccaaaatagatacgcttacagaattgttccctgactggacgagtgatgatttaattgatatagttcaagaatatgatgatttggaaactataattgataaaattacttccggcgcagtgacaagatgggatgaagtaaagaaacctgctaagaaggaaaaatatgaaaaaaaggagcaacaacactcatatgtccctcaacaacatttgccaaatccagaagatgatattacatataagagttctaataatagcaattcttttacttctacaaagcataacagtagtaacaattatactcaagccagaaataagaagaaggtacaaacaccacgagctcatacaaccgggaaacatgttaatctcgacaaggggaagcacgtaccatccaagcctgtttcaaacactacatcgtgggcagcagctgtttctgtagatactaaacatgacgtttctcaagattcaaatgataacaataatgaagaattagaagcacaagggcaacaagcgcaggagaaaaatcaagaaaaagagcaagaagagcaacaacagcaggaagggcataataacaaagaagaacacaaacaaatagagcaaccttctttatcttcaaagaaaacaacttctaagacatctgctccacaaccaaagaaaatgtcgtgggcagcaattgctacaccaaagccaaaggctgttaaaaagaccgagtctcctcttgaaaacgttgctgaattgaagaaagaaataagcgatattaagaaggatgaccaaaagtctgaagctagtgaagaaaaagttaatgaacaagaaacatctgcacaagaacaggaggaggagactgctgaaccttctgaagaaaatgaagacagagtccctgaagtggacggagaagaagtccaagaagaagctgaagaaaaggaacaagtaaaagaagaggaacagacagcggaagagctggaacaagaacaagataatgttgctgctccagaagaagaagttacagttgttgaagaaaaggttgaaattagtgctgttatttcagagcctccagaagatcaagctaatactgtacctcaaccacaacaacaacaacaacaacaacaaccacagcaaccacagcaacagcaacaaccacaacaacaactacaacagcaacagcaacaacaaccagtacaagctcaagctcaagcccaagaagaacaattatctcaaaactactatactcaacaacagcagcaacaattcgctcaacaacagcatcagttccagcaacagtatttgtcccaacaacaacaatatgctcagcaacagcaacagcatccacaacctcaatcacaacaacctcaatcacaacaacctcaatcacagcaaagtccacaaagtcaaaaacaagggaacaacgtggctgcccaacagtactacatgtatcaaaaccaatttcctggatattcttatccaggtatgtttgattcacaaggatgcgcttacggtcaacaatatcagcaacttgctcaaaacaacgctcaaactagtggtaatgctaaccaatataatttccaacaaggttatggtcaagcaggcgcgaacactgctgctgctaatttgactagtgctgccgctgctgctgccacttctccagctacagctcacgcccaacctcaacaacaacagccatacggtggctcattcatgccatactacgcccacttttaccaacagtcattcccatatggtcaacctcaatacggtgtagctggtcaatatccataccagttaccaaagaacaattacaactattaccaaactcaaaacggtcaggaacagcaaagtccaaatcaaggtgttgcccagcattctgaagactctcaacagaagcaatcacaacagcaacagcaacagcaacctcaaggtcaaccccaacctgaagttcaaatgcaaaatggccaacctgttaacccacaacaacaaatgcagttccaacaatactatcaattccaacaacaacagcaacaagctgctgccgctgccgctgctgctgctgctgcccaacaaggtgtaccatatggctacaacggttatgattacaattctaaaaattcaagaggtttctactaa

SEQ ID NO: 77556 - DNA, 261 bp, Saccharomyces pastorianus
atggggaatataatgtcagctagttttgcgcctgaatgcactgacctgaagacgaaatacgatagttgttttaatgaatggtatagcgaaaaattcctgaagggaaaatccgttgagaacgagtgctcaaaacaatggtacgcttatactacatgtgtcaacgcagctctcgtcaagcaaggtattaagcctgctctagacgaagctagggaggaggcgccgtttgaaaatggcggcaaactaaaagaagttgacaaatga

SEQ ID NO: 77557 - DNA, 375 bp, Saccharomyces pastorianus
atgtggctctccctttatcgaagaaaaaatatagcgggcccattaccctgcgttctgatattcatcactagtaaaaattgtatgtacttatttattctatctattcgtagaaaaatgaatgatggtcccaggctttggtacttctttcgtactctcttcttcatcgggcccttcgttgttatcatccgcttgtgccttcgggtggtggtgcccctgcttcagaggcgagctctctatattattgctgttctcatcgtcgttatcgccgtcgttattaatatgttcttcatgagccagttgcttccgcattttattgggcacaatcggagacggtaccatgctggaactagacccgtactgctgctgcaaaagtag

SEQ ID NO: 77558 - DNA, 879 bp, Saccharomyces pastorianus
atggattctgcaagcaaagaggaaacattggaaaaacttgatcaagaaattacagtgaacctgcagaagatagactctaacttgagtttctgctttcataagatcacccaggacatcatcccacacgtggctacatattcagaaatatgtgagcggatcatggatagcaccgaatggctggggactatgtttcaagagactgggctggtgaatttgcaggcaaatgcagctgcaccagtgggaaacgctccagtcaaaagcgttgtgagcaataatgttggtatatttcctacatccgctgaagaggcgagcagggagtcccagacagacaatgggcctaacgaggcagcttcagctgtacatgtcaaccgggatgtccattctatgtttactaacgacagtatagatgatttccacacagcgaatataacatccacgggacagatattgaaacttccggactctagcgacgaagatactggctcagaggcggtgccttcaagggagcaaacagaccttacaggcgagggtcatggtggggctgatgatgagcaagatgaaagtacaatacagagacaaagccgcaaaagaaagatttcgctacttttgcagcagcagtacgggtctagttccagcatggtaccgtctccgattgtgcccaataaaatgcggaagcaactggctcatgaagaacatattaataacgacggcgataacgacgatgagaacagcaataatatagagagctcgcctctgaagcaggggcaccaccacccgaaggcacaagcggatgataacaacgaagggcccgatgaagaagagagtacgaaagaagtaccaaagcctgggaccatcattcatttttctacgaatagatag

SEQ ID NO: 77559 - DNA, 690 bp, Saccharomyces pastorianus
atgtcaagtaaacaacaatgggttagttctgctattcaaagtgattcgagtggaagatcactcagtaacgtcaacaggcttgcaggagaccaacaatctattaacgatcgtgcgttatcgttattgcagagaacaagagcgacaaagaacctgtttccaagaagagaggaaagaagacgttatgaaagctcaaaaagtgacctagatatcgaaacagactacgaagaccaagcaggtaatctagaaatcgagacagaaaatgaagaagaagctgaaatggaaactgaagtacctgcaccagtgcgaactcattcatatgccttagacagatatgttagacagaaaaggaggggaaaacaaagaaagcagagcttaaagcgcgttgaaaagaaatatactcctagtgaattagctctgtacgaaattcgaaaataccaacgttccacggatttattaatctccaaaattccatttgcaaggctagtgaaagaagttacagacgagtttacaactaaagatcaggatttacgttggcagtcaatggcgattatggcgttacaggaagcaagcgaagcgtatctggtaggattattggaacatacaaacctcttggcgctgcatgcaaaaagaattactataatgaagaaagacatgcaactagcaagaagaatcaggggacagtttatttag

SEQ ID NO: 77560 - DNA, 1923 bp, Saccharomyces pastorianus
atgtcacctcgacagcttataccgacattaattccggaatgggcaccattatcccagcaatcgtgcataagagaggatgagttagatagtcccccgataacgcctacgagccagacatcttcatttggttcttctttttctcaacagaaaccaacctatagtacaattataggagaaaatatacacacgatcctggatgaaattcgaccatatgtgaaaaaaataactgttagtgaccaagataagaaaactataaaccaatatacgctaggagtctctgcaggaagtggacaatttggttatgtacgaaaagcgtacagttctactttaggcaaggttgttgctgtcaagattataccaaaaaaaccttggaatgcccagcaatattcagtaaatcaagtaatgaggcaaatccagctttggaagagtaaaggaaaaataacgacaaatatgagtggtaatgaggctatgagacttatgaatatcgaaaaatgtaggtgggaaatttttgcggcttcaagacttcgaaataatgttcatattgtgcgactaatagaatgcttggactctcctttcagcgaatctatctggatagtcactaattggtgcagccttggtgaactacagtggaaacgtgacgatgatgaagatattttaccgcaatggaaaaaaattgtgatttcaaattgtagtgtttctacatttgccaaaaaaatcctggaggatatgacaaaagggttggaatatttgcattctcagggttgtattcatcgtgatatcaaaccgtccaatattttattggatgaagaagaaaaagtagcgaaactttctgattttggaagttgtattttcactccccaatcattacctttcagcgatgctaattttgaagattgttttcagagggaattgaacaaaattgttggtactccggcatttattgcaccagagctatgtcatttgggcaattccaaaagagattttgtgacggatggctttaagttggatatttggtcattgggagtgacactatactgcttactgtacaacgagctgccatttttcggggaaaatgaattcgaaacctaccacaaaatcatcgaagtatcattgagttccaaaataaatggtaatactttaaacgatttagtcattaaaaggttattggagaaagacgttactttacgcataagtattcaggatatagtaaaggttttgtcgcgtgaccagcccatagattctaggaatcacagtcaaatttcatcgtccagtgtgaaccccgtaagaaacgaaggtcctgtaagaagattttttggtaggctactgactaaaaaaggaaagaaaaagacctcaggaaaagggaaagacaaggtattggtatctgcaactagtaaagtaacaccttcgatacatatcgacgaggaaccggataaagaatgtttttcgactacggtccttagatcttcgccagactcgagcgattattgttcatcgttaggggaggaagccattcaggttacggatttcttagatactttttgtaggtcaaatgaaagcttacctaatttgactgtgaataatgataagcagaattcggacatgaaaactgacagaagcgagtcatcctctcattcgtcattgaaaatcccaacacctatcaaagccatgataagactaaagagttcccctaaagagaacgggaacagaacccatattaattgctcacaggacaaaccgagttccccactaatggataggactgttggaaagcgcacggttaacaattcaggggctagaaagcttgctcattcaagtaatattctcaactttaaagcatacataaattcggaagatagtgacattcgagaaacagtagaagatgtaaaaacgtatctgaactttgcagataatggtcaaatatag

SEQ ID NO: 77561 - DNA, 1551 bp, Saccharomyces pastorianus
atgaattccggaggtgaagaaccaactataaagccaaatgtatttaatattactcaacttttaaactcaaatggtgaaaaaccgggaattgcttgcatcttcttaagtaaatttgacatgaaaaagggaaatatcataatatggtctaaaagtattaatggtgcggcaattgacttaagcaatattgaatttaaatcgttaccagccggtattcacgaacaaactgacgatgttgtcaattttgtagttcctaaagaattagatgtctgtcaaactgccaagacgacaacttatgattacggcattgcctatttcaaacaaaattcgttcgatattattgagaatgacaatcgtattgataggagtaaagttcaaatgttttctcttggtgtaattatcgatgtccaaaatgtctcatcagatagtaaaaagcacttttataaggaaatataccatgcgtatgctgccaacagatactcaagctatctagaaagtttactcggtcaatggataaggcagcgtgattttgataagtttgatatttttgaaaagttttttgacgagaataaccaagggcacatggctgaaaattcagtagaagtctttgaacattcacccaaagaaagacggcatttggttgaatatttgccatactggacaaggaagttagggcctctcatatttccactttggaaagcaagtctccttcagtcaaggatattgatactagttcctcaaggagaatcgttcgaattgtgcaattctttggcctattgtgtcttcttaatatcaatgcttccaaaaaacttgataggaaaccatgtaagcgatgaatatattaagcctattttcacggtatcaacatcagatattccttttctagagtcgttcaaaaaggggaacggttatgtggctacgaccagcgaggaaattttgttgtataagcctgaaatttacgacatagtagtcaaacttacttcgagctcaactatagaagaatcaccagaaaaagaagtggaaattcttaccgcatctggtgaacaaaacaaagcaactcctcttgacttagaggtgtatgaaaaacttatactgggggagttacaagaggatgcctctacaaatgcgacatgtcgacatcatgaggtgacagaacccatatcatggctacagtttttaattgatgggttttttcttttaactactgcaggctatctggtagcgccatatcaccttgcaaagaatttcaagattccgaggcacgtttctggcccagaacccaacaattcagaaatacagatcgctgaaaatttagttcgctattttcaccgcagaacatcaaatctgtacaacgatctgaaggatgtcatacaaaaaagtgaaaatattgattcagaacaaccgattactattgcaacttcatttttaaccaagttaaatttggattgctttagcaaacaagatcatcaattcgttaaggatatcgcccttaaatggttccaaagaagcattgatattagcaacctaccagaatgtttgggaaatctctgttaa

SEQ ID NO: 77562 - DNA, 1350 bp, Saccharomyces pastorianus
atgctagtaaataaagtgatagggttactgggtgtactcttcgcaacaagatttacaaatgccgtcgaattggacctagacaactacgaatctttgcaaaatgctacttcactaattgcctacggtttaatggattattacactggtaatcagtatggtaagacggtcggtatgttttcagatccgtactattggtgggaagccggtggtgcctggggctgtatgctagattactggtttttcatggataacgacacctataatgatgaaattatagctgcaatgatacatcaagctggtgatgataatgactatattccgctaaatcaatctaccactgaaggtaatgatgaccaagccttttggggtattgctgctatgactgccgcggagagaaactttactaatcctcccgagaatgagcctcaatggctatatttagcacaggctgttttcaataccatggctttgcgttgggatgccgattcctgtggtggtggtttgaggtggcaaattttcgtttggaactctggttacgattacaagaacaccgtttctaacggtgccttgtttcacatagctgcaagattagcaagatatacaggtaatcaaacatatgttgactgggccgaaaaagtttacgagtggatggtcggtgtgaacttaatttctaatggtacctataagtatgtttacgatggtgtcagcattgatgataattgcaccaaagtgacctcatatcaatggacatataatcaaggttttctgttggctggctctgcctacctttacaactttacgggatcagacctctggcacacaagaaccaaagagtttttgaacgcttcccaagtgtttttccatgatggtatcgtgtatgaagctgcttgtcaaggtccaaattcttgtactacagatcaacgttccttcaaagcctattttgcccgtttcttaggtgtcactgcacaactagtgccagaaactaggaaccaaattatgtcttggttgaatacatctgccattgcggccgcgaaatcatgttctggaggtactgatggtcagacctgtggattgaattggttcaatgggacttgggatactatgtacggtctaggtgaacaaatgtccgccttagaagtaatggtcaacacgagggccttagataaacccgcaccatacacggcagagaatggtggttcatctgttggtgatggggcagcaggtactaaagcgcaacccacaaatttggcaccattaaatatcactaagggttcaaaggcaggtgcaggtattattaccgctgtcattggtatttcaattgtcgcatgtgctctgtggttagtcttttga

SEQ ID NO: 77563 - DNA, 357 bp, Saccharomyces pastorianus
atgcagacaatggacggggagcaccttcttctttcacagctaaaggggtctttctttctcctacttttggcatactttttcaggggcagaagtccttattacgcacgttgctaccgccggcttgctgttacacctggtgccatcactattgccattgccattgctacagattcaattccggcgcttgcaaagtccaaagttctggtgtcggtttgttctcacacagatccctgtacagcgtcttgtaacctgatccccttcccccgccccttctcgaacagcctgacgcgcttcctcttttgtttgggctcggcccgtttttgcatttcctttccctgttttggattgagtatataa

SEQ ID NO: 77564 - DNA, 393 bp, Saccharomyces pastorianus
atgtgttttggtgtgcttcttagtggacattattatgttatgatacacttgctgtggaagttatattatataatcggaagaggactaggccttttaacgttgctgatgtggaaagaaccagaaattgaatctccaactcctaaaaccgtaacttcaatctcatggtacctgctggaagaactttgttgtttgtttagatttatatactcaatccaaaacagggaaaggaaatgcaaaaacgggccgagcccaaacaaaagaggaagcgcgtcaggctgttcgagaaggggcgggggaaggggatcaggttacaagacgctgtacagggatctgtgtgagaacaaaccgacaccagaactttggactttgcaagcgccggaattgaatctgtag

SEQ ID NO: 77565 - DNA, 1500 bp, Saccharomyces pastorianus
atgtccactaagaagcacaccaaaacacattccacttatgcattcgagagcaacacaaacagcgttgctgcctcacaaatgagaaacgccttaaacaagttggcggactctagtaaacttgacgatgctgctcgcgctaagtttgagaacgaactggattcgtttttcacgcttttcaggagatatttggtagagaagtcttctagaaccaccttggaatgggacaagatcaagtctcccaacccggatgaagtggttaagtatgaaattatttctcagcagcccgagaatgtctcaaacctttccaaattggctgttttgaagttgaacggtgggctgggtacctccatgggctgcgttggccctaaatctgttattgaagtgagagagggaaacacctttttggatttgtctgttcgtcaaattgaatacttgaacagacagtacgatagcgacgtgccattgttattgatgaattctttcaacactgacaaggatacggaacacttgattaagaaatactccgctaacagaatcagaatcagatccttcaatcaatccaggttcccaagagtctacaaggattctttattgcctgtccccaccgaatacgattctccactggatgcttggtatccaccaggtcacggtgatttgtttgaatctttacacgtatctggtgaactggatgccttaattgcccaaggaagagaaatattatttgtttctaacggtgacaacttgggtgctaccgtcgacttaaaaattttaaaccacatgatcgagactggtgccgaatatataatggaattgactgataagaccagagccgatgttaaaggtggtactttgatttcttacgatggtcaagtccgtttattggaagtcgcccaagttccaaaagaacacattgacgaattcaaaaatatcagaaagtttaccaacttcaacacgaataacttatggatcaatctgaaagcagtgaagaggttgatcgaatcgagcaatttggagatggaaatcattccaaaccaaaaaactataacaagagacggtcatgaaattaatgtcttacaattagaaaccgcttgtggtgctgctatcaggcattttgatagtgctcacggtgttgtcgttccaagatcaagattcttgcctgtcaagacctgttccgatttgttgctggttaaatcagatctattccgtctggaacacggttctttgaagttagacccatcccgttttggtccaaacccattaatcaagttgggctcgcatttcaaaaaggtttctggttttaacgcaagaatccctcacatcccaaaaatcgtcgagctagatcatttgaccatcactggtaacgtctttttaggtaaagatgtcactttgaggggtactgtcatcatcgtttgctccgacggtcataaaatcgatattccaaacggctccatattggaaaatgttgtcgttactggtaatttgcaaatcttggaacattga

SEQ ID NO: 77566 - DNA, 2010 bp, Saccharomyces pastorianus
atgcttagaaccagactatccgtttcggttgctgctagatcgcaactaaccagatccttgacagcatcaaggacagcaccattaagaagatggcctattcagcaatcgcgtttatattcttctaacactagatcgcataaagctaccacaacgagagaaaatacttttcaaaagccatacagcgacgaggaggtcactaaaacacccgtcggttctcgcgccagaaagatcttcgaagctcctcacccacatgccactcgtttgactgtagagggtgccatagaatgtcccttggagagctttcaacttttaaactctcctttatttaacaagggttctgcatttacacaagaagaaagggaagcgtttaatttagaagcattgctaccaccacaagtgaacactttggacgaacaactggaaagaagctacaagcagttatgctatttgaagacgcccttggccaaaaacgacttcatgacgtctttgagagtacaaaacaaagtgctatattttgcattaataaggaaacatatcaaggaattagttcctatcatttacaccccaaccgaaggtgatgctattgctgcctattcccacaggtttagaaagccagaaggtgtgtttttagacattaccgaacctgattccatcgaacgtagattggctacatacggtggagacaaagatgtagactacatcgttgtgtcggattcggaaggtattctgggaattggtgaccaaggtatcggtggtgtacgtattgctatctccaaattggcattgatgacgctgtgcggtggtattcatcctggccgtgtgctacctgtgtgtttggacgtcggtactaacaacaagaaactagcccgtgacgaattgtacatgggtaacaagttctccagaatcaggggtaagcaatatgacgacttcttggaaaaattcatcaaggccgttaagaaagtgtatccaagcgccgttctgcatttcgaagatttcggtgttaagaacgctagaagattgctagaaaagtacaggtacgaattgccatcattcaacgatgacattcagggcactggtgccgtcgtgatggcctcgttgattgctgctttgaaacataccaacagagacttgaaagacaccagagtgcttatttacggtgccgggtctgcgggcctcggtatcgcagaccaaattgtgaatcatatggtcacgcacggcgttgacaaggaagaagcgcgtaagaaaatcttcttgatggacagacgtgggttaattctacaatcttacgaggctaactccactcccgcccaacacgtatacgctaagagtgatgcggaatgggctggtatcaacacccgctctttacatgatgtggtggagaacgtcaaacccacgtgtttggttggctgctccacacaagcaggcgcatttactcaagatgtcgtagaagaaatgcacaagcacaatcctagaccaatcattttcccattatccaaccctactagactacacgaagccgttcctgccgatttaatgaagtggaccaacaacaacgctcttgtagctaccggatctcctttcccacctgtcgacggttaccgtatctcggagaacaacaattgttactctttcccaggtatcggtttaggtgccgtactatcgcgtgccaccactatcacagacaagatgatctccgctgcagtggaccaactagccgaattgtcgccactaagagagggcgactcgagacctgggttgctacccggcctggacaccatcaccaacacttctgcgcgtctagctaccgctgtgatcttgcaagcactcgaggagggaaccgcccgtatcgagcaagaacaagtaccgggaggagctcccggcgaaactgtcaaggttcctcgtgactttgacgaatgtttacagtgggtcaaagcccaaatgtgggagcctgtgtacagacctatgatcaaggtccaacatgacccatcggtgcacaccaaccaattgtag

SEQ ID NO: 77567 - DNA, 525 bp, Saccharomyces pastorianus
atgtctttggccaaatccgctgctaacaaacttgactgggcaaaagtcatctcttctctacgtataacagggtcgactgccactcaattatcgagttttaaaaagagaaacgatgaggcacgtagacaattactagagctgcaaagtcaacccaccgaagtagatttcagtcattatagatctgtgttgaaaaacacttcagtcattgacaagatagaatcatacgttaagcaatataagccggtcaaaatcgatgcctccaaacaattacaagtgattgagtcttttgaaaagcacgcaatgaccaacgccaaggagacagaatccttagtttccaaggagttaaaggatttgcaaagcaccttagataatattcaatctgcaagacctttcgatgaattaactgttgacgacctggcaaagatcaaacctgaaattgatgctaaggtagaagagatggtcaagaagggtaaatgggacgtacctggttacaaggacagattcggcaatttgaatgtgatgtag

SEQ ID NO: 77568 - DNA, 2940 bp, Saccharomyces pastorianus
atggtgaccgaccaaggcagtaggcattcgatacaatctaagcaaccagcctacgttaataaacaaccgcaaaaaaggcagcagagatcttctgtcgcatgcctttcttgtaggaaacgtcatataaaatgtcctggtggtaacccttgccaaaaatgtgttacgagcaatgccatatgtgagtacttggagccgtcaaaaaaaattgttgtgtcgacaaagtatctgcaacaactgcaaaaagacttgaatgataaaactgaagagaataaccgcctgaaagctttgctcttggagagaccagtgagtgtacgtggtaaggataacagcgatgatgacgagaggcatataaacaatgcaccctcaagtgacacattggaagtatccagcgctccggcggctcctatatttgacctgatgtccaatagtaacactgcgtccgataacgataacgacgatgacaacagcaacagaatcacaaataataggagctatgatcatagtttggaaaaatactacaaaaaggccatcagcatctttaaacaaccagctaatgctaatggtgaaaatggcaacggtgccaatggtcatgaggatgatgatgaagatgatgaagaaatatcaacaaattttgctcaaagaagtggtaggctcatagaatctcacaatggattccattattttgttggatcttcttcaatgacattatttgggttagaaattcaatctttggttacaaagtatatttcggtcaagaattttcgacctttgccaataaacaccaaaaacgagattttaaattcaaacctgaacccggctataagttcttttattaattcaaacaactatcttttctcgtcctataattttttgaaccctatatcgactattgtcaacttaaactcaatcaacgataatttatctccattgatgtttaagataattttgaaaagcgatacggatggtagtagtggccaggaagaggtaatacagtttcagttgccttcgtataattacacaaaactattaattgactgctttataaattataacgatggttgtttttactttttcaacgaaggcctggttaaatgtggcattaacaaattgtacttggaaaataaatggctatactatgataataccaaaaaagctttggacaatgagaatgatccaattttacaagctgtttggttttgcaaaattttgttaattttagcagtaggtgaaatgtatctgggttccatcaataatgaaatgttgaggaattattctaatcagccaaaattgcccggttcaaaattttttcaaatgggttctaaaatttttaattgtttgttctcaagtgaaagattagaaaatgtgactaagaaaggcggtattgaagtcctgttgttatacgcgtttttcttacaggtggctgattacactttagcctcttatttttacttcggtcaagccctaaggacgtgcttaattctaggcttacatgttgattctcaaagcgacactctatccaggtatgaaatcgagcatcataggagactttggtggacagtttacatgtttgaacgaatgcttagctcaaaagctgggttaccattaagtttcactgattatacaatctctacagcactgccagcggatattgatgatgaaactattgaagagaaaaatagtcactatgttttcagaaaggcagaattaatttctaactgcgttactattgtgaaaatcaatgcacaaattttgagcaaattatatcaaaggcaacctgagacaaacatcataattactttgaaggttgtcatcaagcagttgttggaatggaggaacaatttgtctgattccttacaggtggattttacgcaaaaggatgaagatttcaaaatatcgagattgtcaaccaatatgtttacggaatatttccaaggaataaacttggccgtgagacctttattatttcattttgcatccattcaattgaaaaggttcaaaacgagcaatactttcgtcaacttacaaaactattctgccacaatatcttccttattaacatgttctttgcatgcttctgtgaatactattaggtctctgtggagtttattacagaatagtatgcttgctatgtttggttatatggacagagagtatctttttacttcttcttgtactttattactatttaacactgcttttggtattcatgaacaaacactatatcatttggatcattcgctggaaattttcacgcaaatgagaaacttaggcaacattccagcaggcttaagaagagcacaattactaacattaatggcaaatttggatttccacggcataatgaatgacttgattactaaatataacgatattttgaaatttgattctatgaattgtgaaaacgataacatagtagaagatagcaatgaacccaaaagagaaaccgagaagcgtaaaactcacaaagatggcgatcgcattgacccttcaattatagactgtgataaatcaaacaccaatacaaatatgatcaagaacgaatctatatcgaacattgttagcatacttccggaaagcgcgaaaccaacgctgactgattatagtaatggtaataatgatgttaatgatattaacgtcaacaactcggaaccttctactttttttgatatcataactgcgagcttggaaaattcataccaaaccacgctaactgaaaagggctctcaggtgatggaaaaaaacatggatcagttggattctgttcataatctaaatgatgacgatttacaacaattgttggaggatttgggcaatattgatcattccgatgaaaaactttggaaggaaatcactgatcaagcaatgtggctgggaaatactatggatccaactgcagctgctggtagtgaaattgactttactgattatttaggaccataa

SEQ ID NO: 77569 - DNA, 516 bp, Saccharomyces pastorianus
atgtcacaatcattacgtccgtatctaacggctgttcgttattccctggaagctgcgttgactttgagcaatttctcttcgcaggaagtggagaggcacaacagaccggaagttgaagtccctaacactagcgccgaattgttgctccaaccgatgcatatatctcgtaatgaaaatgaacaagtattgattgagcccagtgtaaactcggtgcgtatgagtttaatggtgaaacaggcagatgaaattgagcagattttagttcacaagtttactagatttttggaacagcgtgctgaagcattctacattctgagacgtgtaccaatacctggctacagtatttcttttctaataactaataagcatactgaatcaatgaaaactgggaaattggttgattttattattgaattcatggaggacgtggataaggaaatcagtgaaattaaactgtttttgaatgccagagcaagatttgttgcggaagcatatcttgatgaatttgtctattag

SEQ ID NO: 77570 - DNA, 1062 bp, Saccharomyces pastorianus
atgtcgacagcacagaaagctaagatattgcaactcatcgattcctgctgccaaaatgcaaaaagcacacaactaaaatctttatcatttgttattggagcagtaaatggcacgacgaaagaagctaaaagaacctacattcaagaacagtgtgaatttttggagaagttacgacaacaaaagataagagagggaagaattaacatattgtctatggatgctggtgtttctaactttgctttctctaagatgcaattgctcaataatgatccgctccctaaagtactagactggcaaaagataaatctagaggagaaattttttcaaaacctcaaaaagttaagcttgaatcctgctgaaacttctgagcttgtatttaaccttacggagtatttatttgaatctatgccgataccagatatgtttacaattgaaaggcaacgtaccagaactatgtcttcgaggcatattttagacccaattttaaaagtgaatattctcgaacagattcttttctctaacttggaaaataaaatgaagtatacgaataaaataccgaatacgtccaagttgaggtatatggtatgttcgtccgatccacatcggatgacttcatattggtgcattccaagagaagagacaccgaccagttcaaaaaagttaaaatctaacaaacatagcaaagattctcgaataaagctagtgaaaaaaatactttcaacctcaatactagaaggtaattcaactagttctacaaaactggtcgagttcataggagtttggaataataggataagaaatgcccttaccaaaaaaaaaagtttcaagctatgtgatatactagagatccaagataattcgggggtgagaaaagatgacgatttggcagattcattcctccattgtttgtcttggatggagtggttaaaaaattatgaaagtattactgaactcttgaattcaaaaacactggttaaaacacagttcggacaggtgtttgaattttgtgaaaataaggtacaaaagctgaaatttttgcagaacacttacaacaatgactaa

SEQ ID NO: 77571 - DNA, 711 bp, Saccharomyces pastorianus
atgccaagatcaaaacgttccaagctagtcactttagcacaaaccgataaaaagggcagagaaaataaagaaagaattttcgatgaagtgagggaagccttagatacttatagatacgtctgggtcctacatcttgacgacgtaagaactccagttttacaagaaatcagaacatcttgggcaggctctaagttaattatgggtaagaggaaagttttacaaaaagcattgggagaaaagagggaagaagaatacaaagaaaatctgtatcaattgagtaagctttgtagcggtgtcactggtttattgttcactgatgaggatgtcaacactgtcaaggaatactttaagtcatacgttcgttcagactattcaagaccgaacacgaaagcaccactaacatttacaattcctgagggcattgtctactcacgtggtggtcaaattccagctgaggaagatgttccaatgattcattctttagagccaactatgagaaacaaatttgaaattccaactaaaatcaaagctggtaagatcaccattgacagtccatatttagtttgcactgaaggagaaaaattagatgttcgtcaagctttaatactgaaacaattcggtatcgctgcttctgaattcaaagtcaaggtgtcggcctactatgacaacgatagctccactgttgaaagcactaacatcaacatggaataa

SEQ ID NO: 77572 - DNA, 1257 bp, Saccharomyces pastorianus
atgtcgacaataaagccaagcccttcaaacaacaatttgaaagtgaggtcaagaccaagacgcaagtcttccataggtaagatcgacctcggggacactgtacctagtttaggtactatgttcgagacaaaagaatctaaaacggctgctaaaaggcgtatgcagagattatctgaagccaccaaaaatgatagcgacctggtcaagaaaatctggttttcattccgagagataagttaccgtcatgcctggatagctccgttgatgattttaatcgcggtatatagtgcctatttcacttctggtaacactacaaagacaaatgtgttacatagatttgtcgctgtgtcataccaaataggtgataccaacgcatatggtaaaggtattaacgatttgtgctttgtattttactatatgatttttttcacattcttacgtgaattcctaatggatgttgtcattagaccgttcgctattaggttacacgtcacttctaagcacagaattcagagaatcatggaacaaatgtacgctattttctacaccggtgtttccggtcctttcggaatatattgtatgtaccattcggatttatggtttttcaacacaaaggcaatgtacagaacatatccagatttcactaatcccttcttattcaaggtattctatttgggtcaagctgcattttgggctcaacaagcctgcattcttgtattgcaactagaaaagccaagaaaagaccataacgagttgactttccatcatattgttactttactattgatttggtcttcctacgtatttcatttcactaaaatgggactgccaatctatatcacaatggatgtttctgattttcttttgtcattctccaaaactctaaattatttggactctggattggcatttttttcttttgctatctttgttgttgcgtggatttatttgcgtcattacataaatttaaagatcctatggtccgttttaacgcaatttcgcacggaaggtaactatgtcttgaattttgccactcagcaatataaatgttggatttccttaccaattgtctttgtattgataggcgctttgcaattagtgaatctttattggctgttccttatttttagagttctttacaggattctatggagaggtattctcaaggatgacagaagtgatagcgaatcagacgaagaaagtgatgaaagttccactactccaactgacagtactccaacgaaaaaggatatttga

SEQ ID NO: 77573 - DNA, 1785 bp, Saccharomyces pastorianus
atgtctgtccgtacttcttcaagatctaataagggtcagaataaatatattgagtatttgttacaggaggagactgaagcaccaaagaaaaaaagaactaaaaagaaagttgattcagccacagagaagaataagaagtctgattcttctcaggagccaaggaaagatactgaaaatgtaagaacagacgaagtagacgaagcggatgagggctatgttagatgtctgtgtggggcgaacaatgaaaactacgatgctgcagaatattcgcatggcgacatggtacagtgcgatggctgtgacacttggcagcatattaaatgtatgactgatggtaaagacaccatagatgggctaatgagtgaagattctaagtactactgtgaattgtgcgacccatcattgtatgcacatttggaaacgtcaaaggaggaagaggtttcagaggatgaagattaccatgatgatgtttacaagcccgtaaatgaccatgatgacaatgatgcagatgtctttcttgatgaggaaagccctaggaaacgaaaaaggagccccgatagtgccaaaggaattcatatcaaatccaaacaggtgaagaaatccaatgggtcaaaaaaaaggaataaaagcattgatgccgccaagtctgatactgccgaaaacgaaatgcctactaggaaagattttgaaagcgaaaaagaacacaaactgaggtataatgcagaaaaaatgttctctaccttatttagcaaattcatcgttcccgaaacaattgaggcaaaactttatgagcttcctgatgggaaagacgttatatcgatatcgcaagagtttgcgcacaatctggaagaagaactttacaaagcttgccttaacatcgagtttggtactttggacaagatatacacagagaaagtgaggtcgttatactctaatttaaaggataaaaaaaatttggaactgaaggcacacgttgtcgagggcaaattgcctttaaataaactggtgaacatgaacgcatctgaactcgcaaatcctgacttacaagaatttaaagagaaaagggataaggttatcttagaaaattttatcgtggaggtacctgacaaacccatgtacgttaagacccacaagggtgatgagctgatcgaagatatcgctgaacctcaagaggatattttgtactcaaaagacagcataagattacacaacattgacagtatcgacagcgataagagtaaaatagaacagactcatgccatttcgaaagaacccagcccaagtacaataatcaacgaagaatctttaaactgcgcatttttgtatcccggcttaggacttgagtttacaggttacctaaactacattggggcttcacaaaagttaagacgggatattttcaaggaagccattggtgacggaaaactgtatgtagaagggcgcttacctacaaccactgctgcaccatatcttaaggaaatttcttgctctagagctatattagtataccaattatttccttcgaatgatagtgaaagtaagacaacttttgccgacgttgtagactccctggaaaacaaaggtcgcattgcaggtataaagccaaaaactagatacgagaaggatttttatatcgttccatcgaagggcggtgaaattcctgaaattttgaaagatattttaggcagtcacaatgatgaaagatctgagagattttcgcgaatgaaatcagatgaaagaacattattcgcatttgttgtcgtgaaacaggaatttatccattaa

SEQ ID NO: 77574 - DNA, 1206 bp, Saccharomyces pastorianus
atggcaaaccctttttcgagatggtttctatcagagagacctccaaactgccatgtagccgatttagagacaagtttagatccccatcaaacgttgttgaaggtgcaaaaatacaaacccgctttaagcgactgggtgcattacatcttcttgggatccatcatgctgtttgtgttcattactaatcccgcaccttggatcttcaagatccttttttattgtttcttgggcactttattcatcattccagctacgtcacagtttttcttcaatgccttgcccatcctaacatgggtggcgctgtatttcacttcatcgtactttccagatgaccgcaggcctcctattactgtcaaagtgttaccagcggtggaaacaattttatacggcgacaatttaagtgatattcttgcaacatcgacgaattcctttttggacattttagcatggttaccgtacggactatttcattttggggccccatttgtcgttgctgccatcttattcgtatttggtccaccaactgttttgcaaggttatgcttttgcatttggttatatgaacctgtttggtgttatcatgcaaaatgtctttccagccgctcccccatggtataaaattctctatggattgcaatcagccaactatgatatgcatggctcgcctggtggattagctagaattgataagctactcggtattaatatgtatactacagctttttcaaattcctccgtcattttcggtgcttttccttcactgcattccgggtgtgctactatggaagccctgtttttctgttattgttttccaaaattgaagcccttgtttattgcttatgtttgctggttatggtggtcaactatgtatctgacacaccattattttgtagaccttatggcaggttctgtgctgtcatacgttattttccagtacacaaagtacacacatttaccaattgtagatacatctcttttttgcagatggtcatacacttcaattgagaaatacgatatatcaaagagtgatccattggctgcagattcaaacgatatcgaaagtgtccctttgtccaacttggaacttgactttgatcttaatatgactgatgaacccagtgtaagcccttcgttatttgatggatctacttctgtttctcgttcgtccgccacgtctataacgtcactaggtgtaaagagggcttaa

SEQ ID NO: 77575 - DNA, 396 bp, Saccharomyces pastorianus
atgctttatgagctgatcggacttgttcgcataaccaactccaatgcgccaaagttggaagcaaaagaattgtcttccacaatcgggaaactgattattcaaaacagaggtgtggtgagggacattgtacccatgggcataaggtatcttcctaaaataatgaagaaagaccaggaaaaacattttcgagcatatcactttttaatgctgtttgattcatcagctgcggtacagtctgaaattctaagaactttaaagaaagatccccgtgtcataagatcatccatcgttaaagttgatttagataagcagctggatagagcctcatcgttacaccgttctttggggaagaagtctattttagaattagtgaatgaagattatcaatccatttag

SEQ ID NO: 77576 - DNA, 609 bp, Saccharomyces pastorianus
atggctactaatattacttggcatccaaatcttacttacgacgaacgcaaggcattgagaaaacaggacggttgtactatttggttaacaggtctaagtgcgtcaggtaaaagtacaatcgcctgtgcgctagaacagttactgctccaaaaaaacttgtctgcatatagattggatggtgacaacattcgttttggattgaacaaggatttgggtttctcagaaaaggacagaaatgaaaacattcgtagaattagcgaagtttctaagctatttgctgattcatgtgctatttcaatcacctcatttatctctccatacagagttgacagagatagagctcgtgaactacataaggaggctggtttgaagttcattgaaatatttgttgatgttccattagaagtcgctgagcaaagggaccctaagggtttatacaagaaagctagggagggtgtaatcaaggagtttacaggtatttctgccccatatgaagcgccaaaagctccagagctacatttgagaaccgaccagaagacggttgaagaatgtgctaccattatttatgagtacttaatcagtgaaaaaatcatccgtaagcatttgtaa

SEQ ID NO: 77577 - DNA, 879 bp, Saccharomyces pastorianus
atgactgttggatttctacttacaacacctgaaaacaaaacggtatataatgtacacgaagatttactcaagagatacttccaggacaacagtgttttagtaataccggatttattggtcaaagaagtaaggctgattcaacggcttctttgttcatcaaacaatcgtatcaacaagtcgtcatctctttggatattataccgaaaactattcgttttatctcttgatgctaatacactggttcttccagatattttatttgtatttcattcttctggatcccaacatttctctaattactactgttggaatactgctagatggttctacgataatttaccttacaataaaagaattgagctcttcaatttgactaagagattttgctttcaaaatgttaaggattgttcctcatggagcgcattagcatatatggtatgccagcaggaggaaaaaaaaaccgataatatacgtgattttcaaagactaacaagctcttttaatgttccgttcaagataaataaagtggatttgaattttcaagtacagcctgcggatgcatttactcaggaattagtaaaatggattgatcgaacgtatgctgcagattggcctccatatctgtgtctcctgcaaattacgaaatttaatatcacccttagaattgaaatggactctgtcttattgacttggagaaatgaaattctgaattttgaagagaacagtggtcatatcaaaatgataaataatactccaatagtacctgagaaattttcaaacgatctcctaacttctgtgaattttgcacattttggctataaaaagcttttcttaaataagtttttggataaaaataagaaagaaccatcagatagttag

SEQ ID NO: 77578 - DNA, 243 bp, Saccharomyces pastorianus
atgcaatcttctcttcccctttgcagagaattttttgaaaaaataactgcatatttagattatcatgatttcaggttaaccattactgccaatcaaccttcaattactctcccttactacgtagacgaaaaagcccattccatagaactaattatcttcaaaacaacatttttatctcttttccaagaagcacatacatattttaacaaaactttctctgatcaaagtatgtctcaacggtaa

SEQ ID NO: 77579 - DNA, 828 bp, Saccharomyces pastorianus
atgggtagacggaaaggcggacatagtatgaggatgtcgtcactgcttaaattacattgtattagaccattgccgcaaaggtcggtctggctctctggctacaagcagaaagccagatgtattcacagttccgctgcaaacggggactttatgtcatggttcaagaggaagaagcaagaagagcaccaagagcctgtcaaggacaccaaacagttgataaaggatattgaagaaggcactaacgaggcttcctctcaatcctcttccaataacaaaaacagattggagctaataccagaaaattttattggcgaagggtctagacggtgtaagagacagaaggagttgaagcttgcggtctcctctgcgccattcaatcagtggttatccagggataagattacgtctgataatcagttagatgatatgatattgcaggcaacggaaaaaacattgggcaaagtagaccaggacgtccaattctctgatttggtagctaaatttcagttcaccaaatttttgcaatctaaatctggctatctaattcctgattatgaactgaccactttaagcacacccttgcagtttaaaaggtatattaaggaaaaaattttgccatctgccaacgatcctaaactcgcttataaagaagctgagccaaatgctatccacccattttctgataattacgcgtcaccaaacatatatgttgttaacgatgttacttctaaagagcaaaaaagtaaatatgatactattatgaaagaaattcaaaagttagaggatgatgcaacaagaaaagctttggaaacagcaagatccgcttag

SEQ ID NO: 77580 - DNA, 705 bp, Saccharomyces pastorianus
atgttgcaatttaaactagttttattgggtgactcatccgtgggtaaatcttccattgttcatcgttttgttaaggatacattcgatgaactacgtgaaagtacgattggtgctgcttttttatctcaatcaatcactattcacccaaacgatggtaatgaaacaaaggatgtcgttataaaatttgaaatctgggatactgctggtcaagaaagatacaagtcattggcaccaatgtattatagaaacgctaatgcagcattagttgtttatgacattacgcaggaagattcactacaaaaggcaaggaactgggttgatgagctgaaaaataaggtaggcgacgacgacttggttatttatttactgggaaacaaagtggatttatgtcaagaaacgcctagcactgagacaagcccagattcaaacgaaggtggagatgaagaacaaaaagtaagagcaattagcactgaagaagcgaaacagtacgcacaagaacaagggttgctgttccgagaagttagtgctaagacaggtgaaggggttaaggaaatttttcaagatattggtgaaaaattatacgatttaaagaaagacgaaattctctctaagcaaaatagacaaatcggtggaggcaataacggacaagtagacattaatttgcaaaggccatccacaaatgatccaacatcttgttgcagttga

SEQ ID NO: 77581 - DNA, 918 bp, Saccharomyces pastorianus
atgtcggagtttaatattacagaaacttatctaaggtttttagaagaagatactgagatgacaatgccgattgctgccattgaagcattggtcacgctattaagaataaaaacaccagaaacagcggcagaaatgattaatacaataaaaagctccacggaagaacttattaaatccattccgaactcagtttccctgagagccggttgtgatattttcatgagatttgtcttaagaaatcttcatttatacggtgattgggaaaactgtaaacaacatttgattgaaaatggccagctttttgtatcgagagccaaaaaatcgcgtaacaagattgcagaaataggggtggatttcatagctgatgatgatatcatcttggtacatggttattcgagagcagtattttctttattaaatcatgcagcaaataagtttattaggttcagatgtgtggtgacagaatcaagacctagcaaacaagggaaccagctatatactttacttgaacaaaagggcatacccgtgactcttattgtcgatagcgcggttggagcggtaatcgataaggttgacaaagtgttcgttggtgctgagggtgttgctgaatcaggtggtattataaatctcgtgggtacctattcagtgggtgttttagcacataatgcaagaaaaccattctatgtggtcactgaaagtcacaaatttgttcgtatgtttccattgtcttcagatgatctacctatggccggccctcctttggattttacacgtcgtacggacgatctagaagatgcattgcgtgggcccacgatcgactataccgcccaagaatacattactgcattgattacagatttaggggtcctcactccaagtgctgtttcagaagagttaatcaagatgtggtatgattaa

SEQ ID NO: 77582 - DNA, 822 bp, Saccharomyces pastorianus
atgtcatatttgccgacttattccaacgacttgccagcaggcccgcaaggccagaggaggcgtaataatggtaatgaaaacgatgcaagacaaggctacggccagcaatctgtgccgatggtaatcaggaggcttttcaaaacgccaaagaatttagatctcgagacagccagctgggaaatgttccatttgattttccatccaagaaaagcttatagatcaatatattatcagcgacagacgaaaaatcagtgggcgagagatgatccttcctttttcatcttccaaatagccttaatttcactcagttctattatttggtcgatttataattcaggtttcaacaacgacagtgatatgggggccttgagcattataggtcattttttcaaaagtttggtaatgatggtgattttagattttttcatatttggatttattatggcaactattttttaccttttgttgaataggtcacattttaaattcaaatcgagccaaaatagtgtggtagagtgggcttattgtttcgacgttcattgtaattcatttttaatcatcctactgtgcctatacttcattcagtttttactactgcccataattaatttacaaaactggatttccttactcattggtaattcattatattgttttgctattggccattactttattttaaccttttatggatacaaccagttgccattcttgaaaaatttgaactttatacttttaccaacattaggattatcgataatctatttaatcagtttatttggcatcgacttatccaagaaattaagcttttacaattattaa

SEQ ID NO: 77583 - DNA, 321 bp, Saccharomyces pastorianus
atggcgtattcatcgttatgtttgtgtcttttgttcaacccaaagggctgtagcaatcttcacccgtttgtcgttgataacgagtttccaccttatcgcttatcactagtgctaatcaaacagcaaagaatgcttgatagaaaccgatcctgggcttatctcgctgcatcgtggcggcatccctggactgtaatcagcaagtgttgcttagtatatatatacatccagcgtcagcttgaatttggatgcgttcacagttactgttttttcgattttctcttggttattctttctgagacagtagtaattttgtattactga

SEQ ID NO: 77584 - DNA, 1266 bp, Saccharomyces pastorianus
atgatgagttcgagagtaaccatttttacttcgtgcaacgatgcatatatttatcttttacgtgaagggaattcccaagcgttccctaatgcagtcgggagcaaaatggtcaacttgaacactatcccacccaaaaatggcagggactactacattgcgcttggactcgaaggttctgcaaataaactgggcgttggtatagttaagcatccgcttctgcctaaacatgccaacagcgatctatcttatgattgcgaagctgagatgctttctaatattagagacacatatgtcacacctcctggggagggatttttgcctcgagacacggcaaggcatcacagaaattggtgcataagactcataaaacaagcactggccgaagctgacatcaaaaacccgacactagacattgatgtaatttgctttaccaaaggtcccggcatgggggcccctctgcattcagttgtcatcgccgccagaacgtgctccttactgtgggacgtgccactggtgggagtaaaccactgcattggtcacatcgaaatggggagagaaatcactaaagctcaaaatcctgtggtactgtatgtaagtggtggaaatacacaggttattgcatactcggaaaaaaggtaccgtatctttggtgaaacgcttgatattgctatcggtaattgtcttgatagatttgcaagaactctgaagatacctaatgagccctcgcctggctacaacatcgagcagttagctaaaaaagcccctcacaaagaaaacttggtagaacttccctatacagtaaaggggatggatctttcgatgagtggtatattggcttccatcgatttacttgccaaggatctatttaagggcaataagaaaaataagatcctattcgacaagacaacgggcgagcaaaaagtcactgtagaggatctttgctactctctgcaagagaacctattcgccatgctagttgaaataacagaaagagctatggctcacgttaactccaatcaagttttgatcgtaggcggtgttggttgtaacgtgcgattacaagagatgatggcgcaaatgtgtaaagacagggccaatgggcaagtacatgctacagataataggttttgtatcgataacggagttatgattgcccaagcaggactactagagtatagaatgggtgggatcgtgaaggacttttctgaaactgttgttacgcagaaattcagaaccgatgaagtatacgcagcctggcgtgattaa

SEQ ID NO: 77585 - DNA, 852 bp, Saccharomyces pastorianus
atgtctgaatcatctatttcttcttctaaaccatctgtggaattgccacaagcaacctggtcgcatctgcaaagatacccagctttatccaagtttattaaatatgcggaatctctgccacctgtggagagattgatttccttcaacctcgttgttttgggatctgtgaaccagtgggtttccgaatcgtccagctctcctcgtctggtgaagcaagttgttgctgctgggaaggaaggggccttcaagttggacgagttagttaacctcttggtgttcaaggagggtgtcgacggcttgctgtacaattggaaatcacattccaacacgccagggatctggctggtgtggttcttcgtcgactacgtcgccaacatttctaatactctgttgagggagttcctgatcaagccattgcacttgcaaggttctaccgcatcgaaggagatcggctcttccggtgaggagaacaaggtcactgatgcttcttctttgccccacgtggcagagttgtcttcaacgaccagaggtatgtcgcaggagatccagtccaaggtcaagtcgaactatatcgacccaaccaaggacctggctaaagaaaagtacgacgccatagtgaagcccacaactgacaagttgcagtctgtgtacatcgacccaacaaagactaagcttaacgaaacctaccaacgcttcaccactgtctatgaaaacaatctaagtaaatctgaaagcgtccctaaagccattgtatccaccgggttggacttgggcaatgccaccattgagaagctaaaggcctcaagagaagaccaaaccaattctaagcccgcggctgtgtcgaccaattag

SEQ ID NO: 77586 - DNA, 1254 bp, Saccharomyces pastorianus
atgacagaccctatcagaacgaaacccaagtcgtcgatgcaaatcgacaacgcccctacgcctcacaataccccagcatcgtttctgaatccgagctatgtgaaaaacggcaacccagttaggtcccaggcacaggagcaggatgacaagatcggcaccatcaacgaggaggacatcttggctaaccaacccctgttgttacagtccatccaggacagacttggctcgctggtgggccaggacagcgggtatgtggggggtcttcccaagaacgttaaggaaaagctgctgagcttgaagactttacaaagcgagctattcgaagttgaaaaggaatttcaggtggagatgtttgaactagagaacaagtttctgcagaagtacaagcccatttgggagcagcggtccaggatcatttcaggacaagagcaacccaagccggaacagatcgcaaagggccaagagattgtggagtcactcaatgagacggagttgttggtggacgaagaagagaaggcccaaaatgattccgaggaggaacaggtgaagggaattccctcattctggctaaccgcattagagaacttgcccatcgtttgcgacaccatcactgaccgcgatgcggaagttctggagtacctgcaagatattggtctggaatacttgacggatggtagacccggtttcaagctgttgttcagatttgattcttccgccaacccattcttcaccaacaacattctgtgcaagacctacttctaccagaaggagctgggttactccggggactttatctacgaccacgcagaaggctgcgagatcagttggaaggacaacgcccacaacgtcactgtggacctagaaatgcgcaagcagagaaacaagaccaccaagcaggtgaggaccatcgagaagatcactcccatagaatcctttttcaacttcttcgaccctcccaagatccaaaacgaagaccaagacgaggagttggaggaggacctcgaggaacgtctagctttagactactccatcggggaacaacttaaggacaagctaattcctagagccgtggactggtttaccggcgcagccttggaattcgagttcgaggaggacgaagaagaagcggacgaggacgaagacgaagaagatgatgatgatcacggcttggaggatgacgacggggaatctgccgaagagcaagacgattttgctggcaggccggaacaggctcctgaatgcaagcagtcataa

SEQ ID NO: 77587 - DNA, 876 bp, Saccharomyces pastorianus
atgaatacactattatttaagcgaaaaggtggcaattgtgggaacgaaagtaacatagtttcgcagggatcgccctcaagtagcactcttcctgaatcacctggcactttagatgaaaagaatcttcccagattgcctactccattcgctagaagcctttctaccattcctagttatgagcagatgaaacgtacaaacaaactgccagattatcacctaaagattgttgttgtgggagatggcgctgtagggaagacgtgcctgctgatatcttatgtccaaggaacatttccgactgattatattcctactattttcgaaaattatgtcacaaacatagaaggacccaacggtcaaattatagaattggcattatgggacactgccggccaagaagagtatagtagacttagaccgctttcatatacgaatgcagatgtgctgatggtgtgttattctgttggtagtaagacatcgcttagaaatgtggaagatctctggttcccagaggttaagcatttttgtccttccactccaatcatgctagtcggccttaaatcagatctatatgaagctgataacctttcagatctggtggaaccaagttcagcagaatccttggccaggcgtctgggggcatttgcacatattcaatgctcagcacgattgaaagaaaatatcgatgaagtatttgaaactgccatacacacgttactttccgattcattatatgctcccagagagcctacacatacaatcaaaaatccctttaaaagaaataccaccagatcagatatcgattcttctactggagataccagcgtctctatttccggaacgaaaagattaagaaaaaacaagtgtattataatgtaa

SEQ ID NO: 77588 - DNA, 825 bp, Saccharomyces pastorianus
atggttgagtcaaatgatattataaaaagtgggctggcagagaaagcactaaaggctctaattttacaatgtgaagagaacccatctttaaaaaatgataaggacatacacataatcatcaacatgggcaaaaaaatgggcataaacagggacaacatcccccgtattattccattaacaaagtacaagctatttaaaccaagggacctaaacatactactcattaccaaggatccctctgccttgtatagagaaactttgacgaaagacgagcatacgtcggaattattcaaggaaattataagtgtcaagaacttgagacgtagattcaaagggagtaaactgacccaactttataaagattttgacttggtcgttgccgattacagagttcaccacttacttccggaggttcttggtagcagattttatcacggtagtaaaaaattgccatacatgatccgcatgtcgaaagaagtaaaattgaagcgtcaacaaatggtcgaaaaatgtgaccccatttacgtgagagcacaattgagaagtatatgtaagaatacctcatacattcccaacaatgacaactgcttaagcgtcagggtcggttatattcaaaaacactccataccagaaattttgcaaaacatccaagatacaataaactttctcactgataaaagtaagagaccgcaaggcggcgtcattaaaggaggaataatatctatatttgtcaagaccagtaacagtactagtttgcctatatatcagttttcagaggctaaagaaaatcagaaaaatgaagatctgagtgatattaaattgtaa

SEQ ID NO: 77589 - DNA, 2592 bp, Saccharomyces pastorianus
atgggatatgactcccaagttaggacaaaaaaacgacatcgaattactgtagtatgcacaaattgcaaaaaaaggaaaagtaagtgcgatcgaacgaaaccatgtggaacatgtgtacgactgggagatgtggacagctgtgtctatctcaccgatagctctggacaacctgaaagcagtccttcattgaatgatgctgaccctctgaggaaacaatcaacccctgcggaacgaataagtccaggtttcattaagaaaagaagatcgtcacagacaagacaagacgaagatcactggcaaagagtacgagaacttgaaagtcaatcatcactttattatctaccaattcatgaagaaactccattttttattgacctcatccctaatgggttttatttagagaccaaaaggtctgctgataatttatttggtctgttcacggatagagcaattgaaaatcgtgacccctatctccaagcaatggtaacatttagaagtatcgcaatcaaaaaaatgatgcataaattgggaagcaacggcaataatgtgaaaaatggaagcttgcctaaatctttcgaagctttatccactttcgatgctgatgacgaacgccacattagcgatgatgttgttgataagggcaataacttccgcatgcatcagactattcacaaatcattgtttaacaaattcgctcaatacagagaaaataatgctaaaaaattcagctcagaaactatattagcaaaggattatttgcctcctttaaaaatacttgaaagtgaggttttagcactttttgaagaaaaaatttacaacatgataccgattttcgatatgaaaattttgcgtcatgaaataacgatattttatcaaaatatagtcgagaaagggaatccaatttctataaaacactacgatcatatggttttctgcataatcttgttgattattaaaatatgccgactttctgtccagttttcgaagctaactccatatatatacccggttcttcaagaaattgatacctctaagtttttggctcttgttaaacactatttgttcgagacgaaggtcctcagaaaatgtaatttattacagttgcaatgtctcatattactaaggttcttgcactggtgtgcccctgaagatggcgatggacccgaaactcaatattgtcaaatcttaatggggacaataatatcatcatgtaaagaaatgggcattaactggtattgcttctctcatccagaaaaatattcattcaaaataaaccgacatacgaggccttcatacgatataatgaaacctagcgattacatttcagttttcagaaagatatggagttatgttttattttgggacaggaagatgtgttttattagcggtgaagaatgtcaaattgggaaaaccttgcagtgccatttcaaagaagaagcagatacacccacatggtatatacgaatgttaaccctggataacttgatgaaaaagataaacgatacgttgaacgatgatccaggaaaggtagatttgaacttgttgcaccgactaataaatgatttaaaaagaaactttcatattttaaaaagcctgtcgaaaaacgaaaaagaaacaatgcgtcattttgatttcgaaatggaatggataatagatttattctcactaagtttgctgcacggagaaatgatcttttatgaatatgactgcaatattacaaaattttataagagtttccaagatttgtgggatatggtcattcatatctcagagaagtgctacaattacttttttaacagtgatgccttagaggtggattcattgacaaagttttataccaatagaatcgtggaaattgtcgcaaacaaagttttggtcattgttccggcattcattctcagaggagaccgcttcaaaacaattcagtacgccgacaagaagaaaatgatagaatttctttacggggtctcgtctgtgtattttaacgaatttggctttgagtactatcgttgttttagaaaaatgttcaccgctaaaattgcctacaagatcttgaatcgctcatgtgaaaaagatgcatggagaattattttaaaatttttgctgaatgaattgaaactagaagataatggtgatagttatatagattacaacgatatgagattaaaggacatctgtccaataatactagaatttcaggagacagtacaaaaatatgatgggtataggccagatattctaagtatatggaacaatgagttttatcccataggtaaatacaacgatgatatgacaggatttaagtttcaaatgcgcataaaggaaatgcaagaattcttggatatggagaaatattccgacaggtttaatatttttccatccttttatgatcacgccagttcacaattagctaaacatactgaagttgataccaacataagcattacgaatgaacaagtagctgaaactccgcaaaaagaactactacaacaacctttagcacccgctttgcctgttaatgatttaattgtctcagagtttgacgtgattgaagatatttttgatcctgtggatttcgtatcatttttttaa

SEQ ID NO: 77590 - DNA, 594 bp, Saccharomyces pastorianus
atgtttaccagtgccattagattgtcatcgcaaagactgttcgctagtcaaccttctgtcaccgctgcggcattgcgctcgactgctacaaccttatccttaagatcatattctcagcccgcatcccttcaagactccagtatcttgacatggtctgattttttcaaattgaggaaacagcagcgtaggatcaatgttggttcttcgctgtttactgctctcttgggctgtaacgtttcatgggcttacctttccacaatggaaatagacccgactcaaatgctattcggattcgacccattaactgtaatttcagctgggataatagcctctggtgcactaggctacttgttgggtccgatagttggttcgcaagttttcaaactttcccataaccaacaattggcacagttcaacaacaaaaataaagagtttctaaaacatatcatcaataacagggtcgatgcctcttctcaaagtttcagtaatcctgttccagattattacggtgaaaagataggttccttaaaggaatataagcaatggttaagagattgtcacgcttacgcaaagaaagccaaagaatttttgtga

SEQ ID NO: 77591 - DNA, 1092 bp, Saccharomyces pastorianus
atgactactgctgttaggcttttaccttcactgggcagaaccgcccataagaggtctctctacctgttctccgccgctgctgctgctgctgctgctgctgctgcaacttttgcttactcgcaatcccacaagagatcatcgtcttctcctgggggtggtagtaaccacggatggaacaactgggggaaggcagctgctttggcttccactacaccgctcgttcatgtcgcctctgtcgaaaaagggaggtcatacgaggacttccaaaaggtgtacaatgcgattgcactcaagctgagggaagatgacgaatatgacaactatataggctatgggcccgtattagtccgtcttgcttggcacacttcagggacctgggacaagcacgacaatacaggcgggtcatacggtggtacatacagattcaaaaaggagtttaacgatccatccaatgcgggcttgcagaatggctttaagttcctggagcccattcacaaagagtttccctggatctcctcgggtgatctgttcagtctagggggtgtcactgctgtgcaggaaatgcagggtcccaagattccatggagatgtggtagagtcgacacgccagaggatactacccctgacaacgggagactgcctgacgctgataaggacgctggctatgtcagaacgttttttcaaagacttaatatgaatgacagagaagtagttgctcttatgggggctcacgctctgggcaagacccacttgaagaactctggatacgaagggccatggggagccgctaacaacgtctttaccaatgagttttacttgaacttgttgaatgaagactggaaattggaaaagaacgacgcgaacaacgaacagtgggactctaagagcggctacatgatgctgcccactgattattctttgattcaggatcccaagtacttaagcattgtgaaagaatacgctaatgaccaggacaagttcttcaaggatttttccaaagcttttgaaaaactgttggaaaacggtatcactttccctaaagacgcgcccagtccatttattttcaagactttagaggaacaaggtttatag

SEQ ID NO: 77592 - DNA, 1059 bp, Saccharomyces pastorianus
atgattggcaaacggtttttccaaacaacaagtaaaaagattgcttttgcattcgatattgatggtgtgttgttcaggggcaaaaagccaattgttggtgccagcgacgcattgaagctgttgaaccgaaataaaattccatatattttactcactaatggtggagggttctctgaaagggcacggacagagtttgtctcgagtaaattggacgttgatgtatcacccttgcaaattattcaaagtcatactccttacaagtcccttgttaacaaatattcaaggatcttggccgttggtacaccttccgtgagaggcgttgcagaaggctacggatttcaagatgttgttcaccaaacggatattgtaagatacaatagggacattgcaccatttagtgggctatctgatgaacaagtgatggagtactcaagggatattccagatttaaccactaagaaattcgatgccgtcttggtatttaacgatcctcatgattgggctgccgatatacaaatcatctcagatgcaatcaacagcgaaaatgggatgttaaatactttgagaaacgaaaagagtggcaaaccttccatccccatttacttttcgaaccaggatttactgtgggccaatccttataaattgaatagatttggacaaggtgccttccgcttactagttagaaggctttatctcgagttaaatggtgaacccttgcaagattatactttgggtaagcctacaaagttgacttatgatttcgctcatcatgttctcattgattgggaaaaaagactaagcgggaaaataggccaatctgtgaagcaaaaactgccactcttaggcacgaaaccttcaacttctccattccatgcggtttttatggtaggtgataatcctgcaagtgacatcattggagctcaaaattacggttggaacagttgtttggtgaagacaggtgtgtataacgaaggtgatgacttaaaggaatgtaagcctaccttgatcgtgaatgatgtatttgatgcggttactaaaacgttagaaaagtatgcatga

SEQ ID NO: 77593 - DNA, 321 bp, Saccharomyces pastorianus
atgatcgtctttgatgtatctctaacgatcattattattttttcttttgcttttaacatgagtcaaagcaatattcttatgttatataactcaccccatgtgctcgtgggcagtgacgcacgcaactttttctcttgcaaaaaatggcatcgatgcttttctggggaggtgatattagaggagaagaagtcacagagtgctcttggatcacgatccctcacttgtacttgtccacttatcagcgccgtccagttacatttggagagatctttttttagcctggccttctttgctgtcatactactttatattccgggataa

SEQ ID NO: 77594 - DNA, 468 bp, Saccharomyces pastorianus
atgaattcaactaaaaggctgaaaatgtcaacaacctttcatgattatgacttggaagagccattaacctcaaatgccagaccactaaagaactccgttattacaatccgagtaataaaatctttcccatatagaaacgtcaagaacatagtgctgcacgattacgatcttgctgataaaactgcaaaggacctgttcaatgacgttttgaacaaaattcaaaatgaaggttcattcagaccattccgtaatgttaagtttgatactttaaagatatacacgcacgcacatggttccaagacggttaatctcgtgatcaattttgaccacgacgacgactggactttagacatagagaatgacaaaaaaaagctgttcgagtatggcattgagaatgaaaccgaaatttcgctgttcaacaaagatgattacctaaggtttaaagaaaaccctgaagaaaaatggtga

SEQ ID NO: 77595 - DNA, 924 bp, Saccharomyces pastorianus
atgactagtttggacgatacaataatttcgtaccagaatataatgttactggataacatgaccaactacaacaagcctgcgattgactatttccatcatgaatttaatgatgcaagcttggaaatgtcggcttcatggacactactattgaagatgcgcaaacataaactacttcgattaccaagttgctcttcagaggacgtgctagattacaacatgtacctcgttaggctacatcattgcctctggaggcgttggtccataaatcactatggtttacagaactccaaatccaatccactgtccatcaactggaacaaagaaaccgatgtaacagtgttgtacggtccagatttgactaacatagatagtaatgaaaacgaaatatcgccggtccagaaccaaattgaccagaaacaaacaaaaaatctaaaatctgctttaaagaaaaatacggaatgctgggtaaccgaggaggtggatgagattaacgcttctatagagagcaatgacaacgctttggcgaaattagaagatatttcatgcccatcgtctgttgattctcacacatcttccattttcgaccagcattctacatgcactaaaatttcctccatagatgaagattctgaagaccttatgaacgaaaagaaggaacaattccccaggaagttgaagtttaaccaagccgtgatgaagagggagatcgactcaaagggggctatccacgaatccctcatcaacatgaacgatatccaacattcccgccaccatcgccgtcaccatcgtcgccatcatcaccatcaccatcaaaatagttctcattctgatgaaacaataaaagaagctcattatgagttcagcaactatacatttggcactatggaagaagacattttttataggaaccaggttgttttttaa

SEQ ID NO: 77596 - DNA, 1113 bp, Saccharomyces pastorianus
atgtcgaaacagtgggcgagtggtacaaacggagctttcaaaagacaggtttcgtccttcagagaaacaatctctaagcaacacccaatttataagccagcaaagggaagatattggttgtatgtttcacttgcatgcccatgggcccatagaacactaattacgagggctttgaagggattaacctctgttataggatgtagcgtagtccattggcaccttgacgagaaaggatggagatttttggacatgggaaagcaattggaggacagtgaagattttttggaacattggcacgatgttgcaggtggtattagaactgctaaagaggattccagcaagagcttcgccgagatcaagaatgacagtcaaagattcatggttgatgctaccaatgagcctcactatggatacaagagaatcagtgacttatattacaagagcgatcctcaatactcggcaaggttcaccgtcccagtcctgtgggacttagaaacccaaacaattgttaacaacgaaagtagcgaaattataaggattttgaactctagtgcgttcgatgaatttgtcgacgacgatcacaagaaaacggaccttgttcctgctcagttgaaaacacagatcgatgacttcaattcttgggtttacgacagcatcaacaatggtgtatacaagaccggattcgcagagaaagcagaagtttacgaaagtgaagtcaacaacgtatttgaacatttggacaaagtggagaaaatcctgagtgacaaatattccaaattgaaggccaaatacggtgaagaagatagacaaaaaatcttgggtgagttcttcactgtgggtgatcaattaacagaagctgacattagattgtatactaccgtcataagattcgatcctgtgtacgtccaacatttcaaatgcaattttacctctattagagccggatatccatttattcatttgtgggtaagaaatttatactggaattatgatgccttcaggtacacaacagattttgaccatatcaagttacactacacgcgttcccacacaaggatcaaccccttgggaattacgcccctgggacccaagccagatattcgtcctttataa

SEQ ID NO: 77597 - DNA, 963 bp, Saccharomyces pastorianus
atgtcgaagcctggtcgtactattttagcaagcaaggtcgccgaaactttcaataccgaaataattaacaacgtagaggaatacaagaagacacataatggtcaaggtccccttcttgtgggattcctagctaataatgatcctgctgcaaagatgtatgctacatggactcaaaagactagcgagtcaatggggttccgctatgacttaagggtcattgaagataaggattttttggaagaagcgataatacaagctaacggcgatgactctgtgaacggtatcatggtatactttcctgttttcggtaatgctcaagatcagtatttgcaacaggttgtgtgcaaggaaaaagatgtagaagggttaaatcatgtttactaccaaaacctgtaccataatgtcagatacctggacaaagaaaaccgtttgaaatccattctaccttgcacaccactagctatcgttaagatattggaattcttgaaaatttacaacaatttgttaccagaaggaaacagactgtatgggaagaaatgcatagtaattaacaggtcagaaatcgtcggtagaccactggcggcgctattagccaatgacggtgccacagtatactctgtggacgttaacaacattcaaaaattcacccgtggtgaaagtttgaaattaaacaagcatcatgtggaagaccttggggagtactctgaagatctgttgaaaaagtgttctcttgattcagatgtggtcatcactggtgtccctagtgaaaattacaaattccccaccgaatacatcaaagaaggtgccgtctgcatcaattttgcatgcaccaaaaattttagcgatgatgtcaaggaaaaagcttctctttacgttccaatgactggtaaagttaccattgcaatgttgttgagaaacatgttacgtttagtaaggaacgtagaactgtctaaagaaaaatag

SEQ ID NO: 77598 - DNA, 1035 bp, Saccharomyces pastorianus
atgattagaaccgtaaaacccaagaatgcaagagccaagagagctttggtaaagagggaagccaagttggtagagaatgtcaagcaagcgctattcattccagggcaaagctgtaacaagaatctgcacgatattatggtagatttgagtgccttgaagaagccagatatgaagaggttcaatcgtaagaacgatattcaccctttcgaagacatgtcgccactagagttctttagtgaaaagaatgactgttcattgatggtgctgatgacaagttccaaaaagcgtaaaaacaacatgacctttatacgtacatttggctacaaaatatatgatatgattgaactaatggttgcagataatttcaagttgttatctgattttaagaaattaacatttactgtagggttgaagcctatgtttacattccaaggtgctgcatttgatacacatcccgtatacaagcaaattaaatctttgtttttagatttctttagaggcgaatctactgatttacaggatgttgcgggattacaacatgtcatttccatgaccattcaaggtgacttccaagatggtgagccattgccgaacgttctattccgtgtttacaaattaaaaagttataaaagcgaccaaggtggtaagagattaccacgtattgaattggtggagattgggccacgtctagatttcaaaatcggcagaattcatactccaagtccagatatggtcactgaagctcacaagaagccaaaacaattagaaatgaagacaaagaagaatgtagaattagatatcatgggtgataaattgggtagaatccatatgggcaaacaagatttgggtaaactacaaacaagaaagatgaagggtttgaaatccaaattcgaccaaggaactgaagaaggtgatggagaggtagatgaagactacgaagatgaagcgtcgtattcggatgatggacaagaatacgaagaagagttcgtcagtgccactgatattgagccctctgctaaaagacagaagaaataa

SEQ ID NO: 77599 - DNA, 402 bp, Saccharomyces pastorianus
atggattcaatagatgaacaaattgctataaagcgaaaagaacttcagtcattacaaaagataaccagtttaacggatggcttaaaaattcagctaacagagttgaatgagcagatcaaagaaatgggaatgaatgcggattcagtggcccaattgatgaacaattgggattctataataaacaatatatcgcaagcaagtttgggattattgcaatatgcagagggtgattatgagataggaccgtggaaagattctaagaaaaacgaatctgaacaatcaaatgaaacaggtcttgaagcccaagaaaatgataagaatgatgaagataatgatgaggatgaagatctggtacccttgccggaaacaatggtcagaattagggtagatggtaacgaatga

SEQ ID NO: 77600 - DNA, 588 bp, Saccharomyces pastorianus
atgattggcagaggtgtgtgctgtagatcgttccacactgctggatctgcctggaagcaatttggatttcccaaaacacaagtgacaacgatttacaacaagactaagagcgcatctaactataaagggtatttaaagcacagagacgctccaggaatgtactatcaaccatcagaatccatcgcaaccggatctgttaacagtgagaccattccacgtagctttatggcagccagtgaccctcgtagagggcttgacatgcctgttcaaagcactaaagcgaagcagtgtccaaatgttctcgtaggtaagagcacagtgaacggcaaaacctatcatctggggcctcaagaaattgatgagatccggaagttacgtcttgacaatcctcaaaagtatacacgcaaatttttggctgcaaaatatggcatttcgccattatttgtatccatggtctcgaaacctagtgaacaacatgtacaaattatggaaagtagattgcaagaaatccaatcacgctggaaggagaagaggcgtatagccagagaggaccgtaagcgtagaaaactcctgtggtaccaggcgtga

SEQ ID NO: 77601 - DNA, 3216 bp, Saccharomyces pastorianus
atgggtcattcgggacgtgaggaaaggataaaagacatatttaaggaacttacatcaaaagaactaacgcctgggttgcttttgacactgcagaaagtagcgcaaaagccgaatactaatctagaacagtttattgccagctgtaaagctttgacgaaactcagcagcaacaatccaatcatttttaatgaacttctggagctcctcaagaataaatctgaagaggactcgacaggcccaaaaaaaatcgccccttctataaataagagaaagaaatttaagatccagttagaccttgacgacaatgaagatgagctagattctccagttcaaaaaaaaccagcacctacacggacgttgttcaagagaatagataaactaaaggccaaacagttgaggcagtattcgcccaccgtgaaggatccttctccaaatagtgaacagcaaacacagaatggtcatgctgaaacgaaggactatgaaccgactcaaagcgaagtagttgaagaggacagagaatggtatgataatgatgatgattatggaaatgtggtgcctgaacctctatctgaattgcctgaggaagcgaaactgctacctgtcattaggaatatcgccaacgatgatgccttacgaaataccgttcaattataccccataccactcaagcaaagaatggaatggatccctccttttttatcaaagtttgctcttgaaaacaaagtgcccacttccataattatcgggtccatctctgagacgtccagccaagtatccgctttatcaatggtgaatccatttaggaatcctgacagtgaattttctgcgaacgccaaacgaggtagtaagctggttgccttgagaaggataaacatggaacatattcaacaatctcgagacaacaccactgttttgaacactgccatgggggaagtactaggcttggagaataacaataaagcaaaagataagagcaaccaaaagatttgcgacgatacagctcttttcacgccatcaaaagatgacattaaacatactaaagagcaactgcctgttttccgctgcagatctcaattgttatcattgataagagaaaatcaagtagtggtgataattggtgaaacgggctcaggtaaaaccacgcaacttgcacagtatttatatgaagaaggatatgccaacgatagggggaaatctattgttgtcacacagccgagaagagtagcagccatgtccgttgcaaaaagggttgcaatagaaatgcaagttccattgggtaaggaagtaggctattctataaggtttgaagatgtgacggattctgagtgtacaaaacttaagtttgtaacggatggtattctactcagagagaccttattggatgatacactcgataaatattcgtgtgttattattgatgaagctcatgaaaggtcattaaatacagacattttactaggttttttcaagattttattagcacgtagaagagatctaaaactcataatcacttcagcaacaatgaatgcgaagaagttctccgcattttttggtaatgctcctcagttcacaattcctggaagaactttccccgtacagaccatatatacttccaaccctgttcaagactacgtagaagctgcagtttctcaggctgtgaaaattcatttagcaaacgattgttcaagcggtgatattctcattttcatgacaggtcaagaagatattgaaacaacgttcgacactctgcaagaaaagtttttgcaagtatattccaaaaagtttggtaccgcaaactttgaagagatcaatgatattgaaattttaccaatctactcggctttacctgcagatttgcaattcaaaatttttcaggatctacatggcactaaaaggaaaattataattgcgacaaatattgcagagacttcattgaccattaaaggtattagatatgtcattgattgtggttactctaaactgaaagtttacaatccaaagattgggcttgatagtttagtaataacgcccatatcaaaagctaacgccgaccaaagatccggaagagcgggaagaactgcgccaggcactgcatatcgattatacacggaagatacattcaaagaagatatgtacttacagacaatacctgagatccaaagaacgaatttgtcaaacacccttttactgctaaaatctctggacgttactgacgaattgagtaagttcccgttcattgataaaccacccttacaaacatttttatcctcattgtatgagttatggttcataggggctatagacactaggggacaattgactccattgggattacagatggcaaaatttcccctgcaaccttccctttccaaaattttattaattgcagttagaaacggctgcagtgatgaaatgttaacaatagtttccatgctttctgttccacaagtcttttatagacccaaggaaagacagaaagaagcagatattgctagaaataaattttttatcgcgaaatcagatcacttaacgttacttaatgtttttgaacaatggagggcaaataattttagttcgcattggtgtaacaaacattttgttcaatacaaatcacttgtcagggcaagagacattcgagaccagttgctaacaatactaaaatctcaaaaaattccggtcatttcctccggtaaggactgggagattattaaaaaatgtatttgttcaggatttgctcatcaagcagccaaaataacaggactacgaaattacgttcatttaaaaactggcgtaagtgttcaactacaccctacaagtgcattacacggattgggggatttacccccttacgtggtatatcatgaattattaatgactagcaaagaatacatttgttgtgttacttctgtagatccattctggttaatggaatatggtgggttactctacgacatcaagcgtattaaaaatgatcaggaggccacaactacaggcctctttggtgaacactatgaacatactctggacaaggttgaagatgatattgatatcaatattaggagatgtaaggatatgagagacagtgtgatacaggagctcaaaatgaccgacaattcaaacaaagaagacaaaaagcaaaaaacgaaaaagcaaaatatactgaacggcaaagaaaattcaatgaaacctttcaaaagaaggaagccttttttttag

SEQ ID NO: 77602 - DNA, 1014 bp, Saccharomyces pastorianus
atgagtcagtcttacgaagcaggaaatgccaatatgggccaaggggaggatgatgaatttgatggctatttcgaagactttgacaacgatatcatgccaaatagtaataatggacaaagggttggtactaatgctggattgtcattcaatgacgaagtaaatgttaatgatgatgattttttagacatttataatatgtcccctagagagagattggtgcataatatcaggaagaatgttcaaaaattacagttttatttttattcactacgcttatggcaacagattatcattgtcctcctcggcataatgctaatgataatgggtatattgttgctcgtcttccataatgcgattttacataaagttgttgttacttcgaacgatttgagagaaaagatgtcaacacattttatattaatggttctgatattctttgtcgcatttcctcctatgattggctactccttattatccaccactactgggttgatctatggtgtcagttttgagggatgggttacgctagctttgggatctgtaacaggttccattgcctctttcgttgtgttcaagacgatcttgcattcaagagcagaaaaacttgtgcatttgaatagaagatttgaagcattggcttcaattttacaagaaaacaatagctattggattctagctctactgagattatgtcccttcccatattctttgactaatggtgccatagctggtgtttacggtatctcggtacgcaacttttccattgccaacataataaccacaccaaagctgttcatctatctatttataggttctcgtgtaaagagtctcgcagaatctgaatctacaggatctagggtatttgacttggtaagcattattatcacattattaatcctaagtcttacagcatggctcttatacttcaagactaagaagagatatttagaactacaaaaccgcgaccgtcaagtgtccactgatcaactacctgaattgtcttttgaggtctaa

SEQ ID NO: 77603 - DNA, 2721 bp, Saccharomyces pastorianus
atgagcagcaaaatatcagatcttacatctacacaaaataagcccctccttgttacgcaacaactaatcgaaaaatattacgaacagatcctgggcacttcccagaacataattcctattttaaatacgaagaacaagtttattaggcccagtaaggataattcagatgttgaaagggtggaggaggatgctggtaaaagactgcaaactggcaagaacaaggtaaatttcaacctggatactggaaacgaggataaacttgacgatgaccaagagacagtaacagaaaatgaaaataatgatatcgagatggttgagacagacgaaggcgaagatgaaaggcaagggtcatctttagccagtaaatgcaaatcatttctttacaacgtttttgtgggaaactatgaaagagacattcttattgacaaagtctgttcacaaaagcaacatgcgatgtcatttgaagaatggtgttctgcgggcgccagattggatgacctcactgggaaaacagaatggaagcagaaattggaaagtcccttgtatgattacaagctaataaaagatttaacatctagaatgcgtgaggagcgcttgaataggaattacgctcaattgttgtacatcattaggacgaattgggtacgaaacctgggaaatatggggaatgtaaacctgtataggcactcccatgtaggcaccaaatatttaattgacgagtatatgatggagtctaggttagcgctagaatctttaatggagtctgatcttgatgatagttaccttttgggtatactgcaacaaacgagaagaaatattggtcgtaccgctttagttctcagtgggggtggaacttttggtcttttccacatcggtgtccttggtactctatttgaattggatttattacccagagtgattagtggtagcagtgctggtgcaattgtagccagcatattatctgtccatcacaaagaagaaattccggttttactaaatcatattttggataaagaattcaacattttcaaagacgataaacagaaaagtgaaagcgagaatttgttaataaaaatatctaggttcttcaaaaacggtacgtggtttgataacaagcatctggtaaatacaatgatagaatttttgggagatttgacatttagggaagcttacaatagaacgggtaaaattttgaatataaccgtttcgccggcatctttatttgaacaaccgcgcttgctgaataatttgactgcaccaaacgtcctgatttggtccgccgtatgtgcatcatgttcactaccgggaattttcccctcgagcccactttacgaaaaagatccaaaaacgggagaaaggaaaccatggactggtagtagttcggtcaaatttgtcgatggttctgtggacaatgacttgcccatttctcgtctttctgaaatgttcaatgtggaccatattatcgcatgccaggtgaatattcacgtatttccctttttgaaactatcactatcctgtgttggcggggaaattgaggacgaatttagtgcaagattaaagcaaaacttatcaagtatatacaattttatggccaatgaagctattcatattctagaaattggaagtgagatgggaattgccaaaaacgcgcttacaaaactgagatcggtattatctcaacaatattctggtgacatcactattttgcccgacatgtgtatgctttttagaataaaggagctgttgtcaaacccaacaaaagaatttttattaagggaaatcaccaatggtgcaaaagctacgtggcccaaggtttccattattcaaaatcactgtggccaggaatttgctctggataaggcgatttcttatatcaaaggtaggatgattgtcacctcctctttaaaaacccccttccaatttgctgattcagtcattggattaattaaagctccagagcaaacgtcagatgagtccaaaaacccagaaaattcaacattgctaactaggactccaaccaagggtgacaatcatatttccaatgttttagatgacaacttattagaatcagaatcgacaaactctttgctattgttacgtgagaatgcaagcacatatgggcggtcaccttccgggtttagaccgcggtattccattacgtccgcttccctcaatccgcgtcaccaaagaaggaaatcagatactatttcaacttcaaggcgaccagccaaatccttttcattttcagttgcttctcccacatcaaggatgttgaggcaatccagcaaaatcaatggacacccaccaccaattctgcagaaaaaaacaagtatgggccggctaatgtttcctatggatgccaagacctatgacccggaaagccatgaacttatcccacattctgccagcattgaaacacctgccatggtagacaagaaattgcattttggccgaaagagtagatacttgaggcatatgaacaaaaaatgggtcagcagtagcaacatattatacacagattcggataaagaagaccatcctacattgagactgataagtaacttcgattcagacgcaatgattcatagtgatttagcgggcaatttcaggcgtcatagcattgatggaagacccccttctcaagctacaaagagctcaccgtttcgatcgaggccttcttcttcaacgcagcacaaaagcaccaccagttttactcaataa

SEQ ID NO: 77604 - DNA, 2121 bp, Saccharomyces pastorianus
atgtataactcaatctacgggtcccccttccctaaaataaatccgaaggtccgctacaaaactgctctagaaagagcagggtttgacactaagccgcgtaatccgttcagtagtcagaggaatgcttccactggaagtttacaagcttctgtgaagtcgccgccaataacccgtcaaagaaatgtatctgctgccccatctgttccggtcacgatgaagagtgcgtatacggcgtcttcaaagagtgcttattcatctgtaaagggcgagtctgacatttatccgcctcccgtattggagaatagcgagaggcggagtgtaactcctccaaagaatagcaattttacgtcttcgagacccagtgacatatctcgttctatttccaggcccagcgagcgtgcttcgcaagaggatcctttccgttttgaacgcgacttagaccgtcaggcggaacaatatgctgcctctaggcatacatgtaaatcacctgctgacaaggaattccaagccgcagataacttccccttcaacttcgaacaagaagatgctggtaatactgaaagggaacaagatttgagccgtattgaaagaagtttcatgatgctgactcaaaatgacactgcaagcgttgtaaattctatgaaccaaaccgataacagaggtgtgctcgaccaaaaactcggaaaagaacagcaaaaagaggaaagttcaatcgaatatggaagtgaaggacagcaggaggatgagaatgatattgaaagcctaaattttgaaccagatcctaaactacaggtgaatcttgaaaatgaaccacttcaagatgattttccagaagcaaaacaagaggaaaagaatacagaacctaaaattccggaaattaatgttacgagggaaagtaatacaccatctttaaccatgaacgcactagactctaaaatatatcctgatgataacttttctggcctggaatcttcaaaggaacagaaatcacctggtgtgtcatcatcgtcaacaaaagttgaagatttaagtcttgatgggttaaatgagaaacgtctttcaataacttcttcagaaaacgtggaaacaccatacactgctacgaacctccaagtcgaacaattgattgctcaattagacgatgtttccctatctagaaacgcaaagctcgatatgaacggcaattgcctcaacgcagtggacagaaaggcttctagattcaaaaagtcaagcgcatatttatctgggtatcccagcatggatatacctgtaacgcagcaaacatctattgtgcaaaacagcaatacgaacttatccagacaaactattctggtagataaaggcgatgttgatgaagacgcgccatctgaatctacaactaatggtggcacacccattttttacaagtttaaacagtcgaacgtagaatactccaataatgaagggataggttcgcaagaaactttcagaacgaaacttcccacaattgaagcactacaactgcaacataagcgcaacataacagatttgagagaagaaattgataattccaaatctaatgactctcatgtattatctaacggcggcactacgagatacagctctgatgcagattataaagaaacggagcccattgagtttaaatatccgcctggggagggaccttgcagagcatgcggcttggaagtcacagggaaaagaatgttttccaaaaaggaaaacgaactgtcgggtcaatggcatcgtgaatgttttaaatgcattgaatgtggtatcaaattcaataaacatgttccctgttatattctaggcgatgaaccatattgtcaaaagcactatcacgaggagaatcacagtatttgtaaggtttgttcaaatttcatagagggtgaatgtctggaaaatgataaggtggaacgattccacgtggattgtctaaactgtttcttatgcaagactgccattactaatgattattatatattcaatggtgaaattccattgtgcggtaatcacgacatggaagctctcttgaaggaaggtatcgacaatgctacatcaagcaatgataagaacaatactctctctaaaaggagaacgaggctcatcaacttcaactag

SEQ ID NO: 77605 - DNA, 1806 bp, Saccharomyces pastorianus
atgctcaaccatcccagccaaggctcagatgatgctcaggacgaaaagcaaggcgacttcccggtcatcgaagaggagaagacccaggctgtaacgctgaaggattcgtatgttagcgacgacgtcgccaactccacggaacgctacaacttgtccccttctccggaggacgaagacttcgaagcccccactgaagaagaaatgcagactttaaggcacgttggtggtaaaattcctatgaggtgttggttaattgctattgtagagctttccgagagattctcctactacgggctttccgcaccattccaaaactacatggaatatggacctaatgactccccaaagggtgttctgagcttgaacagtcagggtgccactgggttgtcgtattttttccagttttggtgttacgttacaccagttttcggtggttacgtcgcggacaccttctggggtaaatataatacaatttgttgcggtaccgctatttacattgccggtattttcattctatttatcacttcgattccctccgttggtaacagagacagtgctattggtgggttcattgctgccattattctgatcggtattgccactggtatgattaaagctaacctgtccgtgttgattgccgaccagcttcctaagcggaaaccctccatcaaagtcttaaaatcgggcgaaagagtcattgtcgattcaaatattactttacaaaacgtttttatgttcttctatttcatgatcaatgtcggttctctatcattaatggccactactgaattggaatatcataaggggttctgggcggcctatctattgcccttctgcttcttttggatcgctgttgtcactttgatttttggtaaaaagcaatacattcaaagaccagtcggagataaagtcatcgctaaaagttttaaagtttgttggattttaactaagaataagttcgacttcaacgctgctaaaccttctgttcatccagaaaagaactatccatggaatgacaaatttgttgatgaaatcaagagagctttggcggcttgtaaagtctttatattctacccaatttattggacccaatacggtaccatgatttccagtttcatcactcaggccagtatgatggaattacatggaattcccaacgatttcttacaagcattcgattccattgcattgatcattttcatcccaatttttgaaaaattcgtatatcctttcattagaagatacactccactaaaaccaattacaaaaattttcttcggtttcatgtttggatcttttgccatgacatgggctgctgttctacaaagtttcgtttacaaggctggtccatggtataatgaacctctgggtcacaacaccccaaatcatgtccacgtttgctggcaaatacccgcatatgtcttgatttctttttcagagatctttgcctctatcactgggttggaatacgcttattccaaagccccagcttccatgaaatcgtttattatgtccattttcttattgactaacgcctttggttctgcaatcggttgtgcattgtccccagtgaccgttgatcctaaatttacatggttattcactggtttggctgttgcctgctttatttctggttgtttgttctggttgtgcttcaggaagtataatgatacagaggaagaaatgaacgctatggactacgaagaagaagacgaatttgatctcaatccaatttccgcacctaaagctaacgatattgaaatattagaaccaatggaaagtctaagatccaccaccaaatattag

SEQ ID NO: 77606 - DNA, 3585 bp, Saccharomyces pastorianus
atgccagaaacctctgttcagaatccattaaggctttctgaaaatgaaaatactcgttcgatgtttctgtctgcatcacagcagcagcggccatctgccactccatccttccctaggttggtacggaataccacagcaaatttgagtttatcagattttcaagtgttaaatccgtcttctaaaaggcaaaattcaaactcggtttacgatgatataaatagtagtaagaggcgaataagtagacctagattttcagatatcgaaggaaaaaataatgaccatacttacccagaaagaacaacagtcaaggaatcagagaaaaatccttctcccagatatgtgagtagttcgaaaagggccctgaaaagggaaaactcagttggaattactcaatcctctgcattgatttcgaaatcatttagtgaaaacggcggaagcattgcacatgagaaatggagcccggaaaatatgataaaaccactgaacgtttcacagaattcgctagctttcgtggatgcagggtcagatgaacagtccaagagtgaaattgtaggcggtttccagcgtaaatctaataatagtcaagaaatcaaagacaaggataacagtgcccgagatcaggatttcaataacagtggcaacaacaacaacaataacaatcacagtagcaataacaatgacaataacaataataacaacgacgacaacaacgacaacaacagcaacagccgtgataataataataatagtgatgatagtaatgaaagggaagaaaatgattcctgcaagccagcaagtaataagaggtcgggcattgctctaatacaaaaattacaagaattgtacaaagtgatagttaagcaagaaattgaattgcaggagcggtgctcacaactaacaaactctcaaaccaccgaactaaaaagcttgtggactatctataaaatcaatacagatcttgttaacaattatgtcacttttatcactacagctttactaccatcccaaccgcctcacgatttggtcatcggccaagaaattgtcgaaatatataggatcgaaagaaggctatgggtttacggcacgataacatttctagacgttctaaagagcttttctaacttcatggatcctgaagtttgctgccaatttatcactcacgtctttgtttcattatcaactatgatttctgacataccgtccaaatattctatcacttggttacaaagactaggggacttatcaagaatggctatagcactatatccctcgagttttatcgattggaaactgagtgctgagcactggtatactgaggcgatgaaatacatatacaatcatggaaagctatattatcatatgtctaccgtacagcaaaacactcttgaagcttttgtaaatttgggaaaaagcgtcttttgtcaggaaacattcactccgtctccacaatatatgcaattggttattgataacatttatcaaagagcctttgtagaaagaaataatggcaatcttagaaactctttattaattgagtatttgaaacatagtgaagccatgctattacccagttttttagaaagtccagatttacaaaatgtggtgttgagctatttcattgaaaagttcggtatagatgcaaacggttgtaacatttttaacgcagaagatatgtttgttcagaatcctgattttttcaagtatttcttcaggcatggcccctcttttgcacaatcgcatattttacaaattgttggatttggagagccaaaaaacccatttgcaattttatttgaattgccgaagtatttgaaggagaggaaagacaagaaggaacgtaaaaaatcttcaaataatgactcttccgtgacggaaagttcaacgggcaatagccgaaatgacaacgaagatgacgatgaaataatgagttctaccacttccatatctgatcacgatctcttagcagaattcttcaatgacatcgataccttaaggcgtccgatactgccttcaatgctaacaaacgaagcatggttggaaacattaaagttcctaaatatgacttcattaaaatgcggcataatagtgcttcagaagtttctacatgggcctttaggaatcgcattaccccatatcttaccatggatatactttatcatctcaatttgtttgaaaagcagccaattgagtgatccagttagtaaagaattctggatgattattgttaagagagcttttccatgggatacaatggttacctttatgaacgttttgattgtgtatttattggataaccaaacatcgaactctattattggagatttatgcgatgaatacgataaattaagcctttctgaacttttagaattattcaatgaaggcgaagaattaccagaaattttgggctgttggggaacattgtggtttgacacaatttgcgaaaagaatacgcattcgattagtagtgaagataattttcaagaaatcggtataaaagattatatggcattggattcgccgacagatggaattatatttgatgaaaaggacgaaaatggtgaaaaattctggaaaagggcatgcagaaccatatttctttttagagagctgtcaagaagttttccaataggcgtaataatcagaaacgatccgttgatatatcgttcatcatttcaaaatactaatatattgggaagtttagtcttcaaactcgaacccttgtgcaatatacacaacaatataccagtattaggtgccctggaaagtattattgacatatctgaggcaagaagtgaaaacaacactgatctgcacgctgtgccggaactaagtgtcaacgagggtgataatatcttccactatgttggctacaagaaacttcgtgccgattatacgtgcttcgataaaaatggagaatttttaagcgcctcgctttacactacatggtatgtcccgaacagcaacaacactaacatagaggacaacatcaattataacagcgaaaaggaaaatgaaggtctatttctggaatgtataaaatctgattatccagaaatagattttaaaaccacatactttgtctttgatgcaacttcttggctaagacattccgcacgcatattcaagctagctcaaaacagactgctaagatttgccatttgtttaaccacattccaagagttgagatttttacgaaagtcaaaggacgaaaacgtcatggaggctgccacaagaggtataataactataaggcagctttactatgagaataaagtattacccctaagattcacaggtaatgtagcgacacacatcgaagagaacttagaatttgaagaacaaataacatggaggacacatgtcgacgagtttgtcatcgaatccgtaatgaaggcgcaagaaaaactagagagtgccagcgaaccgcgtctttcccctcgccgctttaactacgtagttctgatatctgacgacgacgccatgaagaaaaaagcagaagaaaaagaaataaaaacgctaagcacacgatttgtgttttctttgtgcacaaaacttggcgaacagcgccatctgtgtacagactga

SEQ ID NO: 77607 - DNA, 2154 bp, Saccharomyces pastorianus
atgttattaaacccagatcaaattctaaacctagttcgaaaagtatatgaagtagatattaaacagttttattcgcaattacggctaaagaacttaagaggattgttagaccatgctgctcatctgtttaatgtttacctgagggatttagaaatcaatcaggaaatggaagctttgacagcatttattattggttgttattatctgtaccttattattccacaatcgttacaattccaaacaagaaataatctctacagcagttacgcaaagctaaaaaacgactatcaagacgaacacgtgatgggttatgtgttaaaagtggtaagagatgaaagtactgttattgttgaccggtatttagcggagtcaaacggaatttgcaggaccataaaaagaaaaagagcctactccttaccgctacggcctttacctgttcatatggcctctttgtcaatacataacaagtttgatggctcactacatgaaataccgaatgagctaacaaaaccaacaaatgataattcgaaagaggacatagtcagggaaagtaatcagatagcatcaagtaataaattggaagctggttctgaagtggcgtactacacaagcaaagaagcattatcaaaaccctcgtatttaaaactcagtactggaaaggatgcattattcaaaacgctgtctagtccagcaactgctccccccgtgcactccttggaggtttcgtcacaaatcagagattctagccaagattcctcatcttctctatccaaggtggaaaaaccaaaggaggaagaaggaaagatcgaggccatagaatcttcggccccgaaagcttacaatctaccagtaattgaagattctaatgatctgttatcagagttatctattactggcctgcaaaatccatgcaatacatgctatattaatagtataattcaatgtctgtttggcactaccttatttcgggatttgtttttaaccaagaaatataggctattcctcaatactaacaaatatccgaaagaagtccaactttcccgctcgatttacgttttgttcaaaaaaatgtatttgaatggaggaagagcgattataccaaatagattcttaaaaatgtgcaagaagttaaggccagatttgaacatcccagatgatcaacaggatacacaggagtttctactaatagttttagcacgaatacatgaagagctctcgaacgaaaatgttgtcaagtattatccagatctagtgtcatatgatgcgaatgctttacaagttaacccatccaaatacgagaagtggtacgagagaaatggtattactgatggtttatctccaattgatcacatatatcgagggcagttggagaacattttgaaatgccagcgctgtggtaattcttcttatagctattctaccttctatgttctgtcacttgcgattccaaaactatcattgtatagctttacaagtaagtcgagaaaaattaaattagaggattgcataaacttatttacaggcgatgaagaactgtctggcgacaatgcttgggattgtcctaattgtagaattactgattctaaatccaaaaaagaagaaattactagccagaagaaaaaatcaaccatatttggttttcattccagatcaaggtcaaaatcaccccaccatcatcaccatcatcaccatagcagcgatgattcaacaaaaaatgcaaagaagcgaaattctaaaaagttaaccacgattaagagtttagactttatagttttacctccgatacttgtcattcatttatcaaggttctattatgatttaacaaaaaaaaacagcactgtaataacctatcctttgatattgaacattattttaaagaacggtaaagtgattcgatacaagttatacggaacggtgaatcattccggtaaccttatcaatggacactatacttctgttgtgaacaaagaaaagagccatgaaattggactgaatagacaagtttgggttacatttgatgacgattatatacagcaacatcgcaaggatcgcaacaactttgaagccggcaaaacagaaatgtctagcgatgaggtatacgtcttattctacgaaagaatggatgaagagaactatgaagaagaattctgttaa

SEQ ID NO: 77608 - DNA, 2436 bp, Saccharomyces pastorianus
atgtcgaatataagtaccaaagatatacgaaaaagtaagccaaaaagaggatccggcttcgatttacttgaagtgactgaatcacttggctatcagacacacaggaaaaatggaagaaactcatggtcaaaggacgacgataatatgctacgatcgctagtaaacgaatccgcaaaggagttaggctatgagaatggacttgaagacgtaaaaacaattcaacaatccaaccatctttctaaatgtattgcttgggatgttttagctacacgattcaaacacaccgtaagaacttcaaaggatgtaagaaagcgttggacaggatctctggacccaaacttgaagaaaggtaaatggacacaagaagaggatgagcagctcttgaaagcttatgaagaacatgggcctcactggctgagtatctccatggatatccctggaagaacagaggatcaatgtgcgaaaaggtacattgaagtgttgggacctggaagtaaaggtagattaagagaatggacgctcgaggaagatttaaatctgataagtaaagtgaaggcatacggcacgaaatggagaaagatttcgtcggaaatggaattcagaccaagtttaacgtgcaggaacagatggcggaaaattattactatggttgtgcgaggacaagcatcagaagtaataacaaaggctataaaagaaaacaagaacatagacatgacagacggaaaactccgacaacatccaatcgccgattctgatatacgctcagattctacaccgaataaagaagaacagttgcagctatctcaacagaacaacccttcattgataaagcaggatatattgaatgttaaagagaacgaatcgagcaaactaccaagattaaaggataatgatggacccattttaaatgacagcaagccacaagcattacctcccttaaaagagatatctgcacctccaccaatcaggatgacgcaagtcggtcagactcacaccagtggtagcattaggagcaaagtatctttaccaattgaaggtctttctcaaatgaacaagcaaagtcctggaggaatctcagatagcccacagacaagccttcccccagcattcaatccagcatctctcgatgagcatatgatgaatagtaatagtatttcagattctccgaagcatgcctattctactgtgaaaactagagaaccaaattcctctagcacacaatggaaatttacattaaaagatggtcaaggtttgtcaatttctaacggaactattgacagcacaaaattagtaaaagaattggttgaccaagctaagaagtactctttaaaaatttcgatacatcaacatattcacaatcattatgttacatccacagaccatcctgtcagcagcaatactggattgtcaaatataggaaatataaatggaaaccctctattaatggatagtttcccacatatgggtagacaactgggaaatggtcttccagggttaaattcaaatagtgacacttttaacccagaatataggacttctctggacaacatggatagcgattttttatcaagaacacccaactataacgcattcagcttggaagcaacttcacacaatcccgctgacaatgcaaatgaacttggttcacaaagcaatagagaaacaaacagcccgtctgtattttatcctcaagcaaatacattgatcccaactaattctaccgctacaaataatgaaatcattcaaggaaacgttagtgctaatagtatgtcaccgaatttcaatggaacaaatggcaaggcaccaagttcgacggcatcatatacaacgagcggttcagaaatgccacctgatgtaggtcctaatagaatagcgcatttcaactatttgccaccaactatacggcctcatttaggctcatcagatgcgacaagaggtgctgacttgaataagttactcaatccatctccaaattcagtaagaagtaacggcagtaaaactaagaaaaaagaaaaaagaaaaagtgaatcatctcagcatcattctacatcatctgtgacaaccaataaattcaatcacattgatcagtcggagatatcaaggactacatccagatctgatactccattgagagatgaagacggcctggatttttgggaaacgttaagatccttggctactacgaatccaaatcctccagttgaaaagtcagctgaaaatgatggtgccaagcctcaagtggtacatcaagggattggctcacatacagaagatagcagcctaggttcccatagcggaggatacgatttttttaacgaactgttggataaaaaggcagatacactgcataatgaggctaagaagacgagcgagcatgatatgacgtcaggaggttctaccgataatgggtcagtcctgccactgaatcctagttga

SEQ ID NO: 77609 - DNA, 2037 bp, Saccharomyces pastorianus
atgagaacaataatgtcaataatcacacgtcgttataagcagctgaaaaattataagataatatcaaaaaaaatgctacagatcaactccaggcttgcagttattgatggatggctggtagacactgtgaagcgaaaaccaataaattttcggagtcctgaagtaagattactgttacccaatgacgatgactacaaaaagctatcacaacaaaacttggtggactggacgcgattaaagaaggattctaattcggtgctcgttggagtgaaatctatggaactatttaaacacataaagctagttttgcgagagtttttcttgttagaagatggaagaataatcctgaagaggatcagacgcaaattacgttacaaagttgtcaagaaattaacttgtaaatgctgcaggttatatttaccaaaatggggcaccgtgtacatacatccgatgctaaaagataaagaaaagcccttagcgggggtatgtgaattttcattggatgtaaaccctgatcgggagtatccccttattgagatcaatgttagtcatcaatacattataattgagggcttccttctatacttaaatgaaaggaggctctataggtggaacgataacaatttgaggggtcaggttggcttaacaaaatgggcccatttaagaaaaacttacaatccggtaagccttgacatactttatagtttgaattcaaatttttattttgtaaaggatgatctgctatttcaattattaggaaagagggtatttgttaaattttgtaaagtaatggaaaatggaaaatgcggtaaggctccactgtggtatcgtgtgaagagaacgacaactgccaaagcaacacatattgcatatgccatatcaaattcaacagccccagattcattcaaaagtaaaaataacgattataggtttattgtcagggaaaagccaattgtggagaatactatctccaacctggattattcagacataaaaaaacagcagtttactgaagcagaggttgtaaaaagaaagatctcagcagatatttctcaaatagagaatgtgcatacgcaatttaatagtcaaaaggaaaaaaataatatcagggtgaataaggtttctagcgaggtcctagatcaaatttcgaaatttcctgtgtccagagtcaccttactgttgatgtctgctggtcaagataaaaattatattgaacttgttgaagaattggcaagaaggttggaaaaaatatgcatagaaaaaaccacacaatctttagaagagataagggatacttttcaggcgaatcctgagatgcaggctagatttgataaggaatattaccagagcattgaagaatataaaattacactcgaacttattaaggaagaccttttgattactctgataaaacaaatggaaaatatgtgggcagctgaaaaaaagtttagtacagaggaggagtatgtttcgccgaggtttttagtagcagatggatttctaatcgacctagcagaggaaaaaccgattaacccaaaggatccgcgcttactgacactgctaaaagatcatcagcgtgccatgattgaccaaatgaatttagttaagtggaatgacttcaaaaaatatcaagatcctatcccgctgaaagccaaaaccttatttaaattttgtaaacaaataaagaaaaaattcctacgaggtgcggacttcaagttacatagattacctacagaagcaaatttaaagtatgagccggagcggatgacagttttgtgttcctgtgtccctattcttttggatgaccaaactgtccaatatctgtatgatgacagcattattcctgaatttgaagcaacatcttcatatgcaacaaagcagtcaaagtgtgggcggaaaatgtctttgcaaatggagcctgacctcctttttcaagaggccattagacggatgcgacatttaactgcttatgacgttttgagaagaaactatattgcggcatttgaggagctatatatgggaaactgtaacgattaa

SEQ ID NO: 77610 - DNA, 975 bp, Saccharomyces pastorianus
atgaagcgcattccaatcaaagaactaatagttgagcaccccggaaaagttcttatccttgatggtggacagggtacagaattggaaaacagaggcattaacataaatagtccggtatggtctgcagctccttttacgagcgaatccttttgggagccatcttctcaagagcgaaaggtggtagaagaaatgtacagagactttatgattgctggcgcaaacatattaatgacaattacttaccaggcaaactttcaaagcatatctgagaatacctcgattaaaactctggctgcttacaagcgttttctcgataaaatcgtgtcatttactcgtgaatttattggtgaggaaaggtacttaatcgggagtattggcccatgggcagcacatgtatcctgtgaatatactggtgactatggtccccatcctgagaatattgattactacggctttttcaaaccccagctggagaacttcaaccaaaatagagatatcgatcttattggttttgaaacgattccaaattttcatgagttaaaggctattttatcctgggatgaagatattatttcgaagcccttttatattgggttgtcggtggatgacaatagtttgctgcgagacggtaccactttggaagaaatttctgtccatataaaaggcctcggaaataaaattaacaagaatctcttattaatgggagttaactgtgtcagtttcaatcaatcggcattaattcttaaaatgttgcacgagcatctacctggcatgcctctgctagtttacccaaacagtggagaaatctacaatcccaaagagaagacatggcaccggccgactaataagttggatgactgggagaccacggttaagaaattcgttgataatggtgcgcgcattattggcggttgttgtagaacgtctcctaaagatatcgccgaaattgcatcagctgtagataaatactcctaa

SEQ ID NO: 77611 - DNA, 1728 bp, Saccharomyces pastorianus
atgacggaaattgaatttgggcaaccccttcccagcaatctagactatgctgtttcttttggcattcctacatgggattcggcaataggctatgcggaaaaggtgccagaggtaataggcaaaatggctacaggatatccgaggtactttcctcaaccccccgtccagaggctttgtgcttactttgttaagaaatttgggcgaggttcagaaaactgtcgtccttttccatccgttaacctgggtttaaagtgtttggagtacgtaaaatctgtctcaggacctgaaagtaaagctcaccttgaagtggaaacagttacgattaaaaaccatggggcaaaaacgtcgaaagaaccggcggaattggtgctaaccattgctgctgtccttgcatcggaggaagagttcgagattgtgaaagagtattggaaattaagaggtgaatgtgtatctagtcgattggcgttgtctgtcaaccaacttcttgactgcgctaatcatggctcagagcaggtattgcgtgagctagaggctggtgtttttgcagcaaagaagggggaggagaaagcaaagaacctgataaagggaaggatagttgagaatcgcttcaggccctttggtttggagaagaaaaccccgaattgggagggactcaacctcaacccaaatgaagacgtgtatcttgtatcaagtggcatgtctgcaatatccacggctcgtaatttactcaccttttgggaggagaaaaagaattcaggagattcattaaacaagaccacctctgaccaaaagaaaaagccattattatgtgacactgttggcatcttcggcttccctttcaaagatacgcaggtcattatgactaaatttggaaaatgtaaattttttggatttggaaattctagagacgttgtcgaattacaaaagtttttagaaacaagcaaacaacgcattcttgccgttttcgtcgagacaccttcaaatcctctgctgaatatgccggatttgaaaaaattgaggagtttggccgaccagtatggcttttttattgtaattgatgatactattgggggccttaacgttgacatcttgccctatgctgatatagtcagcacgtccctgactaagcttttcaatggtgctagtaatgtaatgggcggctctgtcgttttaaatccgaaatcatctctgtatccatatgctcgtgagtacttcaggagcgctaatttcgaggatttgttatggtgtgaagatgcgatagttttagaacgtaattccagggattttgaagatagaactttacgtgctaatgcaaacacagaaaaattgttgaatgatttgcttttacccgaggaggagaaaatatgcaaaaagatttactatccaactgttacttctaaggagacctttgagaactacgaaagtgtacgtaatgaacgtggtggctatggatgcttgttctctgtagcctttttcaatgagggcgatgcaaaagcattctatgactctttaaaggtattcaagggaccttctaatggtactaactttaccttagcatgtccatatgtccatctagcgcaccactcagaattagaagaagtttccaagtttggggccgaccccaacattattagagtaagcgtaggtttagaagatatccagtggttattgaaagttttttcaagtgctttagatgttgtgaaaagcagaggctccaaacactcatga

SEQ ID NO: 77612 - DNA, 1239 bp, Saccharomyces pastorianus
atgtctcctgcagcagctcaaacagcaatccctcttccatctaccgatttaccagtcaaaatcattacaaatgggttgaaaaacctgaattatacctccaagcaaggttacgggaattttgatacccatttttatgatggccaagatgaggtctctccatctggtttattgaaaatccgtaaatcttatagagagaaatcgaagtatccagattatttgcctacatgggatcctactgaaaagtatggcccgctggaatttcacgaataccatgatcctgctttgagagctgacggtaacttttcaaacctttttgcaaaagaaaacgttggtcaactaaaggtgaagaagatcaccccgaaattaggtctcgagatcaatgggatccagctaactgatctttctgatgctgcaaaagatgaactcgctttgcttgtcgcccaaaagggagtagttgtctttagaaatcagaattttgctgacgagggacccgattatgtgactgaatacggaagacattttggcaagttgcacattcatcaaactagtggccaccctcaaaacaatcctgagctgcatatcactttccgaagacctgatgcggaagaatttgcaagagtttttgatgactcgatatcatctggtggctggcacacagacgtctcttacgagttacagccaccttcttatactttctttagtgttgttgaaggtcctgatggtggtggagatacgttatttgcggatacgatcgaggctttcgacaggttgtcgaagcctttgcaagatttcttgagcacgcttcatgtcatccatagctcaaaggaacaggcagagaattcacagcgccagggcggcataaaaagaagagcacctgtcacgcatattcatccactggtcagagttcatcctgtcttgaaaaagaaatgcttgtatgtcaatcgtgcattttctaggaaaatagtcgaattgaaaagacaagaatctgaatcacttttgaatttcttgtacaatctagtggagagcagccatgatttacagttaagagccaaatgggaacctcattccgtcgtcatttgggataaccgcagagttcaacattcagcagtgattgattgggaagaaccaattcacagacatgcgttcaggattactccacaagcggaaaggcccgtggaagatctaaagtttttgaatgatgaaaattattatccttcttcattaactttggatatttga

SEQ ID NO: 77613 - DNA, 1596 bp, Saccharomyces pastorianus
atgtcaaaagttgacgtaaaaattggagcagactcgatctcctcttctgatgaaatcctagttccttcgagactcgctgatgttacgctagcattcatggaggagaatgacgcagcagttccagaaatcacgcctgaacaagaaaaaaaattaaagagaaagctttttctcacaatattcacctttgtctctgccattaaccttttactttacatggacaaagccactttatcctatgattcgattctaggcttctttgaagatacaggtcttacccaaaatacttacaatactgtaaatacactgttttacgttggttttgcaatcggccaatttcctggacaatacttggctcaaaagttaccacttgggaaattcttgggtgggttgttggccacatggactatacttattttcctaagttgtaccgcatacaacttttccggtgtcgttgcgttgagatttttcttggggctaacagagagtgttgttatcccgatattaattaccactatgggtatgttcttcgatgcttcagaaagagctgctgctcagccatttttctttgcagcatgtatggggtctccaattccaactgggtttattgcttatggtgttcttcatataacaaatcccagcatttcgttatggaaaatattcactatcatcattggtggtttgacttttatcatgacggttgttgtaattctgtggtttcctaataatcctgctgatgtgaaattcttttcaatacaagaaagggtatggattatcaggagagttcaggcatccacaggctcttccattgaacaaaaagtcttcaaaaagagtcaattcagagaggcaatgaaagattatataacctggttatttggattgttttttcttcttcaacagttagccaacaatctgccctatcaacagaacctgctatttgaaggaatgggtggagttgatgctctaggttcgacattggtatcagttgccggtgctggtttcgccgtcgtttgtgccttcatcgctacgttgatgttagcaaaatggaaaaatatttcagctttaacagccatcttttggactttaccagcattggtgggatccatcgctgcagctgctttaccatgggacaataagattggtatcttagcaaatatctgtatggcaggacaaatatttggtattccttttattatagctcttagctgggcaagttcaagtgcatctgggtacaccaaaaaactcacaagaagttcggtgtccttatttgcgatgggaattgctaatatcatatcaccacaaatatggagagagaaggactctcctcgctttttacctgcctggattgttcaaatcgttttatcattttctcttgcaccagccattttgttactgatccatttcatactaaaaagaaggaataatcaaagactaaaaaattatgacgaaaatttacaaaattatttggacagaattcaactcattgaaagcgaaaatccttcttccattgaagaagggaaagtggtaacccacgagaacaatttggcagtctttgatttgactgatttagaaaacgaaacttttatatatcctttgtaa

SEQ ID NO: 77614 - DNA, 540 bp, Saccharomyces pastorianus
atgcctggtcttaagcttgttgaagctttagaatacaggtgtgaccgattggagcggcttataggcgccggatacagcgcgaattccgatgtttcagtgcaattagatgaactatacaatcagttacatcgtctatatttccagggtctaaagtattctcaagatctcctgcaactctttaatactttcatggctgaagacatcgagaacgtgggagctcctgatgatatttgtatttttgctagttgctttgacgatatttatacattatatagtgcatttgacgaactaaacagccaatatatggagttttgccaaatcagtaaaagttcgttggatcagatttccttcaaagacgcaaatattgaaacgaaacagttgaagaagttacccgagttggtggataactgcaacataatgattttgaggtcaattgcaattctaaaccgtttcatcgactggaatattgaagttaacggattcttccagttccagaaaaagaggctgttgaatttacaaaaggtaatttatagtacgtga

SEQ ID NO: 77615 - DNA, 384 bp, Saccharomyces pastorianus
atgatgagaagtcaaagcaagtatactagctattttttttttttaattttgttttatttttgtattttctcctccttcttgtttctgttcatttttctaggcagaggctatcttaaccaacaatactctaccattacttgccttccgacctttaaattctcgacatttcttttgaatactatctccagtccccaggttgtcaaacttgatgaaggcttcgccggtgtgaaactcgtcggaaaagaaaactttgtttgttctcaaatccaccaattctcttcttacaaagtttatatttttagggtcaacaccaaagattttggcaaggtcttcatttgtcgatttcatgggaatgtttttcacatagagagtatttgtggatag

SEQ ID NO: 77616 - DNA, 504 bp, Saccharomyces pastorianus
atgattccttaccaggagtggcatagccaactgcaatcgttgtatgactcccagatttttcataactgggccctttgccaagatgttcatttgaatgatgagaaggatggacttcttttgcgtttaatacctactcgacaactgcagaaaaatactgagcgtatagaaaataaattaccaagtcatatagaattatatcttacatattcaaaagtatataacgagcccttactacttttgcgaatatgggaggagaaaagtatagatggtattccaatgaccaaattgatgctcccaactgatatcgaatcgctgcttgatgttcaaggcaaattccaactaggtttggatactatcactaacctggaaggtagcgtttggtattctttccatccatgcgatacgtcatgtatagtaggtgaccaggctgagttcatgtcaacttacttaagacgatgggtcagtattttcatatttagttggttaggttatgaagattcatag

SEQ ID NO: 77617 - DNA, 801 bp, Saccharomyces pastorianus
atgttgaacgtactattgagaaggaaggccttttgtttggtgacgaagaagggtatggctactgccacaacagctgcagctacgcatacccccagattgaaaacttttaaagtttacagatggaatccagacgagccaagtgctaaacctcatttacagtcatatcaagtggatctgaatgactgtgggcccatggtacttgatgcgctgttaaagatcaaagacgaacaggattctaccctaacttttagaagatcatgtagagaaggtatctgcggttcatgtgccatgaacattggcggtagaaacacgctagcttgtatatgtaagatcgaccagaacgaatccaaacaactcaagatctatccattaccccacatgtttattgtcaaagatttggtacctgatttaactaacttctaccaacaatacaaatctatccaaccttacttacagagatcatcgtttccaaaggatggaacggaagtgctaccaagtattgaagatcgtaagaaactggatggtctttacgaatgtattctgtgtgcatgctgctctacttcatgtccatcgtactggtggaaccaagaacagtatttgggccctgccgtgctaatgcaagcctaccgttggctaattgactctagagaccaagctacaaagacaagaaaggccatgctaaacaactccatgtcattgtacagatgtcacaccatcatgaactgtactagaacttgtccaaagggcttgaatcctggtttggctattgctgaaattaagaaatctttggcatttgcctag

SEQ ID NO: 77618 - DNA, 1512 bp, Saccharomyces pastorianus
atgttttgtgctattagtgggaaagttcctagaaggccagttctatcacctaaatccaggactatttttgaaaagtcgctccttgaacagtatgttaaagatacggggaatgatccgataacaaatgagcccttaagcatcgaagaaatagtggaaatcgtacctagtgcgcaacaagcctcactgacagagtctacaaactctgctacgttaaaagcgaattattcgattccgaatctgttgacaagtttacagaatgaatgggatgctataatgctcgaaaactttaagttacgatcaactctagatagtttaacgaaaaaactgtcgactgtaatgtacgaaagagatgctgcaaagttggtcgctgcgcaactattgatggaaaaaaacgaagattcgaaggatttacccaaatcctcacagcaagcggtagctattacgagagaagaatttttacaagggctgttacaatcttctagagactttgtagcgaggggcaagctcaaagcacccaaatggccgattttgaaaaatttggagctattacaggcacaaaattactcccgtaacatcaaaacattcccatataaagagcttaacaaatctatgtactatgataaatgggtgtgcatgtgtcgctgtgaggatggtgctttacattttacccaattaaaagattcgaaaacgattaccacaataactacaccaaatccccgtaccgggggagagcatccagctattatttccagagggccttgtaatcgtttgctactactatatccaggtaaccaaataactatattggactcaaaaacaaacaaagtcctcagagaaatagaggtagattccgccaatgagattatatatatgtatggtcacaacgagaccaacacagagtatttcatctgggcggataatagaggaaccataggatttcaatcctacgaggatgattcccagtatattgttcattctgctaaatcagatgttgagtacagcagcggtgccctacataaggattcattattattagccctttactctccggacggtatattagacgtttacaacttgtcatcacctgaccaggcaagctctagattccccgtagatgaagaagccaagataaaagaggttaaatttgcagacaatgggtactggatggtagtagagtgtgaccaaactgtggtttgctttgacctaagaaaggatgtcggcacgctagcgtatccaacttacacaatcccagaattcaagacgggcaccgttacctatgacattgacgactctggaaagaatatgattgcatactcaaacgagagcaattcactgacgatatacaaatttgacaagaaaacaaaaaattggactaaagacgaggagagcgccctttgtttgcaaagcgacactgccgatttcactgatatggacgtggtatgcggagatggtggtattgccgctattctgaagacaaatgatagtttcaatattgttgcattgacaccctaa

SEQ ID NO: 77619 - DNA, 2514 bp, Saccharomyces pastorianus
atggttaaagtaaagtcgaaaaagaactcattaacaagttctctagataacaagatcgtcgatcttatctatcgtctcttggaagaaaaaactttggacagaaaaaggtctctgagacaagaatcccaaggagaagagggcgagaacaacgagggtgaaaaagatgaggatatatttgaatccatgtttttcgctaaagatttaacagcaggtgagatttttaccttttgtttgactaaagatttatcacttcaaagagttaagaaagttgtcttacaaaagacaattgaccgcatgctaaaagacgtgattgaatcagaattggaagaatttggttcttacccaggttacaacaacgaagaggaagagaaaccaagcttggaagaagaactagctaagaaaaatatgatgattgagcgagacacaaatgagatgaacaaacgcataactagcacgtggtccaaatctggatctgtttccgagtctataacagaaactgatgatcctaagacagaagaggttaaaaaatctaaaaaaagatccaaagaaggtacatgtaaggtaaaacgtcaaaaaatcaaggaagatagatctccacctaattcgtctctgaaatccttaggtggtatggatgatgtcgttgcacaacttatggaactaataggtctacccattcttcatccagagatatttttatccacgggtgtcgaaccacctagaggtgttctgttgcatggcccaccgggttgcggtaagacgtcgattgctaatgcgttagctggagaattacaagtcccatttatatctatttctgcaccttcagtcgtaagtggtatgtctggggaaagcgagaaaaagattagggatttgtttgatgaagcgagaagcttggcaccatgtcttgttttctttgatgaaatagatgccattacaccaaaacgtgatggaggagcccaaagagaaatggagagaagaatagttgcccaattattgacctcaatggatgaattaacgatggaaaagacaaatggaaaacctgttattatcataggtgccacgaatagacctgactctttggatgcagcattgagaagagcaggtagattcgatagagaaatatgcctgaatgtcccgaatgaagtctcaaggttacatattttaaagaaaatgtctgataacctaaaaattgatggtgctatcgattttgccaaattggcaaaattaaccccaggctttgttggcgctgatttaaaggctttagttactgctgccggtacatgcgctattaaaagaattttccaaacctatgctaatataaaatccacaccaactacggcaacggacagttcagaagataacatggaaattgatgaaacagcaaacggagatgaatctagcctgaagaacactgcgaatatgatcgacccgttgcctttatccgtagtccaacaatttattcgtaattatcctgagcctttatcaggagagcagttatcattattatccattaagtacgaagattttttgaaagcgttgccaacaattcaaccaacagcaaagagagaagggttcgctacggtacctgatgttacttgggctaatgtaggcgcattgcaaagagtcagacttgaattaaatatggctattgtgcaacccatcaagagaccagagctttatgaaaaagtgggaattagcgcccctggtggtgttttattgtggggaccaccaggttgtggtaaaacgttactagcaaaagctgttgccaatgaatctcgtgcaaatttcatatcaatcaaaggtcctgaattattaaataaatacgttggtgaatcagaaaggtccatcagacaagtttttactagagcaagggcgtctgtaccgtgtgttatattttttgatgaactggacgctttggtgccaagaagagatacttctttgtccgaatcctcctcaagagtcgtcaacactttgttaacggaattagatgggctgaacgatagaaggggaatttttgtgattggcgccactaatagacctgatatgattgatcctgctatgttaagaccgggcagattggataagactttgtttattgagttacctaatactgaggaaaaactagatattatcaaaactttgaccaaatcacacggaacacctctgagtagcgatgttgattttgaagaaattatcagaaatgagaagtgcaacaatttttcaggcgctgacttggctgctttagtcagggagagttcagtcttggctctaaaaaggaagttttttcagagcgaagaaatacaatctgttcttgataatgacttagacaaggaatttgaggatctatcggttggcgtatctggcgaagaaattattgtgaccatgtctgacttccgaagtgcattaagaaagattaaaccctctgtgagcgataaagatagactgaaatatgatagattaaataagaaaatgggtttaacggaggagatgaaggatgcggaagaaatgaaacaataa

SEQ ID NO: 77620 - DNA, 693 bp, Saccharomyces pastorianus
atgcgtaagccttctattacgataacaacagcaaaagctattataactccagactatactcttattaaatcgcattctaaataccaacttccttcacgttttcaaaagctagatgcagactcacctgagagaagtacagttgttaagctattttaccgccgatttatgaggcttaagcctttcatatcgaatgtgaaaatggttaaagatacttacagggattatgttcgatataagtttatgaaagaaaactacgaactcaaacgatacttggtattcaatcctgatggcttgaggtcgaaaatcaagcttgagcttctcagcaacacgaaatgttgtgaaaggatactccccgtgactgagatgcaaagaaccttggaatttgttctgaagagctgttcatacttgcccgaaacaaaagttcaaaagtgggatattgcaagggacaacacatattgcaggcaaattttaaagaaccttttaacaatgcaatatgaaaagtacagatcgattttgcatagaggaataggccatgatgagcttgacgtcaaattctctcatttgaaaactacttctagtccgctaactaagctaaataaaaccgaaaagaaaaagattccgcttttcaaagtatttagtgatttcgatacaacattgatatatctcaatgagacattaggtacaaggttataa

SEQ ID NO: 77621 - DNA, 840 bp, Saccharomyces pastorianus
atgtcatcaagacccgctaataaccaaggccccccaaacctccctgccagagataagtcgctcgtgcaaaggttcatggcagtagccaagagcttgcagtttgcatggtttaccggtcattccgtcgtattgatcagctccattctttacctgctcaagatgtcagaattttattacagattggcatatctcggtgtcgtcgaatctttcggtatcatcatttaccagcaatttttcacccgcaatgaaccattgcagactcaagatgccgctgccactaaggcttccataaaatcacgcgttgctggactcctaaagagtgaagacgtgctttatttggttttggccaacttctggttgttcaccccaagattttcattcagcttaatcccatttttcgcgtttgctgtattccatgttttaatctacgttgaaaaagttctcttaccaaaagtcttccacctttccagtaaagattcaagtaagatcctcagcttcatcgacaagtttgttgttcagtacaatgatttgtgcatgcactgggtcggtactgctgagctgcttattttcattttggtccttttcagagccattctgtgcttccaaaggtcttggatcatacttgttgtgtacgccatctttattaagttaagatacgaaaactccaagtacatgaaagccgcctttgctcaatggagagttagaatggacgggatcataagccacccatctatcccaccattcgtcaaaagagcttataatgcaattaaaatgaggttggtccgcttgtctgagtaccgcttaagcggtgccccacaagtgaccaagaagcagaattga

SEQ ID NO: 77622 - DNA, 1158 bp, Saccharomyces pastorianus
atgaaactaagggcagaagacgtgttggcaaacggaactagcagacataaacttcaaattgatatggaaagacagattcaaattgcaaaagatttactcgcacagaaaaagttcttagaagctgctaaacgctgccaacaaactttggactctctcccaaaagatggtttgttgcctgatcctgaactgtttactatattcgcacaagctgtatacaacatggaagtacagaattctggtaatctgtttggggacgctcttctggcaggtgacgatggatctgggtctgagtctgagtctgagcctgagtctgatgtgagcaatggagaagaggggaacgagaacggtcaaacagaaattcctaattctaggatgttccaattcgaccaagaagaggaagacttgactggtgatgtcgacagtggtgatagtgaggacagtggcgaaggtagcgaagaagaggaagaaaacgtggagaaagaggaagaacgcttagctttgcacgaattggctaacttcagtccagcgaatgaatatgacgatgaaattgaagacgtatcgcaacttcgcaagtctggtttccacatatactttgaaaatgatctgtatgagaatgctttggacctactggcgcaggccttgatgctgttgggccgccctactgcagatggccaatctctaaccgagaacagcagattgcgcatcggtgatgtgtatatcctgatgggtgacatcgaaagggaggcggagatgttcagtagagccattcatcattacttgaaggcgcttggctattacaagaccttgaaacccgcagaacaagtaactgagaaggtgatacaagcagaatttttggtgtgtgatgctttaaggtgggttgatcaggtgccggctaaggacaaactaaaaagattcaagcatgccaaggctctgcttgaaaaacacatgactacaagacccaaggacagcgagttacagcaggcaaggctcgcacagattcaagacgatattgatgaggtgcaagaaaatcagcagcacggctccaagaggcctctttcgcagcccacgacctccatcggcttccccgccctcgaaaagccccttggtgacttcaatgatctctctcaactggtcaagaagaagcctagaaggcattga

SEQ ID NO: 77623 - DNA, 306 bp, Saccharomyces pastorianus
atgaactcgataaggaaactttcttgttttggtactggttcatcgatctactcaggaaaatgtttgagttcgacccaacaaaaaggattaccgcaaaggacgctctggaccatgaatggtttaatctgggcatactggatgatggtattgcaacttataataatacccaaggatagtgggtgttctcgttctacttttctcttctttttttcacatcttttactagttccgttttttttttttttaactcttctttttcattttccggtttttaataatatttctttaaatttctatattcaataa

SEQ ID NO: 77624 - DNA, 93 bp, Saccharomyces pastorianus
atgcatttaagtactttaccaaacgtgccttggcccaataggtccttcacaacaaagcggccgccactgccaaatatgtcgttttcctggtaa

SEQ ID NO: 77625 - DNA, 297 bp, Saccharomyces pastorianus
atgtcagggaacccaggaagctcgctgagcgcattgagacctactccacccgagagaggttcgttcccgctagaccacgacggcgaatgcaccaagtacatgcaagagtatctcaaatgtatgcagcttgtgcagaacgaaaatgcaatgaattgtagattactggcaaaggactacctgcggtgcaggatggaccaccaattgatggactacgatgaatggtcacatttaggtcttcctgaggatgctccaggcaacaacggtaaaaccataaaagacgccattgataataaatag

SEQ ID NO: 77626 - DNA, 1674 bp, Saccharomyces pastorianus
atgtctcaagacgaaaatattgtcaaagctgttgaagaatccgcagaacctgctcaagttattcttggggaagatggtaagccattgtccaagaaggccttgaagaaattgcagaaagagcaagagaaacagagaaaaaaggaggaaagagccctccagttggaagctgaaagagaagcccgtgaaaagaaagccgctgccgaagacaccgcaaaggacaactacggtaagttgccattgatccagtctcgtgactctgacagaactggtcagaagcgtgtcaagtttgttgacttggatgaggctaaggatagcgacaaagaagtccttttcagggcaagagtccacaacaccagacaacaaggtgcaacattggcctttttaactttaaggcaacaagcttccttgatccaaggtctagtaaaggccaacaaggaaggtaccatcaacaaaaacatggtcaaatgggctggttcattgaatttggagtccattgtccttgtcagaggtattgtcaagaaggtagatgagccaatcaagtctgctactgtgcaaaacctggaaattcacattaccaagatttataccatttccgagactccagaagcattgccaatccttttggaagatgcctcccgttccgaagctgaagctgaagctgcaggtttgcccgtggtcaacttggacaccagattagactaccgtgtcattgacttgagaaccgtcaccaaccaagctattttcaggattcaagctggtgtttgtgagttgttcagagaatatttggccacaaagaaatttaccgaagtacacacaccaaaactgttgggtgcaccaagtgaaggtggttccagtgtgtttgaggtgacatacttcaaagggaaggcctacctagctcaatctccacaatttaacaagcaacaattgattgtggccgactttgaaagagtttacgaaatcgggcctgtgttcagggctgaaaactccaacacccaccgtcacatgaccgagtttactggtttggacatggaaatggctttcgaagaacattaccacgaagttttggacacgttgagtgagttgtttgtgtttattttcagtgaattgcccaagagatttgctcatgaaattgagttggtacgtaagcaataccctgttgaagaattcaagttacctaaagatggtaagatggttcgtctaacatacaaagaaggtattgaaatgctaagagctgccggtaaggaaattggtgattttgaagacttgagtaccgaacatgaaaagttcttgggtaagttggttcgcgacaaatacgacaccgacttttacatcctagacaagttccccttggagatccgtcccttctacacaatgcccgacccagccaaccctaagtattctaactcgtatgatttcttcatgaggggtgaagaaatcttgtccggtgcacaacgtatccacgaccatgctctattacaagaaaggatgaaagcccatggtttgtctcctgaagacccaggtttaaaggactactgtgacggcttcagctatgggtgtcctccacacgccggtggtggtatcggtttggaaagagttgttatgttctatttggatttgaaaaatatcagaagagcttcattgttcccaagagatccaaagagattaagaccatga

SEQ ID NO: 77627 - DNA, 210 bp, Saccharomyces pastorianus
atgactgaaactgacaagaaacaagaacaagaaaaccacgcggagtgcgaggacaaacctaagccatgttgcgtctgtaagccagaaaaggaggagcgggatacatgcatcttattcaatggacaagactctgaaaaatgcaaggaattcattgaaaagtacaaagagtgcatgaagggttatggcttcgaagttccaagtgcaaattag

SEQ ID NO: 77628 - DNA, 2022 bp, Saccharomyces pastorianus
atgaagcataacaggcagatgccagatgaaagcttggaaaacataaaagtgctactgaatcctaaattaggaaagccagtcaagtcacttacgagtgcacaatcaaaagcttgctatcatacgctgatcagtaataaaaatttgaacaagacaagtgatgaatacgaaaagttattggcaaactatatcctcctttgtgatgaaaaatacctatgtaaaaccgtaattccagattcccgattttgggctatattgtgtgataattgccaaaagctaaggtcagaaacgttggtagcaaatctcattaggatttttaatgtagcccttaaatgccaagattctaataagaatgaagttattgtgagcatctgccacatctccagagagaactctcagctcattggaatacttttacaacttttgtcccaaagacctattcatataccgttgtttacggacactatactatgcataaccctatttttaaaatgctcacttacattatgtgagacatcactatcacacgccgtagaatttgtacccagaatcctcattttgctatttcagtataactttccagcttccatgtctgaattactttacatagaagacttgcaaccactaatccttgaagaatttgtaccgttaaagcagaggctaataaattttctatcttcggttagtattgatgattattcctgttcgcttaaagctgatcttcttacagccatcaaagataactccgtattccaaaaagggttagaaatggaaatgggcgatcttcccagtataaatttattaaatgcgtatgatacattcacattcttaaacagtcctaatgggtctttcaagagactttacactgaacaattgttgtttggcgagaacgatttccctctttatgaagcaatatttaaactttcagaccaatttagaagacttttcaatctaagtgggaaaaaagagaaccaatactcagactcagagcgtgatttaaaattacaaattgctaccgctgttctcaatcgacaaacatgtttttacaaaacactcgagttgtttttgagattttggatagaatcattagcaaaatcgcaaagtgatttggtttcacgtgttaaatttagctatatatcgcgtttaaaatatagtttgtttgtcataccagtgatattggaagctagcaatacgagacgaaatcccttcgtcaagacaccaagtgtgttgcacgttgacatctatagagagtataaagtttgcatagatacatctacagatgtagacgtcaaattaataaaagaacagtatcgaacctggtcatctagtatcgctagcttcgataccatgctatcaggccaggttcgtgattacgttcgtcatcaaagacttcttcaattgcaaaagggaacgtgggtttacgcagagaacccactgaatcctgaagctggcacgcctaaagtctacttcctcatagtttcagataaccacgcaaatttattagccagagaattcgaaacacaaacaaacgatttaccttatctattcgacaataaaatcttaacaagtccaggttctgaggcattagctaatggcagaacaaaagttgttgttttgaaacatataacctctttcaaaagcatagaacttactacaccgagtcgtcggacgagcagtaatgtttacatcaaattagatgaagccaatgtgtacactggagttgaattaaaagatcgtaacgacaggacagttttgaagttttatttagacacagaagagggaagatatatatggctagacggattgaaattgatatctccattccagcatgaagatatatcagaagacacgaaagaacaaatagacactttatttgatttgaggaaaaatgttcagatgataaatttgaacgttcgtcaggacatcatagtgcctccacctgaaccaagcgacgaggacgaagatgaagaattttgtaacctggaaacgttaaagaaagtaacccaaaatttttattttgattaa

SEQ ID NO: 77629 - DNA, 2607 bp, Saccharomyces pastorianus
atgaatgctactaaagaactgacttttaatttactgaataaatttcaagacaaagaaagatttggatctgcgcaaagacatgctggaatctcactaaaagggttcatatctggtatattgttttcttttttgtactttttatttcagctgtcactctttattattttaagatcaagattcaagactatatatcaggccaatgtcgttctgaaaatccatccaggttctaaagtttgttttgctaagaaaaaaataaaaaattattggtcattatttgcatttctcaagcaacttcccggaagaatgttagatcctatggaaaaattcgaacgaaacgaaaggtatggcctagacaattatctatttttacggtttctcaaacttttgatattcttttttgcagtgttatcaattatcaacattccaatactaattccaatccattatttttccagggatattttgaaagaaaatgaaggtgaacgttatgagcaaagtttcaggacgacaagtaaacttgacaagtggaccatgtcaaatctatcacctaattcatcgaatactttaatctgtcacttgtttttgagtatctttgttgtactctggtttcacttcattctttcttcggaactgaggttcgttaatcgactaggatattccgttttgacgaaaagtaaataccaaaacattctatatttggaaggattctcaagtaaattggttacccaaagtatttctttagaaactttttttcagccgctacacagtgattgctttggcgtgacgcatttcattccaaaaaatttgaagaaagtccacaaattagaaataaaattaaataaattacaaaaatcaaaagaacaaattatctttgagatcattttagagaaatattttagaagagtttcaatacacaggcatttgatagcaaatcacaaaagatttttcttttcaaagttgaaaaaccatctattatttcagtacaaaaaattggtatttttaactcaatttagaatttcatactattgcacaaaaattcgtctgcgctggaaaaagtcaagcatctttccgttatattaccctaaactgtatgtaaatacagaaacaatattagaaaggaaatacagaatccttgataaaataatacgcaaggaaaaactcattaaattccaagtaaattccttgaaagcaacttcaggaaccaagcaggcactgcccgacgataaatcgtcgggcacagacatttatatggataagatgttcattaccttcaagtcaacattattgtcaaacgttataggtgagttgctttcgtatagactacccacccaaaatttaaaagtaataataggccccaatgttaatgacattatttggagaaatatcctcgattcatcacccctttggaaaagtgccaaatatttctcggcaaatatattgcgaatttttgtgattataggctggattttgcctgtcgcgttccttgggttaatatcacaaataccaaatatttcctcactaataccgtttacaaaaataattcatttccaatctccatttataagagaagtggcaaagaatttgattccaatagtaaccttaataataataatagaaatcgtaccctactttttccgttggctgagttaccttcgagggttgaaaactggagcgcaaatagaagctgatgtccagaattggtatttcgtctttgtcttcattcatcttttcgtagttgttacaatatcttctggattttctataattattgagaggctccttaacaatcctgtcagtatccctgctctcctggccaacgacttgcctaaatgcgcaaactttttctgttcttttgttttgattaggggaatggcttacgcaggcggtaatttgttaagaataaaagagctactttttgaattgttctactataaatggaaaaggagtactccacatgctcaatttaagaggttaaagacatctttatttttccaactaggatctatttatcctatattctcagtgttgggctgtattggtatcatatacagtgttgttgctcctattatattattattatgttgcatctcattttcgatggttttcttttctttcagttacttgttcaaataccaatataacaaagagaactattctgaaacgttcggtaaattgtacatacaggcccttatgcaattgtacgcgggcatttatttcatggaattttgtttactcgggctgttcactctttttgatcaatacacattgtcaactataatgcttgttgtctttgctctaacagtaatcacgcacgccaaaatctccaaacaaataaaatcgaagcctcaacgcataccaactttggaatacttgtcgaatctaacagaggaaaaaaaggaccaattctgtcaagaaagttatagtttccatgatattttctccatttgtagaaattcggatgaaatttggctaccaagggacaaactaggaatttctgaagaagaacaatcatttttggagaagtcgtatcacctgaaattcgatcttagtatgtattcaatgaatttatttggtgattgtcacttggagaatagccacttgcactaa

SEQ ID NO: 77630 - DNA, 1851 bp, Saccharomyces pastorianus
atgagtgaccttaaccaatccaaaaagatgaacgtcagcgagtttgctgacgcccaaaggagccactatacagtataccccagtttgcctcaaagtaacaaaaatgataaacacattccctttgtcaaacttctatcaggcaaagaatcggaagtgaacgtggaaaaaagatgggaattgtatcatcagttacattcccactttcatgaccaagtagaccatattatcgataatattgaagcagacttgaaagcagagatttcagaccttttatatagtgaaactactcagaaaaggcgatgctttaacactatttttctattaggttcagatagtacgacaaaaattgaacttaaagacgaatcttctcgctacaacgttttgattgaattgactccgaaagaatctccgaatgtaagaatgatgcttcgtaggtctatgtacaaactttacagcgcagctgatgcagaagaacatccaactatcaagtatgaagacattaacgatgaagatggcgattttaccgagcaaaacaatgatgtatcatacgatctgtcacttgtggaaaacttcaaaaggctttttggaaaagacttagcaatggtatttaattttaaagatgtagattctattaacttcaacacattggataacttcataattctattgaaaagtgccttcaagtatgatcatgttaaaataagtttaatctttaatattaatacaaacttgtcaaatattgagaaaaatttgagacaatcaaccatacgacttctgaagagaaattatcataaactagacgtgtcgagtaataaaggatttaagtacggaaaccaaatctttcaaagctttttggatacagttgatggcaaactaaatctttcagatcgttttgtggaattcattctcagcaagatggcaaataatactaatcacaacttacaattattgacgaagatgctggattattcgttgatgtcgtactttttccagaatgccttttcggtattcattgaccctgtaaatgttgattttttgaacgacgactacttaaaaatactgagcagatgtcctacattcatgttctttgtcgaaggtcttataaagcagcatgctcctgctgacgaaattctttcattattgacaaacaaaaacagaggcctagaagagttttttgttgagtttttggtaagagagaacccgattaacgggcatgctaagtttgttgctcgattcctcgaagaagaattgcatataaccaattttaatctgatagaattatatcataatttgcttattggcaaactagactcctatctagatcgttggtcagcatgtaaagagtataaggatcggcttcattttgaacccattgatacaatttttcaagagctatttactttggacaacagaagtggattacttactcagtcgattttcccttcttacaagtcaaatatcgaagataacttactaagttgggagcaggtgctgccttcgcttgataaagaaaattatgatactctttctggagatttggataaaataatggctccggtactgggtcagctattcaagctttatcgtgaggcgaatatgactatcaacatttacgatttctacattgcgttcagagaaacattaccaaaagaggaaatattaaatttcataagaaaagatccctccaacaccaaactcttagaactagcagaaacaccggacgcatttgacaaagtagcactaattttattcatgcaagcaatcttcgcctttgaaaacatgggtctcattaagtttcaaagcaccaagagttacgatctggtagaaaaatgtgtctggagaggaatttag

SEQ ID NO: 77631 - DNA, 1311 bp, Saccharomyces pastorianus
atgtcactgaatgacttcctaagttccgtgctacctgtcagtgaacaatttgaatatttatcgttgcaatctattccgttagaaacccatgctgtcgtaaccccaaataaggacgacaaaagggtcccaaaaagcacgatcaagactcaacacttctttagtctatttcaccaaggaaaagtttttttttcattagaagtgtatgtgtatgtcacactttgggatgaagcagatgccgaacggttaatatttgtatcaaaggcagacactaatggttattgtaatacgaggataagcattagagatattacaaaaataatattagaatttatattatcaatcgacccgaattactatcttcaaaaagtaaaaccggcaataagatcatataagaagatatcccccgagctggttagcgcagccagtacgccagcaagaactttaaggattttggctagaaggcttaaacagtcaggcagcaccgttttgaaagaaatagaatctccacgttttcaacaagatctttatctctcattcacctgtcctcgtgagattttgaccaaaatttgtttatttactagacctgcatcccagtacctcttcccagattcttcaaaaaacagcaaaaagcatatactaaatggcgaggaactaatgaaatggtggggctttattttggatagattactaattgaatgctttcaaaatgatacacaagcaaaattaaggataccgggcgaagatcctgctcgagtaagatcatacctaagagggatgaaatatccactatggcaagtgggtgatatatttacctctaaagaaaattctcttgcggtatataatattccattattcccagacgatcctaaggctagatttatacaccaattggcagaggaagatcgcctcctcaaagtaagcttatcatccttctggattgaactacaagagcgtcaagagttcaaattaagtgtcacatcatctgtaatgggtatttcgggatactctcttgccactccatctttatttccatctagtgccgatgttattgtaccgaagtcaaggaagcagtttagggcaatcaagaagtacattactggagaggaatacgatacagaggaaggcgcaatagaagctttcaccaatattcgtgattttctattgctcagaatggcaacaaatctccaatctttaacagggaagagggagcatcgggagagaaatcagccggttcctgcaagcaacatcaacacgttggcgataacaatgctaaaaccgcgtaaaaaagctaaagccttgcctaaaacttga

SEQ ID NO: 77632 - DNA, 1992 bp, Saccharomyces pastorianus
atggctaagagaaatagatctcaatttcgcattcaggaaaggactgcaaagaaaagaaagcacgaagattccttgttagaaggcaatgttttccaaaatgcaccggaagatatggatgaaaataccatatatagcgcaaaaggctcatcctgggatgaagaagaacaggattacgaaatggttcctcggaagaatcggtctgatacatcaaatcttgttgaaggcctgcctataaaagttaacggtaaagttgaaagaaaattgcataaagcccaagaaaaaccaaaggacgatgatgaggaagacgaagactctaatgattcttcagaagatgatgagggacctaatgaagaacaagaagcagaggcaaaggaggatgagcctgatacggaggaaaaaattctgcaactaaaagaagacattgccgatttagtcactaaagttatggaggagcctgaagaaaatactgctgcgttggggcgtctatgtaaaatggtggaatctaaaaatcctaatacttgtaagttttccatgttggctttggtccccgtgtttaagagtatcataccaggctatagaattcgaccactaactgaaactgaaaagaaggaaaaagtttctaaagaagtctccaagcttagaaactttgagcaagccttagtttattactacaaaaattacgtcggaagattacagagtctttcaaaaactcccagtaatgctgctcctatacaggtttcattagggattttggccactcaagccgcaaaagaattgatttcaacggcatcccatttcaactttagaacagacattttcactttactgttgcgtagaatttgtaaaccaagaatttcaacagatccaacttccattcaaataatccagacatttgaaactctattaaatgaggacgaagagggctcaatatcattcgagatactaagaattttcaacaaaatactaaagacgaggaacttcaacatcgaagaatctgttttaaatatgttattatcgttagatgtcttacatgactatgaccctaatactaaatcgaaaggtaacgttagcgctcctaagctcaaaaagaaagatagggtccatctttctaagaagcaaagaaaagctcgaaaagagatgcaacaaattgaggaagaaatgcgtaacgctgagcaagctgtttctgcggaggaaagagaaagaaaccaatccgaaattctaaaaatcgttttcactatatatttgaatatcttgaaaaacaatgcaaaaacactcattggatcggttttggaaggtctaacgaagtttggtaatatggccaactttgatctattaggggacttcctcgaagtaatgaaagaacttattagtgacactgaattcgataacctttcctctgctgaggtccgtaaggctttgctttgtatcgttagtgcattctcacttatttcaaatacacaatatatgaaagttaatgtggatttgtccaaattcgtcgatgggctttacgcgctattaccttatatctgtcttgatgcagacatcgaattatcttatagatcgctaaggttggctgacccactcaataacgaaataataaaaccatcagttaacgtttctaccaaagcagaacttctgctaaaggctctggaccatatatttttccgctctaaatcagggactaaagaaagggctacggcgtttaccaaaagattgtacatgtgcatcagccataccccagaaaaaacaagtattgccattcttaaatttattgataaattaatgaatagatatccagaaatttcaggcctttactcttccgaagatagaataggcaacggtcatttcataatggaagccgataatccttcaaggagtaacccagaggcagcaaccttatgggataatgctcttcttgaaaagcattattgtcctgtagttacaaaggggctacgctctctatcatctagatctaaagagtgttctaaatag

SEQ ID NO: 77633 - DNA, 1386 bp, Saccharomyces pastorianus
atggctcctgtagttatttcagaatctgaagaggatgaggatagagttgccattactagaagaactaagagacaagttcattttgatggcgagggagatgatcgtgtagaccaacagcaacagcagcacagttcaagccacagggatagggataaacatgtgcagcgtaagaagaagaaaaggctctcgaatagaaacctgcaaggttcaaatggtgggtacgcttgggaggatgagatcaagagaagttgggatttggtgaaagtggacgatgaaggggatatggcatctcttgtggctagcatagtcgaggccagaaagaaacgtactgctaagaaaaacataacgccataccaaagaggtattatcagaagtttaatattaaccctagattgtagtgaagctatgttggaaaaggatttgagaccaaacaggcatgccatgattatccagtacgccatagattttgtccatgaatttttcgaccaaaatccgatatctcaaatgggtattatcataatgagaaacggtttggcacaactggtcagccaagttagcggaaacccgcaggatcacattgatgcgttgaaatccatcaggaaacaagaaccgaaaggaaacccttcattgcaaaatgcattggaaatggcaagaggccttttattgcctgttcctgcgcattgtacaagggaagtactgattgtatttggtagtctttccacaactgatcctggagatattcaccaaactatcgattcgttagtttctgagaaaattagagtgaaggttttggggttatcagctcaagtggccatatgtaaagaattatgcaaggcaacgaattatggtgatgaatccttctataaaattttactcgatgaaactcacttaaaggagctattcaacgaggctgttacccctttacccgttaacaaaattaataagggtttcacactcgtaaagatggggtttccgacaaggatattcgaagatactccaactttttgttcgtgccattccaagttagtttacggcggatacttctgtcccaattgtcatagtaaagtttgttcattgcccacagtctgtccatgttgtgacttgatgctaatcctttctacccacctggccagatcatatcaccatctgatgccgttaaaaacatttgcagaagtacctacaacagaaaaatttcgatcagaagactgctttagttgccagtcaagatttcccatactgaaaaaccataaaaatggtaaactactgacaagttctcgctatcgttgtgaagattgtaaacaagaattttgtgttgactgcgatgtgttcatccatgaaatccttcataactgcccaggctgtgaatctaagcccgtaataacttaa

SEQ ID NO: 77634 - DNA, 600 bp, Saccharomyces pastorianus
atgagaatttatcaatgccatttttgctcatccccatgttatccaggtcatgggatcatgtttgtgcgtaacgatgctaaagagtttaggttctgccgttctaaatgtcacaaggcattcaagcaacgtcgtaacccaagaaaactaaaatggaccaaagctttcagaaaggctgccggaaaagaattggctgtggattctaccttgacttttgcccaaagaagaaatgtccctgttagatacaatagagagttagttgccacaactttgaaggctatggctagaatcgaagaaattagacaaaaacgtgaaagagccttctacaagaatagaatgagaggtaacaaagaaaaggacttcttaagagataagaaattggtcgaatctaacccagaattattgagaatcagggaagttgaaattgccagaaagttggctaaagaacaagaaagagctgaatcagtatccgaacaagaggaatctgaagaagaagaggaggatatggaaatcgacagtgacgaggaagaggaagaacaattggaaaagcaaaagattctgctaaagaacagaagaagaaatacaaagaaaattgctttttag

SEQ ID NO: 77635 - DNA, 483 bp, Saccharomyces pastorianus
atgagccagttagttctagacttaaaatgtttgaaggataaaatagcaacgaattacgatattcacaacaatgtttacggtggaaacggaatggaaccaaacattattcatccgtccgaaagattcaggatggttgttcgattagtagatttcttgttctgtgaatcggatgaagaattcattaaaggttttttctgtcaaatgatagttagaaatcttcattgcctcaattcaacaaatggcgcagaggagatgcgtttgtatatgagtgaaagattattctcagcccataaagatgatttgagattgataaatgggcaggtactggatgttcgcattggggtatggtatggaatacaccaaagtccgccaatttttgaaatcattgattttaagatactatccaggaatgacgttcgtgatttctgtgaatttgtcaaatcaccacttggtgagaagtttctgaacatctctaactcctaa

SEQ ID NO: 77636 - DNA, 576 bp, Saccharomyces pastorianus
atgaaagtgggtattataatgtgttctgtgagggcaaagagggtatgcccagaaattgcagcatacgtaaaacgaacaattgaaaatagcgaagaattaatagaccagaagctgaaaatacaagtagtagatttacaacagattgctcttcccttatatgaagatgatgacgaactgatccctgcgcaaataaagagcgtggatgagtatgcagacagcaaaactcgatcgtggagtcgcatcgtaaatgcattagatattattgtattcgttacacctcaatataattgggggtatccagcagccttaaaaaatgcaattgatcgtctttaccatgaatggcacggaaaacctgccctggtggtaagctacggcggtcatggcggtagtaagtgtaatgaccaacttcaagaggtactacatggtttgaagatgaatgttataggtggagtggcggtgaaaataccggtaggtacgataccgttacccgaggacattgtaccacaactcagcgtgcacaatgaagagattctgcaattactcgcatcgtgcatcgaaacaacgaggaataaataa

SEQ ID NO: 77637 - DNA, 426 bp, Saccharomyces pastorianus
atgaacattaagactttgtgtcatccagaatataaaagaatctccgttgaatcgttattgaatccggtagaggagacaatagactgcgaaaaacctcactctcaaacaaaaatcaatactgctaaacccattagtgcatctttgtatgtcacaacgaataatactgctgttgttcagcacaatgtccaaaagaggaaaggcgtcaccaggagatgtccacagtgtgcggtgataaaaacttctccgcaatggagagagggtcctgatggagaggtgacattgtgtaatgcctgtggattattttatagaaaaatatttttggtttttggcaaggatctggcaaaacggtactttaacgaaataaaaggtgtgagcgtcaaacgaaaagttccaaagagcctctatggagttacaagaacgcgttaa

SEQ ID NO: 77638 - DNA, 1014 bp, Saccharomyces pastorianus
atgaacaggattaagaatacattttctgttgctaagagattaaaactaagcaaagttatgacgaactcagaattaccgagcatattcgaaggaactgttgatttagggattattggtggtacaggtttatataaccttgactgtctagagcccatcgctttgcttccacctatggtaacaccatggggtaccacatcgtctcctgtcacaatctctcagttcgtaggaactaacagccactttcacgttgcgttcatagccagacacggtattaaccacgaatacccacccactaaagtcccatttagagcaaacatggcggccttaaagaacttaaattgtaaagccgttctttcttttagtgccgtggggtctttacaaccccatataaagcctagagattttgtgttaccacagcaaataatcgacagaactaaaggcataagacattcttcatatttcaacgatgaaggcttggtaggtcacgttggtttcggacagccgttctctcaaaaattcgcagagtatatctatcaattcaagaacgagataacaaatcctgaatccgaagaaccgtgccatttgcattacgacaaggatatgaccgttgtgtgtatggaaggcccacaattctccacgcgcgctgaatccaagatgtacagaatgtttggtggccatgttattaacatgagtgttattccagaagccaaattggcgcgtgagtgtgagctgccttaccagatgatttgtatgtctaccgattacgacgcatggagagatgaggcagaacctgttaccgtagaaatcgttattggtaatttgacgaataatgggcgcaatgcaaatattttagcttctaagatcatcgtctcaatggccaaggaaatcccagagttcatgcatactggcgatgggctgcgcggttccatcaagaaatctatctctaccgtaccagaggctatgtccaaggaaaccttagaaagactaagatacttatttccaaactattggtaa

SEQ ID NO: 77639 - DNA, 900 bp, Saccharomyces pastorianus
atgaagattcagccggcccaattggccctggacgataatgacgtgccgggaccattgccggacacagacagcaaaccctcatcacaatcacaaaatgacacaccaatgtttaaattgggcaactttgaaagtcctgtgctcaaggagctatcacggcgaacggtaaacaaggaaatggagacgcagagaattatgacaaacgtaattgcgtttgcgttctggaacctgctggtgaagttcatcaagttcttttggaacaacactcatgttgggagacagttttgcaaccggctatccagaatccatctgtacatgttgacatttcacacgttaaagaaggctaacatcatatatcacaccacgttcagttggttgaatgcagaacttcttgactacttgttccacctattaatctcgctcaatatactgttttctctttggaagctcttatccaccgtcaaagtaagtgatttgaatctcactgacaggcaaaagaagctcctgggggtagacatgcaatcatctgtcgatactgggttgcagccacaacacccccactacgtatccacttctaagatcagccaaatggcacagaacaaaacacatattcctcaaacaaatctcaaaaatcatccagcatatctcttcaaaggcttagagacgcctttgaaagcaagacaaagggaaatggcggaggaacagacgaaactacaatctcaatccttacacacaaagaatgtatttggcacactgcagaggcatagcggtatcagtagcacattagtgagcgctaacaatgacaataactcgccgcatacccctgtaactaggaagggctacattccaagtagcaaatatgcatatatgatgaactcacagtccccaagggggaaaatataa

SEQ ID NO: 77640 - DNA, 540 bp, Saccharomyces pastorianus
atgatatcatatgaattccaaactcatccaccgaaaggaaaagatagctcattgaacgcttcatccgaaaacaaagaattgtatgtacaagccacgcactttaataacacaattctattgcaaatcagactaaatggggaaatggattccacctatgaggtatcttcaaaaggactaaacccaattctcgatatcaacgtaccactggcaggaaacctaggaaacacgggtggcgattatgacgatgaggaagaagaatttgtaagagaccatttatctgattatcaagtggttaccaagttgggagatagtgccgatcctaaagtacccgtggtatgcgtacagattgccgaactatataggagagttattctaccagaagtgagcggtacgatggcccaagacaacatgcaattcagcttgctgatatccatgagcagtaagatatggagagcaacgaaggaacaaagcgctgacgataatgattttggcaaattagtttttgtgttaaagtgtatcaaagatatgtatgcaaagtga

SEQ ID NO: 77641 - DNA, 753 bp, Saccharomyces pastorianus
atgcctatcaatcaaccgtcgggacagattaagttaactaatgtttcattagtgagattaaaaaaggctcgcaagagatttgaagtcgcgtgctaccaaaataaggtccaagactatcgaaaaggaattgaaaaagatctggatgaagtgctgcagatacatcaagttttcatgaatgtttcgaaaggcttggttgctaataaggaagatctacaaaagtgtttcgggactacaaatgttgatgatgtcatcgaggagatcatgcataagggagagattcagttatcggaaaaagaaagacaattaatgcttaataaagttaataacgaaatgcttaccatagttagcgctaaatgtataaatcctgtgtcaaagaaaagatatccgcccacaatgatccacaaagctttacaggaactgaagttcagccctgttattaacaaacctgccaaattgcaagctttagaggctatcaaattattggtttctaagcaaattattccaatagtaagggcgaagatgaaagtcaaagtggccataagtgagccatctagacaacccgaacttattgagaagattagtaaattgatagcttcatcgcctggagagtcaacgaagccggaattggatccttggacatgtacaggtcttatcgatcctgtcaattatagagatttgatgaccctatgtgataaaaagggaactgtgcaagtcttggatatggcagtcatagataatacaacgcataactaa

SEQ ID NO: 77642 - DNA, 1023 bp, Saccharomyces pastorianus
atgaacataaaggatagaacttcagaatttcaacaaagtgtgttgagttacaagaaaagaaacaaaaactttagagaacagcagagggaacgtctacaagagaaagaaagtgaaaactttgccaacaacacaaccggcaatgggaaaagtgtctctgagtttcaaaaaaaggcttctggcatagctcacgaaatttcatccaccgcacaattattatcgaaattagcagtgctggccaaaaggaaaccgatgttcaatgacaaccctgtagagattgccgagctatcatttttgatcaaaaggaagatttatgccatcgaacaaagtttagtgcaattaagtcagctcaagaaaaccgacgtgaatggcaacacatcaagtcaatcttctaagcaacctagtgccgtacagcactccaaaaatgtcgtaaatcttttaaacacgcaaatgaaaaacatatcaggaagttttaaagacgtattggaggaaaggcaacgactagaaatggctaacaaagacagatggcaaaaactaaccaccgacactggacatgcaccagctgatgaccaaacgcaaagcaatcacgccgcggacttgaccacgtataacaactccaacccattcatgacctcactactagatgaatcctcagaaaagaataacaactcgtccaaccaaggagaactgtctttccctcaaaacgactctcaactaatgttaatggaagagggacagttatccaataacgtctacttacaagaaagaaatagggcggtggagacaatagaatccacaatccaggaagtgggaaatctcttccaacaactggcctccatggttcaagaacagggcgaagtaatccaaaggattgatgcaaacgtagacgacatcgatttaaacattagtggtgctcaaagggaacttttgaaatactttgacaggataaaaagtaatagatggttagccgcaaaggttttttttataatctttgtatttttcgttatttgggttttagtcaattaa

SEQ ID NO: 77643 - DNA, 3510 bp, Saccharomyces pastorianus
atgagtcatattgaacaggaagaaaggaagaggttttttaacgatgaccttgacacttcagaaacatcattaaacttcaaatctgagaataaagagtcgtttttatttgcaaatagtcataatgatgatgatgatgatgttgttgtatcagtgagtgatacaacagaaggagagggagaccgatctattttgccagttaggcgagaaatagaagaagaaggccagaatcagtttatcacagagcttttaaggattattccagaaatgccaaaggacctagtgatggaacttaatgaaaaattcggcagtcaggaggaagggctctctttagcattatcacattactttgatcacaatagcgggacgtctaccagcaagataccgtcttccccgaatcagctaaatacactctcagatacctcaaattcaaccttgtccccatcttcattccatcctaaaagaagaagaaaatacgggttcagaaaccaaacacgattagaagataaagttacttggaaaagatttataggtgctttgcaagtcactggtatggctaccagacccaccgtcaggcccttgaagtacggctctcagatgaagctaaagagatcaagtgaagagatttctgctactaaagtatatgactcacgtggtagaaagaaagcgtccatggctagtttggtaagaatttttgatatccaatatgatagagaaattggcagagtttcggaagacattgctcaaatactataccctcttttaagttcgcacgaaataagttttgaagttacattgattttttgtgataataaacggttgagtataggtgatagctttattctacaattggattgctttttaacatctctcatttttgaggagcgtaatgatggacaatccttgatgaaaagaagacgtacagagggaggaaataaaagagagaaagacaatggaaattttggaagaacattgactgaaactgacgaagagctagaaagccgctcgaaaagactggctctactaaagttatttgataaattgaggctaaagcctattttggacgaggagaaggcattagaaaagcataaaatagagcttaatagtgaccccgaaatcattgatttagataacgacgagatttgctctaatcaagcgactgaagcccataacaatctccgagatactcagcacgaagaagaaacaatgaacttgaatcaattgaaaacattttataaggccgcacaatcatcagaatctttaaaaagtttgcctgaaacagaaccttctcgcgatgtcttcaagctagaactaagaaattatcaaaagcaaggtcttacttggatgctaaggagggagcaagagtttgccaaagcagcctctgatggtgaggcttcagaaacgggtgctaatatgataaacccattatggaagcagttcaaatggccaaatgatatgtcgtgggcagctcaaaatttgcagcaggaccatgtaaacgttgaagatggcatattcttttatgcgaacttacattctggtgaattttcgctagcaaaacctatattaaaaactatgataaagggtggcatattatcagatgaaatggggttgggtaaaacagtggcagcgtattctttagttttatcttgtcctcacgatagtgatgttgttgacaagaaactgtttgatattgagaacacagcagtctcagataatcttccaagcacttggcaagataataagaaaccatatgcttcaaaaacaacgctaatcgtggtcccaatgtctttgttaacgcagtggagtaacgagtttacaaaagctaataattcccccgatatgtatcatgaggtgtattatggtgggaatgtttccagtttgaaaaccctattaaccaagacaaaaaaccctccaactgtagtccttactacatatggtattgttcaaaatgaatggactaaacattccaagggaaggatgacagatgaggacgtcaatatatcttcaggcttattttctgtcaatttttatcgcataataatcgacgagggtcataacattagaaacagaacgacagttacatctaaagcagtcatggctttacaaggcaaatgtaaatgggttttaacaggaacaccaattattaacaggcttgacgatttatacagtctggttaagtttttagagttagatccctggcggcaaattaattactggaagacctttgtatcaacgccttttgagagtaaaaattacaaacaagcatttgatgtggtgaatgcaattttggaacccgtattattaagaaggacaaaacaaatgaaagataaagatggtaagccattagtagagttgccaccaaaggaggtcgttattaaaagactccccttcagtaaatctcaagatcttctatacaagtttctgttggataaggctgaggtttctgttaaatcgggtattgcacgcggtgatttattgaaaaagtactccactatccttgtccatattttaagattgaggcaagtctgttgccatcccggtcttattggaagtcaagatgagaacgatgaggatttatctaaaaataataaattggttacggaacaaacggtggagcttgactctttaatgcgtgttgtttccgagagattcgataactcattttctaaggaggaattagatgcaatgatacaaagcttaaaagttaaatatccagacaataaatcgtttcagtccttagagtgctccatctgcacaacggaacctatggatttggacaaggctttatttacagaatgcggccacagtttttgtgagaaatgtttatttgaatatattgagtttcagaacagtaagaatttgggtttaaagtgccccaattgccgtaaccaaatagatgcttgtcggttgttggcattggtacaaacgaatagcaactcgaaaaatttggaattcaaaccatattcaccagcctccaaatcaagcaaaatcactgctttattaaaggagcttcaattgctacaggatagttcggcaggcgaacaagttgtcattttttcccaattttctacatacttggatatcctggagaaagagctaactcatactttctcaaaagatgttgcaaaaatttataaattcgatggacgtctctcattaaaagaaagaactagtgtattagcagattttgccgttaaagactatagcaggcaaaaaatcctattactctctctgaaggctggtggcgtgggtttgaatctaacgtgtgcttcccacgcttatatgatggacccatggtggtcacccagtatggaagatcaggcaatcgatagactgcatagaattggccagacaaacagcgtcaaggttatgagatttatcatacaagatagcatagaagaaaaaatgctacgcattcaagaaaagaagagaactatcggtgaggccatggacacagacgaagacgagagaagaaaaaggagaattgaagaaatccagatgctgtttgaatag

SEQ ID NO: 77644 - DNA, 1509 bp, Saccharomyces pastorianus
atgacagaaagtgtaggtggaaataaactagtagaccttttggtaaatgttcaatccattttgaatgctgcctctgtgaaatgtcatgtagtagatgaaagttttccagccaagttctttgagaaaaatccggataagatatatgaatcatattgtaaattcattaaaaatagaagtaactctgaaggtttgatacgtaatgaagataaattagttttgacaactatcaataagaggtttgaaaatggagagtacgaacccatacaaggtgggttttataagctgtatcacgacattaagctggtttgtacaatcctcattcacttttatcctcagggtacaagaaactaccaattagtcgacaagttctacaaattttcttcagagcttttattacgagaatgttgtaggataggaattgctctaacgcaaactaataatattaaatcaagaagtggtaagttgttgagcggaaacgagatggatgaatacgacgatgacgatgcaacagaactagacaaaataatctcttatgattttattaagatttctatgaattacacagtaccgatttctcaaacatatcagataagaacgaaggatatggaccttttttcttcgataatttctaaatctaatcttgacaaaagacctcatgaacttcctaatacgaacttcaaaataaacaacgtcttacctcaaactgatatagaaaacgaagctccaagattaagatttttagccgctaatactagtaatattccggaccctacgttaccgccaactgaaatgatgactagatttttgcatccaaattggtatgctttacctacaaccgtctggctaaaatatggtaattataattcttgggcaccttcctttaatgaaaacggcaccgttgtggattcgacaacaaggggtcttatttggcttgaaagaattggttacatggacttgtatgaaaaaaatgaaaagaaagtaaaacaagaagaattactgaacacgaatgaagaaggcataaacaggaagcagaacgatgaaaacaacaaaaatgttgacggcaaaagcaatggcgttcaggacgatagtggtgataatgataatgatgcgactatcgcttctgcaaattcagagagtactgagaataaggaacaattcataatcaagcttcaaaacttatataattggacaccatctaattacattggagatgacgaaattgagaactttcgaaatggcacaccagataagttggtttcagagtctctcttaaaacttaaaaaacttagaaaggagaggattttaaataaagttttgaagcctactacggaggaacgagaactatacttcaaagtgaaaagaatactaaaggaggttatcttagcaaagaaggtttccaaggttcctataaacaatgtaagggcctttccagtattacaaacaaactataatggtagcatacctgtggtaagggcgcaaccaggtcgtaaacggaaacacaagaaataa

SEQ ID NO: 77645 - DNA, 1422 bp, Saccharomyces pastorianus
atgcgatcttatatgcagattcttcaaaaatttgccaaatttattgggccagggatattagtcagtgtggcttatatggacccaggaaattatgccactagtgtttccggtggtgctcaatacaaatataccttattattctctatttttatatccaacatttttgccgtacttttgcaatgtctctgtgtgaagctgggtactatcactggctatgatttggctgaaaactgtcgtcataatttgcctaaaaagctaaactataccctttacctgttcgctgaagtggcaatcattgctactgatctggccgaggttgtaggcactgccatcgctttacagattcttttcaaaataccactaacttggggtgtcttattaacggtgctagatgttttgctaattttaatgttctacacaccaaacggccagtccttaaaaaaagttaaggttttcgaatttggcgttgggattttggtcattggaacttgcatttgctttgttttggagctgtttaaagtttcaatcccagacaaagctgaattgtttaaagggtttttgccttcaaatatcatttttaaggaacaacaagctctttacatttcattgggtatcttaggtgccactgtgatgcctcattcattatacttgggctcatccattgttaaaccaagattgcacgattacgatttgaagaaatacggtaaagttaatgctcgcccaagtttaagcgctataaaatacacgttaaactatgcgtacgctgaactaatcatttctttgttcttaattgccacctttgtgaattccgctattttaattgttgcaggtgctactttatcaggccaacctgaggcagaggatgctgatttgttatctatttacaaactactggtccactacatttctcctgcagcagggttaatctttgcattggccatgttatgttctggtcaatctgccggtatcatctgtacacttgccgggcaaatcgtttctgagggatttttacagtggtctttaccaccttgggccacaagattgtgcaccagattgattgccattgtaccatgtttatttgttactttaaccatgggggaaaagggaatttcagatattttgaatttttctcaagtggtcttatccttaattttaccaatcgtatccgctcctttaatttattttaccgcaaatagaaagttgatggttgttcatgacgaaaatggtgtggtaagagcacctgccgatgttaacgccattgctgatgaaaccactctattgaactccaaacacagcaaaatagttgattttactaacagtcgtttgttgacctatacctctgttttcgtatgggctttaattgggagcttgaactgctatttggtgatttcctacctcttaggtgctgacatccatttttaa

SEQ ID NO: 77646 - DNA, 2088 bp, Saccharomyces pastorianus
atgactatacatcagttatctccagaatcccaatggaagattgtttctagttcctttatttacggtccggtagctgctgtaagggaattattagataatagcatcgattcgggtgctaaaaaagtattcatcgatgtagattccaccacgggaggatgtgaatatatatcagttaaggacgatggatcaggtgtggatattatcgacagaccttctatgtgcttggaacacaccacatcaaagatgagtagtctcggagatatttcgattctgactactcttggattcagaggtgaagcattgtttcttttgtcaaacttgtgtaaccagaaaggctcaatgcaggttgaaacaaaaactgcagatgatgtcattggagaaaaatggttagttgatagtaagggtggtattaccaatggaaaaaggtacaaggtatcttgtcccgtggggactacagtaacattaaggaaacttctgggagggttacgagcaaggtatctcgaaatttcttcgaggccaagaaaaacattcgatgaactaatctatttaataaaccattattctctaattcatagaaatattcggttttatttttcgttggtgtcattacaaaaaaatggtgccatagagcgtaaacaaatgcaagaaacgttagaccctaagatttctagagctagaagtttgtccctactagctagactaaaaaagcctgtgccgctgaactttattgtagaagaaaactttgttatcgacgaaaaaataaatttagatttgatcttaccgaggatggtgccagagtctgacgttattaatataaagagacgatttaaatttttatctgttaatgagagagcgctatctttgaacttggggacggggaagactatttctaagttactatcgtcaatctatagagatttctctttactagatcctatggtttggtttattaatttaaattgcgatacaaagcttcttgacgtaaatatcgaaccagagaaaaatgacgtgatgatcaaaagttttgaagtgatacttaagaaaatagagaataagttaaagttgttattggaggagagaattggcatcgaaacaaatatgctgggagataaacatgttcagtcttctatcaacgaaaaaacttctccaacactggtgatacctacacccgacgcagaaaatgaaatatcaaagggctgtggtgctgttagtggtaaagacaagactgacgtcccacaaaaaaactcagatttgatagtaccaactttttacgatgaagcaaacttagagaatacgaccattgtcgctgctactccttcacctacaaaatttagcgaggataaagctcttgacgaacaaactcagctgaccatttcaagttatagaacctcgagttccgggtctatggcttccgaggacggtactaattggcgacataatttccaacaagaactaagcgaaaatagtgaagtagcaggagctggatcctcaacattaccctcgtcattaacttataactatatagaaactattccagagaacgaggatttagaactttctaaggacgcttctatttctaatccttttatgatcacaaaaataagaaacgtcaacaagaaactgagcgaaaacttacttgaggccaaacgtactagctgtggagatgccaataaaaggggaatgcccaacgaaagacagctttcaaatacagaaaaaaaggaactaataaagcttcagcaaacctacggtaaaagaaacaataccgtggacatggccattccacgaaattcgaaaaaaaaagtaactgataattatataaagaaagcatcctgcatgcacaaaacaaggccgaaactcatgcatttttccgagtataccaacaactacgtctataccctgaagaatgaaaaaattgttaagcatgatagcgataactttgccaaagaaactctgtggttacgatcgagggacgatgccacaagcccttcttccagtcttttgcaagccttgcgagcgcatgtgaagaaaccgggacacattgaagccacgacaaatgaatggtgcctcttcacgccagacagcccctga

SEQ ID NO: 77647 - DNA, 612 bp, Saccharomyces pastorianus
atgaaagaggcagaacttagtgcgacagaaagccaagatgagatcccaaagtctaattccttattaattatagaaaaattaacaaaggccgtttgtagcctttattttataaattgttttatggtgccatcagtagataatttgattgaaaagtacccaaaagcaatcatcattaagatcatagatatgattctgggggcggtaacaatttccctcgttattatagttttctttttatatcgaaagaacggtcattttaaaaatgaaaataaaacaaagccaaagagatgttcgaaggtagtatgtcccagctgtgctgccagaaaaaagtatcctaaatggtttcagctaaagtatttgttattggtatcaatgactgctttcagcttctacttttgtaccaaaattaggtttttttttaaaactgaccaaactattaatttacaccgactatcacagctatttagattgcagctaggctggatatgtactactgcattattattctatttttacgatgcgttgatattacatagcgggttcattgaagggtatagatgtgtcaatggaaagggagcgatgtctgaaggtaaaaccgggcaattaaattga

SEQ ID NO: 77648 - DNA, 252 bp, Saccharomyces pastorianus
atggctgatcaagaaaactctccactacatacagttggtttcgatgctagatttccccaacaaaaccaaacaaagcattgttggcaatcttatgtggattatcacaagtgtgttaatatgaagggcgaagattttgctccgtgcaaggtcttttggaagacctataacgccttatgtcccctagactggatcgaaaaatgggatgatcaaagagaaaaaggtattttcgcaggtgatatcaactcagactaa

SEQ ID NO: 77649 - DNA, 675 bp, Saccharomyces pastorianus
atgatatttgctccttctttctccctcattaaaaatattctcctggtaagctttctaatcagccacagttttgctgccaaaactttaacgtctagttccaatgacgatacacttgccaggtccgcagctgcagatgcagacatggcattcttcatggagtttttaaacgatttcgacaccgcttttccacagtatacctcatacatgatgcaaaaccatttaacactacctcaacctgttgctgactactactatcacatggttgatttggcctcaacagcagatttacaatctgatattgctcagagttttccgttcactcaattccaaacattcattacggcctttccatggtatacctctttgctaaacaaagcctccgccaccaccatataccttccccaacacttcataacgggtgagacagaagctaccatgactaactcctcttatgccagccaacaaaactccgtttccaattctgttcctttctcgacagcgaacgcaggccagtccatgatttccatgactaatgaagaaaacagtacaacagcacttatatccgcatcaaactcttcttcaacatccagaactagtcaatcacagaatggtgcccatgccaaaagcttatatttccccatggcgttgttcggaatctttgcagttgccctttaa

SEQ ID NO: 77650 - DNA, 321 bp, Saccharomyces pastorianus
atgtatgaggtatactgtggaaaagcggtgtcgaaatcgtttaaaaactccatgaagaatgccatgtctgcatctgcagctgcggacctggcaagtgtatcgtcattggaactagacgttaaagttttggcagcaaaactgtggctgattagaaagcttaccaggagaatatttttaatgagggagaaagaaggagcaaatatcattgatacgcaatattttcaggaatgttgtaaatggttcgtaactggatatcgaaatcacttgattagaaacaatacgccggaatatgatcaggtaaagcagaataacaaagaataa

SEQ ID NO: 77651 - DNA, 486 bp, Saccharomyces pastorianus
atgaagatcagtcaatttggctctttagctttcgccccaattgtgctactacaactgttcattgttcaagcgcaacttctcacagattcaaatgctcaggatttgaatactgcccttggacagaaagtgcaatacacctttcttgacactggaaattctaacgatcaactacttcatcttccaagcaccacctcttccagcattattactggttcattagctgctgctaatttcaccggttcttcatcatcgtcgtctataccaaaagtcacttccagcgtcataacatctataaattaccaatcctcaaattctacggtagtcacccagttcacgccattgccttcttcgtcgagaaatgaaacaaaaagctctcaaacaactaatactataagttcaagtacaagcacaggaggtgtaggttcagtcaagccatgtctttacttcgttttaatgttagaaacaatcgcttatttgttttcttaa

SEQ ID NO: 77652 - DNA, 312 bp, Saccharomyces pastorianus
atggttactcaattcaaaactgccagcgaattcgactctgcaattgctcaagacaagctagttgtcgtagatttctacgccacttggtgcggtccatgtaaaatgattgctccaatgattgaaaaattctctgaacaacacccacaagctgatttctataaattggatgtcgatgaattgggtgatgttgcacaaaaaaatgaagtttccgctatgccaactttgcttctattcaagaacggtaaggaagttgcaaaggttgttggtgccaacccagcggctattaagcaagccattgctgctaatgcttaa

SEQ ID NO: 77653 - DNA, 486 bp, Saccharomyces pastorianus
atgaagctaggacatcgtgagcaacaattctacttgtggtacttcatcgttcacattcccatcaccatattcatcgactcatcagtggttattcccgctaaatggcaactagggattgcgcaaaaggttgttagtgatcacatcgcaaagcaacacgatttcctgctatcagagaaaccagaatggctatactggtttgtagtccttgagctagttctgcaactaccccttttcgtctatttcgtcaataaattctggaattcaagcgaattacaagttaatacaaatagcagattgaaaaagtggttgcgtatctatggctggaatgcctctctaactaccttgatatgtatcgttgttattttcaagcgtggttacattccttacgatgtgctaaaaacaagcttgtccatgacccagaagtgtcagttagcctcggtgtacctacctacattcctaattcctttgcgtttgtgttttgtgtag

SEQ ID NO: 77654 - DNA, 753 bp, Saccharomyces pastorianus
atgaagttcgaagacctcttggcaaccaataaacaggtgcagtttgctcatgcagctactcaacattacaaaagtgtcaaaactccagatttcttggagaaagacccacatcacaaaaaatttcataacgcagatggcttgaatcaacaaggttcttcgaccccatctacagccaccgatgcaaatgccgccccaactgcttccactcacacaaacaccacgacattcaaaagacacattgttgccgtagatgacatatcgaaaatgaactatgaaatgataaagaattctccagggaatgtaataacgaacgctaaccaagatgagatagatataagcaccctcaagacaaggttgtacaaggacaatctttacgctatgaatgacaactttttacaagctgtcaatgaccaaattgtaacattaaatgcagcggagcaggaccaagaaactgaggaccctgacttatcagatgatgaaaaaattgatatactgaccaaaatccaagagaacttgcttgaagagtaccaaaaactttcacagaaagaaagaaagtggtttatattgaaagaactactgttggatgcaaatgtagaactcgatttgttcagtaatcgtggcaggaaggcaagccatccaatcgcattcggagcagtagccataccaacgaacgtcaatgcgaattcactagcatttaacagaaccaagagaagaaaaattaataagaacggccttttggaaaacattctttaa

SEQ ID NO: 77655 - DNA, 327 bp, Saccharomyces pastorianus
atggatatgcttcataataaatgtagtgatgctatcaaaagcacctccaatagcaatttgagtaatgaggtagacaaacaaaaattgcaatacgatgacctcgggaacaccggattttctgaactatttgagatggaatctcaagataataatgatagcatagaggatttcttgttctttaatataaatttaacccaggaggttgagttcgagaaccaaagacaatatgagcacacgaaaaagacaaagaagcataacccattctatgtaccgtcagaggtagtgcgagagatggtcaagaaacacgcattgaatggcagaatatag

SEQ ID NO: 77656 - DNA, 1539 bp, Saccharomyces pastorianus
atgaaatctaaattaattttggacccaaaacaaatggcattgaaaatgtgggaattgcttattcctaaaatctcacttaacatcctatctatcatctatgaacaatttgattatgagaaaatgttagaaaacaaatccacagaaattatttttaaagatctggtgaaagagttacttggaatttgctttgcacaatgtggaagcaaaattgcaaggtttttgctagtaaaatcacaaggtgaagaagagattaattttgggaaaatcgtagaatattgcaaaggtaaaaaactgcaacttatcaactccacggcaaacgaacatccggaatatttatccttaccgtttgagccttattgtttctaccaccgatttgaatatcctgctcaaattcttttgcatcagcccatcattttggccaaaaagtatggtgtttcgtgttcaaatttaaatttcctatatggattttatacgaggttactgacactaagtgggctatcaataaatggtggacggtgtgagcatgccttgtcgatgttggacagcaggattggtggtggtattaacgttgcttcaggaattaatagcggccaagattttaccgatggtgataacaaggatcaagataaaggcaaaaaccgagtggacaaaaatgtaaaggaaggttctttcattagtttaacacaacgattcacgatgacaagtccactggatgtcaatgatccagctttaccagcggacttagaaaagttgtatttaggtgcagaatacattagcaattgcgacgcaaatacatctggtggtcaaaaacgagtaaaatctccaactaaagcagatacaggctacgatgataaacacttgcctgatgatacgatacatacatttgaagatgaatatttggccgatgaagacgacttttcttgccttggaattgacaaaagaagctcaacaaagcccacaaagcctctagaaaaatttggagtggttgctgtgccacacttcatcaggaggttttctattaaaaggtcgagcaaggataaatcaaatgatatgaaaagaccatatactacaagcagcttggagttgcaattaaggtcaaatcactttatgttcgccaaagaataccaagacttacatagacaattatattacgaagttaaaccaaggacgcaatcagaattggacgcaagacgtcgaaactatgctgaattagaatctcagatgtggaaaattaaacatcggttcaatattcatagaggagcactgcctcgtccacgaacgaatccgtatgagctattactggaccacattgatgttttgaaccgtggcaacactggggatattttgagatttaccactagtagatacggtggtgtagatacgtatgattccatcttgagggaccaatccacgatcatggaacttttagataaacggtgtgcctattcacctccagtactgttcgataatgaggctaaagaacgtgatcatgatcgcgattgttatcaagattacaatcacgaccaccggagtcattaa

SEQ ID NO: 77657 - DNA, 1809 bp, Saccharomyces pastorianus
atggacgaggttgacgatattctaattaacaaccaggtggtggatgacgaggaggatgacgaagagatgctgagtgggctggaaaacgactcaaagcaggacctcgaggggaatgatgacggtggtgaagatgaagaggatgacgatgatgatgatgaggacgatgatgatgacgaggacgaacgagaggaggacgatgaacaggaggacgacgatggtgaggacgacgccgcaagaatggataagattgctacaccgacgaatgagcaccagcatgatgagcaaaaggctgctgctgctggggctggcggtgctggcgatagtggcgatgctgttactaagattggatccgaggatgtgaaattgagcgatgttgatggaggagtggggtccagggaagcatcttcctctacacacgaagcctctgctaatggagaggtttatgagtactataagcacatgttgcatgccgcacagattgcggattcgtacaatatctaccccacggcagccatacccatccagacgcacgtcaatgcgttggccgtgtccaggggtctcaagtacctgtttctgggcggtagcgatggatacataaggaagtacgacttgctgaacacgcttgaggggaaactttctctaactatcctgcagaagcattcgttggctgagtctattcagaacgcgggtatcttgcagtcgtactgggaaaatgagatcccgcagaaaaaatcagaaatgaaactctccgctaataagacagattacgagcccaaagttagccccgttcattctttggaagtccaaagcgaatgcctctttatactgagcgggctacagaatggtgggattaccatgcagggcgttcgctacatggaggggagcattgcgcactattttaagggcaggaatggacatacccaaatcgttaacatactgagattaaacggtcaagaggacaggtttttgagtggttcctgggataagcgtcttttggaatgggatttgcagacgggtgacatagttaatgagtttaaaaaatcaaggtctgaattgtcatctttggaaatgcggccgctgtactcgtccgtggatgtgtccggtaacgtcaacagtggtaaagagaatgaaaatgcagatgacgatatggattctctgtttggtgatgaagacgaagacgaaaagcaagatgctggcaacgaacccgtcgagacgggggatggttctaatggtgaagagaacaaagaacagatatctgaagaatctttgaacatagtctatgatgaatccgtttttatgacctcagggttgaacggttccgtgcatatttgggaccgacgcatgacgcagtcgccagcattgtctctggagagaggtgcaggcgtcccaccgtggtgtttgtccgcatgttggggtgtagatggtgatcatgtgtatgcagggagaaggaatgcctgtgtggagcagtttgacttgaagatgccctcgaaacctatccataatttgaaactgccttctatttcagggcctgtctcttgtgttaaagccatgcctaataacaagcatttactatgtgcatcgcgggataatatcagattgtacaacgttgaaattgcagtagatgcttcgaattcgactacaaagagttctaaagtgccgttcctcatcgtgccgggccatcacggtggtattatatcaaacttatacctcgaccccacttcaagatttataataagcacaagtggcaacagaggctggcaggggaattctacggacacgacccttatttacgatatagacttagaatag

SEQ ID NO: 77658 - DNA, 2550 bp, Saccharomyces pastorianus
atgtccatagcgcgattagtatactctcttttcagaagagtacgatcggttctcttacttttcattaccatatcgctattgttttactatacgttccagaatgaaatcgatatcttgaattcgtacgctttaaacgactcactaccgtccataaacaactatgagcacaatacagaaggttcttcgaaactggatcctccagacctatcgtcaaccggttctgaccgaatagccaccgacaaggaaaatggcaacgttgcagtggatttgtcagatccagctacattgagagaaaaaaacaagtactttcccttgctgttaaagggatcgtctcaccagattggttcgaatttaccaatttcgtctcttttgacatataaggaaaagtatcccgtcttgttcgaatactcatcaccttccttaacttctacaagccagaatgacgttcataagatacagccggcaatgcaattgccaccagatgttgatatgataaaacagataaaggacattttcatgaaatcatggaaccaagagcagttgctgctgaaaagtaacctcagaagggaatctacttggcccatagatctaattgattctctagatacattgtatctatgtggcgagacgaaactttttcaagattctgttaatataatagaagattttgactttcgagtacctccgttagcaatggaagttattgatattcctgacatcactacccgtgtcctagaagggttactgtctgcatacgaattatctatggataaacgattacttaacaaagcaaaacatgttgcagatttcatattaagatcatttgatacccctaatagaattcctattttgaaatatttctggaaatctgatctgagaaatcgatttccagaccgcactgttccatcaggtcaattgactactatggcactcgcgtttatcagattgtcacagttaacccgtttgaataagtattttgatgctgttgaaagagttttcaccactatacgtcaatcatataacgaatttgatatggagtttatgctgcctgacgtcgttgatgcgtctggttgccagttattaactcaagaggaaattgagaatggtgcacacctaaagggatccagcatcatgaaaagtatcaatgaaaatttcaagttcgtacactgtcaacagttagggaaattcttaaatcctccaatggatgataatagcctccgaggacaatctcaataccaggcttatagaattaatgaaaaaacagtacccattctagaaaatctatttaaaatcaatgacctcttccaatcttcttatgatatcctggacggctcaagtaaaagtactaatgctgcaacgatggaccccagtattggttcagaggtagaagcagtcgacgaaataattgagaaaagaaacttcaaagacggtgctaaaaaagattcgacaaaaaacaccgtaggtgataaatcattgatagactcgcaaacgtttttaacaaattccatcagtaacattttcaaattcatgacttttcgacccatgttgctcaagcaaacggaaaacaaaaagtttaattttctgaattccattctaacaaaatctcaattcatgcccacgactaatgagctagatgtcacgataagaaaatcttacgatgtctcgttatactcatgcagacttggcggcattctaggtttaagttcacgtgttccccaccgaggcggtatcaacacgaaatatattttaccatcgtcactattggaaatgagcgaaataataacacaaagttgttttatgctaatggaggagttcgacgggctgctccctcaaaaattcgagttggacccttgcactgatgagactaatgggaattgtgagtttaacggcgaaactaaatcacgaatgattgccaacggcgaatatgaaacttttgaaaatgacctagatgtcgggatcaaagtttcgaattatgggaaaggtgggaatgaccagaaagctaagagaaatttactaagcaaagatggggtaacagagactcaaaacataaaaggtgatacagttggaagctcgaaatcgattgctgaaatagacggcgacgaagtaacgcaaatacgtagagtttttacgcttggtaaggatatcaaaccgcatattacaacggacgataccatgggttctcagtggaaaaaccatccggactggccattttgggtcaacaaggtagaatccagaagattgttggattcgaatatcattgaatctatattttatatgtacagaatcagtggagaacaaaaatggagaagcatgggtaagcagtcttttggaatcttaatgcaagaattgatggaactaaacagtggtgccaaaggattgtggcaaataaaggaattttatgaaaacggtgaaaaagtgaacaatgatttacctagctattggttctccagaacattaaaatactatttgctactattcagcgatggtgacaaggtttccctggacaaacacatcttaactcaaggagggcacataatcaaaaagaaatga

SEQ ID NO: 77659 - DNA, 1788 bp, Saccharomyces pastorianus
atgcctaccgtctccgtgaacaagcagcaattatttgatcttctaggcaaaaactacacttcccaagagttcgatgaattatgttttgaattcggtatggaaatggacgaagacaccacagaggaggccttgaaaaccggggaggagccggaattgaagcttgatatcagtgccaatcgttacgatttgctttgtatcgaaggtatttcacagtcgctgaacgaatacttggaacgtaaagaaagacctgactataaattaagcaagccaaccactaagttgatcatcgacaaatcaacggagcaaattagaccttttgctaccgctgctctattgagaaatatcaagcttaacgaaaaatcttacgcttcttttattgccttgcaagataaattacatgccaatctatgtagaaacagaagcttggttgccatgggtactcacgatttagattcaattgaaggtccattccattacagagctctaccaccaaaggacatcaagttcgtgccattgaatcaaacccaagagtttactggggacaaattgatcgagttttataaatctccagaacagaaaaacaacatagggagatacgttcacattattgaggattctccagtcttcccagttattatggacagcaaagatcgtgtttgctccctgccaccattaatcaatagtgaacattcgaagatctctgtgaacacccgtaacattttgattgatataaccgccaccgataagaccaaagccgagatcgttttgaacatattaactacaatgttctcacgttattgtgacgaaccattcacggttgagcctgtagaaattgtctctgaacacaatggccaatcccgtttggcgccaaacttcaacgatagaattatggatgtctccattaagtacatcaactcctgtcttggcctagatcaatccgctgatgaaattgctcattgtctaaagaagatgtcgttgcatgccgttcaatcaaaggaagacaaggacatcttgcacgttgacattccggtaactagacctgatattttgcacgcttgtgatataatggaagatgctgctgtcggttatggtttcaataatttgccaaagggtgagaaattatccaatgccaacttcattgccaaaccattaccaatcaacaaggtttctgatattttcagagttgcatcctctcaagccacgtgggttgaggttttaccattgaccttatgttcgcacgatgaaaactttaaatttctaagacaatccgacaatggtgatttagctgtcaaattggccaacccaaagactttggaataccaagttgttagaaccactttattgcctggtatcttaaagacagtcaaggaaaacagaaaacattccttgccaatcaaagtctttgaaaccggtgacgttgtatttaaagacgacaaactagaaaggaaggcgtacaatgaacgtcactgggctgccatctacgtgggtaagaattctgggtttgaaatcattcaagggttattgggtaaaatcatgcaaacttttagaacagaatggattgcagactacggtgctgctgcttctggcagaggttactggattgaagaagacgattctgtgaaaacctacttcccaggtagaggtgccaaggtcatgttcagatccaaagaaggcgctgagccaaagcaaatcggccacttgggtgtcttgcatcctgaagtcatgatgaatttcgacgttccattcgctgcatcctttgtagaggttaatgccgaagtcttcctataa

SEQ ID NO: 77660 - DNA, 1098 bp, Saccharomyces pastorianus
atgttgcttatgagacgctttgcctttttaacttcttcagtatattttaaatatataccaatttattcacaatatcattactcttctcagtttccaattaacatgaatcctaaaaaagtggcccaattgcccgttcacaataaatcaacgcttccaccacaggaaataatcgatctttttaaaataacattcttagaagagctatatccaaaagatcaagacaatgaaaagtcaccgttaactgaacaaatacaggcggtaaaatctgacctttataacagagattacaatgctgctttcaataacgactcgaaaagaatagcatattgttgtcgttggtcaccgtccagagcaacaagttacgcatcagtatttgcacatttccctgagcttctaaagattatcagatgcgaaattgatgacaaggactcaaatgtgctatgcataggtggcggcgctggtggtgagctggttgcattagcgagcatattcactttatcgagagatttttcgtctaaatttgcctctgctttgaaaatagacaacgaagtaaacaaaaagcctagaaatttaaacatacaactagtagatatcgccgactggtccacagttgttgaaaagctaacagctacaataaagtcgaaatggctatatggtgattcagaagcagagtcatttaacgtcaactttacccacaaggactgcctacaaatgacagagccacaagatatcaagatatatcaaggcctcgacctaataactctactttttactacaaatgaactatttacacagaaaaaagtggagagtataaaatttctgcaacggttaaacgagaactgtgccccaggctgccatcttctcatactagagagtgcaggaagctattctcacattaccatcaacaacaagaagttcccaatccaatttcttatcgatactatcttagtaggcaatagaaaggacaagggaacgacaggtccatggtcactagtatccgagaacgacagtatttggtatagaatggacccaaaactcgactactcgattccattggaaaacatgcgattcttttaccgtctttatgtcaagaactaa

SEQ ID NO: 77661 - DNA, 822 bp, Saccharomyces pastorianus
atgaccgttcccaggaatcgtcccatggcaccatttggcaccattatcaaatcaagaataaaacaaccccagttttattggtttataggccattttttaaccatctttaactttatacaatttcatctttcaatcacgtccaaacaaaaccaattgtcatgctatagaagatcattattttacatatccgttacatatgccatcgttctttaccagtttttcaaaagtgaccagttaaagttcaattttacgcttttgcgccaagagatgaagaaattggataatttgcagtattttgccatgctattcatactttttctcttatcacagtttaacatcataatcagcggctcgttatacagtcccgttatcttttcaatctttcacttcctgaactattttaaggaaaaccttttgccatttttgcctttgataccacttaatttgaaaaatttgttgaactccaaaataacggtattcatccaaaactacaatggatttttcttacagatggcgcaagtatttgagattatctgcggcctacgtgtgggcctcttcttagtgcccttcaattttttcttgttgttggtaagaagagcaaacgtatcgtttgaggtagtgggtacaatgttggcagggctaacctatgtatggtttttcaaattaaggtacctacaaagtgaatctatgaggcagatatttaaacaatatgtccttaggttggatgcatatgtcagccgtactttgcccccatattgttcccgtttatggaacggctataagaatttcgttatgacagtgttttggaagatacctgtgtag

SEQ ID NO: 77662 - DNA, 546 bp, Saccharomyces pastorianus
atggctggcaaagcagggaagaaacaggctagttcaaatgcaaaaataattcagggcttatacaagcaagtctctttgtttttaggaatggctatcgtacgtctattcatttcacgtaaggttacaattggccaatggattaagctggtggctttgaacgttcctatgttcgttgctctgtatatcattgtgctatccggtaagcccaaatatgatggcaatcgcgtagtaaaacaaggtatagacttgaacgacaatacaaatttgatatcatatttttttgatttgatatatctatcactttttggtaacattggtattatagctttcaggacattcaaattttggtggtgtctactattgtgccccatctatgctggttacaagttatatggcctcaaaaacatgttcatgcctggcgctcaacaaactcaggcagataatcgctcaaaaaatgctaatgagggacaatccaaatccaaaaggcagatgaaaagggagaggaggggtgaaactgactctaaaattaagtacaagtatcgttaa

SEQ ID NO: 77663 - DNA, 456 bp, Saccharomyces pastorianus
atgggtacagccaagcaaaatcaaaatagaaagaagtttacgagggagtataaggttaaggagatccaaagaagtattacaaagaaaactagactgagaaaggaataccttaaagctttaaaagatgaagggtatgccgtaccagaaaaggaaccaaaaaccgtggcaaaagaatctgtaaggaagattaaggaagccagggcaatagagggaaagaagaaactagacgagaagaaggagatcaagaaacaaagaaagagaatgcaaaaagatgaattaaacaagcaaagaaacgagcaattggaaagaatcagagtttcgaaggaaaaatttcagaggagagaagatagaaagaagaaattgactcaaagaacaaggacaggccagcccttgatgggccctaagatagaggatcttttggataaaattaagacggatgatacttatacctcctag

SEQ ID NO: 77664 - DNA, 2286 bp, Saccharomyces pastorianus
atgagtgtccagaaaatgatgtgggtgcctcgaaaaatggttggaggtagaataccctttttcacatgttcaaaagttttttcaggtttctcgagaaggtcttttcatgagagtccacttgctcgttctacatatgaagaagaaaaagttttggtggatgaaatcaaacaaaaacttactccagacgatattgaaagatgtaataaattgcgtaacataggtatatctgctcatattgactccggaaaaactactttcactgaacgtgttctgtactatacaaaaagaatcaaagccattcatgaggttcgtggtagggataatgttggagccaagatggattctatggatcttgaaagggaaaagggtattaccattcagtctgccgctacttactgctcttgggataaagagggcaaaaactatcatttcaatttgatcgacactccaggtcatattgatttcactatcgaagtggagcgtgctcttagagtactagacggtgcagttcttgttgtttgtgctgtttcaggtgttcaatcccaaactgtgaccgtggatcgtcaaatgcgtagatataatgttccaagagtaactttcatcaacaaaatggatcgtatgggttcagatcccttccgtgcaatagaacaacttaattcgaaactaaaaatacctgctgctgctgtacaaattcctatcggatcggaatcaagcttatctggtgtcgttgatttgattaatagagttgctatttacaacaagggtgataatggtgaaattatagaaaaagggccagtgcctgaaaatttgaagccattaatggaggaaaaaagacaacttttgatcgaaacacttgctgatgtggatgatgaaatggcagaaatgtttttggaagagaaggagcctaccacgcaacaaattaaagatgctattcgcagatccacaattgctaggtcttttacaccagttttgatgggatccgcactggcaaatactggtattcagcccgttttggacgctattgtagactacttacctaatccctctgaagtgttgaatacagctctagatgtgagcaacaacgaagccaaggttaacttagttcctgcggtgcaacagccatttgttggattggcattcaaattggaagaaggcaaatatggtcaattgacttatgttcgcgtatatcaggggcgtttaagaaaaggtaattacattacaaatgtaaagactggtaaaaaagtgaaggttgcaagattggtcaggatgcattctagtgagatggaagatgttgatgaagttggctcaggtgaaatttgcgctacttttggtattgactgtgcttctggagatacattcactgatggtagcgttcaatactctatgtcatccatgtatgttccagatgctgttgtctcgttatcgattacgccaaattcaaaggacgcatcgaatttttcaaaggctttgaacagatttcaaaaggaagaccctacattcagagtgaagttcgatcctgaatctaaagaaacaattatttctgggatgggtgaattgcatctggagatttacgttgaaagaatgagacgtgaatataatgtggactgtgtcacgggtaaaccgcaggtttcctatagagaatctatcaccatcccggcagattttgattatacacataaaaaacaatctggtggcgctggtcaatatggtagagttatcggtaccttatctcccgtggatgacattaccaaaggcaacatattcgagaccgctattgttggtggccgtataccggacaagtatttggctgcatgtggtaagggttttgaagaagtatgtgaaaagggaccattgatcggtcatcgtgttttggatgttaaaatgctaatcaatgatggtgctattcatgccgtggattctaatgaattatcattcaaaacagctactatgtcagccttccgtgacgccttcctgagggcacagccggtgatcatggaacctatcatgaatgtttcagtaacatcgccaaacgagtttcaaggtaacgtcatcggtttattgaataaattacaagcagtaatacaggataccgaaaatggtcatgatgaatttacattaaaagcagaatgtgccttgagcacgatgttcggtttcgccacctcattaagagcctcgactcaaggtaaaggtgagttttcattagagtttagtcattacgctccaacagcgccccatgttcaaaaagaattgatatctgagttccaaaagaagcaagcgaagaaatag

SEQ ID NO: 77665 - DNA, 2082 bp, Saccharomyces pastorianus
atgtggggggatagtatgcgcgagcttggtgacgctatggataatgagttgaatgcagtgaagccggtggtggaagaaggtggcatggatggtgccagaaaatttattaagggtaagagctttcagaagtcttctaccgaacatatgttgatttcgcccggtagggatggttcagtgccattgaatgggttgaaatcgtcgccggcagacccgcacttgtctgatgttaattctatcttggacaatcatcgtggcggtggcgagacagctttgacgtctgtaaataatattatcatggccacttcgacgaatggggacagtgatggggttgatggagatgccaagaggccgtctatttctaactgttcgtcgagatcatcattttttgacaccgtactgagcacgttttccctaaaatcaaattcacaagatacggttactaatgaagtcaaaaatattgaggtccagtttgcatccgaggaggctaataaaaaattccgccaaatgttcaagccattagctcctaatacgagacttattacggactacttctgctacttccacagagaattcccctatcagggcagaatctatctctccaacacacatttatgtttcaactcaaccgtgttgaactggatggcaaaattacagattcccttgaatgaaattaaatatttagataaggtcaccacaaattcaagtgctatttcggtggaaaccgtgactaacaggtacactttttccggattcatagcgagagacgaggttttccaattgatcacaagagtttggtcaaaggaaaacttaaccaatatcaatgacgttttggaggttgatgagagggtctccaagaaaaagggaatatcatcgaccccttcttccatattcaacaatgtttctaccaatgcatataacgatatcatatcgacgacgactactgaaccaacaagcagggcttcctacatgagcgagaacgacatgctcatcgaggaggccataaggtccgtggacgattacatgggcacaccaagagcatcgccatcttcttcatcttcgtcgtcatcgtcgtcatcgtctttaggctcttcaacaacttattattgtaggcccgtatataggttaaagccaaacgcaccatttcaatatgaggggccattccatgtacaagaaaccatggactttccttataaacctgaggctaataatgaatacgtgcttctggaacgtcaattcagcgttccacccggcctacttttcattatgatgttcaatgaagataatccagtttttgagttaagctttttgaaaactcaagattcgtccaacatctcacacatagggacttttgaaaaagtcaataaagatggacaacattacagagaattccaatacaccaaacagctgcatttccctgtggggcccaaatccacaaactgtgaggtagcggaaattcttttacactgcgactgggaaaggtacataaatgttttaagtataacaagaacaccaaatgttcctagtggtaccagtttcagcaccagaacgaggtacatgttccgatgggatgaccaggggcaaggttgcatattaaaaataagtttttgggtggactggaacgcatccagttggatcaagccaatggtagagagcaattgtaaaaatggacaaattagcgccactaaggacttggtaaagttagtcgaagaatttgtagagaaatacgtggaattgagcaaagaaaaagcagatacactcaagccgttgcccagtgttacatcttttggatcacctaggaaagtggcagcaccggagctgacgatggtacagccggagtcgaaaccagaagctgaggcggaaatctcagaaataggcagcgacagatggaggtttaactgggtgaacataataatcttggtgctcttggtgttaaatctgctgtatttaatgaagttgaacaagaagatggataagctgacgaacctcatgacccacaaggacgaagttgtagcgcacgcgactctattggacataccagccaaagtacaatggtcaagaccaagaaggggagacgtgttgtaa

SEQ ID NO: 77666 - DNA, 603 bp, Saccharomyces pastorianus
atgaagtctagtaagcaattggttcaggacgctaaggattatcgcttcaatccggcgataccattgagaatttacctgaaaacatgcatcggcatattggaaaaggcacagtgtgcgttccaggccaacgacttgtcgctgtcgtttatttattattttagatatgtggatttattgactaacaaactatctagacaccctgagcttttgcgcatggatgcgtcgtcgtcatcgtcgtcatcgtatattcataaaagagaatacctgcaactcataaagttggaagtgcctgcggtctgcaaaattattgaaagcttacgcacccaaattgactctcaatacagcaaattgcaaacatcactcgctaataatatagccaagccgaacataaacgcaaacacaactcccgtgcaggtggagcaacaaccactgccgaagaaatcgttcgacgagtacagcttcaaccaatcaatttcttttttccagaaaatttcaaacgcacaacttaataccggagcaagctctcagagtcaggccactgcccgtgatgaagcctacagactgaattatccggagctaccacgccttacattctccacatag

SEQ ID NO: 77667 - DNA, 501 bp, Saccharomyces pastorianus
atgggtagatattcggtgaagagatacaagactaaaagaagaacacgagacttggacctgatctataacgacttgtccaccaaggaatcagtacagaagcttctgaaccagccattggatgaaaccaaaccaggccttggtcagcactattgcatacactgtgccaaatacatggagactgctatagcgttaaaaacgcatttaaagggcaaagtgcacaaaagaagagtcaaagagttgaggggtgtcccttacacacaagaagtctctgatgctgctgcgggctacaatttgaacaagttcttgaaccgtgtacaggagatcacgcaatcggtgggtccggagaaggaaagtaatgaggccttgctgaaggagcatttggacagtaccttggcaaacgtcaaaacaacagaacctactctaccgtgggcggctgctgatgccgaggcgaataccgctgccgtaacagaggcagagtctactgcctcagccagtacttaa

SEQ ID NO: 77668 - DNA, 1752 bp, Saccharomyces pastorianus
atgtcattcagattattcacgaggacttctcaacgtctccctcgccttaactgggttagtcccatcaggcgatacgccaaacaacctcaatacgatgaagcagagttgtttgcagagaacattaaccatggcgcatataaagcaaagaaaaggccatcagacgagcatttccaatggcctgagaagtctcctgatcagatcacaaaggaatctgaactccaatgggaaaggatggcgaaattatctgctgttgggcaagggatcctcattctcgtggtagtgggtgggttgggaacggcctacttgcgttggccagaattaaaatcctggtggttaatcaagatgaatggcggtcgcataaatgcaacgcaagagcaaagtggacaggattcgttggagaaattgatcagacaaaaggccaaaaatctattaagggagattcctcaagtgcctgcctttcaacttggaatagatcatcctggtgtatacatatggggaaggtgtcattctaaggactcattgttccctgttagagtacttaatttggatggtcgtaaattcagagatatcctattagctccctctgacgatttcaacaccaattttgcaattgacgagaaaggcgatttgatatcgtgggatgatttgggacaaacaaaaacgatattgccagatcaagatttgacctcaatgaagtattctagtcactttttgtacgctttgaataaaaagggtgaaatattggtcatacctataagaacgccggatctgatagcttcgcaagtatcatcaagaaggtcgaaattgttgccatggaagacaaaactaagatatgattggaaattacaaacaaatcagattttcaacggtaaggaaggagaaaaacgtgtagtacaatttgacgctggtagccatcatctggtgttgctatctaatttaggcaaggcttattgctgcgcgacgggaaatgatcaaaaacaagctcaagtatccaaaggacaattcggtataccaacattctcacaattcgatgagtttcctcccaataatcaactattcgaaattgaactactgaacaaatttaaacatgaaggagaagacgttgttcgcaaaagagaaattaaaaagatagcttgcgggtcgtaccatacactggcaatagataagactggtgaaatttatgcctttggctggaataggttcggccaattggcactacctatttcgtacaatctagaatatgtttctttcccaagatcggtaacgcatgcatttaaaccgcatttcccggggatgacgaattggaaatgtgtggatattcattgtgatgatgaaacatcgtttgtgaccattcgtaagcctggctcaacgccagaccatcattatttcgcgtttggtaatggactttttggtgaattgggcaacaacactttcaagaactcgcaatgtgatcccataaaaatcaagtcggatgacaagaaattgaccaactggagttgcggctctcattgtgtgttcactgaaactgaacaagaaaacgaggtcattgcatggggtaataacgaccatggccaactaggtattggaaagaaaactatgaaatgcgctaagccaatgaacattcccgaagttctcaaaccaggacaagacacgacagatttggactcaatttataacagtaaattacacttaaaaaaggagcaacgtgtagtcaccaatggtaataaaagttgcttatactggcgggtttga

SEQ ID NO: 77669 - DNA, 855 bp, Saccharomyces pastorianus
atgactccttccaccccaccaaggtccagagggactaggtaccttgcgcagcctagtggcaatactagttctagtgccctaatgcaaggtcaaaagaccccccaaaagccttcacagaacctagtccctgtcactccctcaacaactaagtcttttaaaaatgcgccattattagcacctcccaattcgaacatgggtatgacctctccatttaatgggcttacgtctcctcaacgctcgccgtttccaaaatcttcagtgaagaggacactattccaatttgaaagtcatgataatggaacagtaagggaagagcaggaaccattgggtcgtgtaaataggatattgtttcccacgcagcaaaatgtggatatagatgcagcagaagaagaagaagaaggagaagttcttcttccccccagcagacctacatctgccaggcagttacatttatcacttgaaagagatgagtttgatcagacacatagaaagaagattattaaagatgtatctggtacgcccagcgacaaggtgataacatttgaattggcaaaaaattggaacaacaactctccgaaaaatgacgccaggagtcaagaaagtgaagacgaggaagacatcatcatcaatccagtgcgggtgggtaaaaatccctttgcatcagatgaactggtcactcaggaaattagaaatgaacgtaaaagggcaatgttgagagaaaacccagatatagaagacgtaataacatatgtcaataagaagggagaggtggtagagaaacgaaggttaacggatgaagaaaagagaagattcaagccaaaggcattgtttcaatctagggatcaagagcattga

SEQ ID NO: 77670 - DNA, 1725 bp, Saccharomyces pastorianus
atggcagttgaggagaacaatatgcctgttgtttcacagcaaccccaagctggtgaagacgtgatctcttcactcagtaaagatttccatttaagcgcacaatctcaaaagtattctaatgatgaattgaaagccggtgagtcagggcctgaaggctcccaaagtgttcctatagagatacccaagaagcccatgtctgaatatgttaccgtttccttgctttgtttgtgtgttgccttcggcggcttcatgtttggctgggataccggtactatttctgggtttgttgtccaaacagactttttgagaaggtttggtatgaaacataaggatggtacccactatttgtcaaacgtcaggacaggtttaatcgtcgccattttcaatattggctgtgcctttggtggtattatactttccaaaggtggagatatgtatggccgtaaaaagggtctttcgattgtcgtctcggtttatatagttggtattatcattcaaattgcctctatcaacaagtggtaccaatatttcattggtagaatcatatctggtttgggtgtcggcggcatcgccgtcttatgtcctatgttgatctctgaaattgctccaaagcacttgagaggcacactagtttcttgttatcagctgatgattactgcaggtatctttttgggctactgtactaattacggtacaaagagctattcgaactcagttcaatggagagttccattagggctatgtttcgcttggtcattatttatgattggcgctttgacgttagttcctgaatccccacgttatttatgtgaggtgaataaggtagaagacgccaagcgttccattgctaagtctaacaaggtgtcaccagaggatcctgccgtccaggcagagttagatctgatcatggccggtatagaagctgaaaaactggctggcaatgcgtcctggggggaattattttccaccaagaccaaagtatttcaacgtttgttgatgggtgtatttgttcaaatgttccaacaattaaccggtaacaattattttttctactacggtaccgttattttcaagtcagttggcctggatgattcctttgaaacatccattgtcattggtgtagtcaactttgcctccactttctttagtttgtggactgtcgaaaacttggggcgtcgtaaatgtttacttttgggcgctgccactatgatggcttgtatggtcatctacgcctctgttggtgttaccagattatatcctcacggtaaaagccagccatcttctaaaggtgccggtaactgtatgattgtctttacctgtttttatattttctgttatgccacaacctgggcgccagttgcctgggtcatcacagcagaatcattcccactgagagtcaagtcgaaatgtatggcgttggcctctgcttccaattgggtatgggggttcttgattgcatttttcaccccattcatcacatctgccattaacttctactacggttatgtcttcatgggctgtttggttgccatgtttttttatgtctttttctttgttccagaaactaaaggcctatcgttagaagaaattcaagaattatgggaagaaggtgttttaccttggaaatctgaaggctggattccttcatccagaagaggtaataattacgatttagaggatttacaacatgacgacaaaccgtggtacaaggccatgctagaataa

SEQ ID NO: 77671 - DNA, 3663 bp, Saccharomyces pastorianus
atgtttgttcatcgtctctggacactcgcatttccttttcttgtggagatatcgaaggcatcacagttggagaatattaaatctcttctggacatcgaagataatgtgctaccgaatttgaatatatcgcaaaataatagcaacgcagtacaaatcctcgggggtgtggacgccttatctttttacgagtacacaggccaacaaaatttcactaaagaaataggtccagaaacaagctcacatggattagtttattactctaacaacacctatatccagttggaagatgcctctgatgatactcgaatagacaaaattacaccatttggcgttgattcgtttattcttagcggatcaggcacgataaacaatatctctgtcggaaaccagatattatacaatttgtcgacactgtctatgacgcctatattcaaccagtctttgggagctgttcaggctgtgctcgcagacaattcttctatctattttggaggaaacttttcatataataatggctccatgacgggctatagtgctctcatttgggactccatatcaaataccacccaacttttaccttttggagggtttggtgaaaactccagtgtgaattccatagtcaagctaaataatgacaacattttatttgcaggccagttttatacactggatgatccttctgcgcttatcagtagttcaaataacggtacgaactcaacctcctcgttaaacgctactacattggagctaggccaacgaattccactgaggtacgcttcctgggattccgagggaagtacaacgtttgcatctgattcgttagtttgtcctaacactaatgaggatgcatggctttatccggatacgtctgggtctctagtttgtaatttaccatatgaagtttcaccaacaaaaataaggctttataattcccaaagttccgatagtgaaatctccgtgttccaaattctgactgatccatccagtagcataatgaatttaacgtatctggacccactaagtggggagttgaagaattgcgatgaattttgccctttgtatagccgagccactttactatcagcaagccaaaatgtatcttcatccatggacatgattaccttcatcgataacaacaagacagacgtaaaatggacgtcagatttccaagactttgcgtttgtgaatgaacttcccgtttcatcgttaaaattcgtagcattaaattcatacggtggtagtgttggattatccggtttggagctctatcaggacacattctccacttatgctaatgattctctcaacgaatatggctgcagcgcgcttaccaatgattcgtcgtcatctacattgtcaagcaatgattggtataatggcctaacaggtgaaagttatatagccgcgaaatatgttccagatcaaaatgagccaattccacgcgtaaagttttacccaaacattatccaccccggtcactacactatcaacatgtatacaccagggtgtcttcaggataatacgtgctccgcaagaggtattgtaaacgtgaccatgtggaatcaacaaaataacacaataatgaagacgtacttgatttaccagaacaatgataatctaaaatatgatcaaatctactcgggatatctagatttctcaccggagatcgttttggagtatgtctcaggaatttatacaaccaacactgcaacagtggtcgtggcagatcaagttaatgtcattactgtttctttagatgcttttaacacactttcagattctagcaacgctaaaaaagaaactttattgaatggtattctccaataccagaaatcaaactttaccaacacgagattgaacgaaacaaaggtaggtaatactactttgaatcttttcccagtaaaaaattaccctaaaaattcttccctttatgctgacatttacgataacaaattagtaatcggtggagtaagcaaccgtatttccattgtcgaccttaatgacgactttgaggttacatcaagtaaaaaccaaaccattcaaggtgatgtacatggtataacgaaaactaaccaaggtttactaatatttggagatattctttcatcaaataatcaatcagctgtttttttgtttaatggatcatttgagaatgtcttcaaccaatcgaggacagtgaatagtgcccttaatataagtcttgcaaataacgactttattgttcttgataacgattatgtggtcaatgcatcttccaatgcgcttatacggaactccagttcctttagtctatcactttgggcggctggtaacaatggcgatggcgatgttttgttttcaggtgcagtatctcatatgcaatatggtaatttgaatgggtctgtacgttttttgaacgaaaatgaaatagagccacttaacctagaagggggtattgtaccttacctgggagcttatttaaatgagtctgccacggcatatgcatatgaggtggattctctaaacaaaatttatttttctaatgacgtttatccttcctggaattggtctagcggtattactcaaatgctatacgctgataatcaaactttactagctgtcagtgcaggatcttcaaccacagcagaactgtcgatttttgatttgagaaatttgaccatgattgctaatgaaacactaggatcaaatgctagaataaatgctttagttaactttgaaaaaaactgtagtatgcttgtcggcggagatttccaaatgactgagccgaattgcaccggattatgtctatacaattatgaaagcaaaagttggtctaccttcctcaataacacgatttttggtgaaatcacacaactttccttcaccaactcatcagaattaattatctcaggcctttttgaaacaaaagaataccaatctatacgtttaggatcctttaacttaaccaattctactatggttccattattgagtggttctgaagggaaactgaattcgtttactgtcactgaagactccatagtggcatggaatgatacttcattatttatctatagaaaccaagaatggaatattacctcgttacctggcaatgatagctctattagctctgtttcagctatatacacagatattgaatccaacactttgaacaagagaggaatcaacaatgttaataatggcagtatcctcttacttaatggtaattttaatatttcgcaatacggatacctacaaagtatgttgtttgatttccaaaaatggaccccatattttatttcagaaacaacaaatacttccaattacaatccaataatttttattaatagagacgtttcaactgaattcaactctcagtcaccacttgccaatgtgaacattactgtgacaagtcctctgtcaacatcatcccagcctccatcttcatcggcaagcagtgaatctaaatcaaaatcgaagaagaagaaaataggtcgtggttttgtcgttttaattggtcttgcactagcattagggacagtttctgtccttggtattgcaggcgtcattcttgcctacgtgtttaaggatccagagggtgattataagcccattaaaccgcgaattgatgagaatgaaatgcttgataccgtcccacccgaaaaacttatgaagtttgtctaa

SEQ ID NO: 77672 - DNA, 1317 bp, Saccharomyces pastorianus
atggaaacaccacccattgtgattgataatggctcatacgaaatcaagtttggtccttccacgaataagaaaccgttccgagctttaaatgcattggccaaagataaatttgggacatcgtatttatcaaatcatatcaaaaacatcaaagatatttcatctatcaccttcagaaggccacatgaactaggacagctcacattatgggaattagagagttgtatatgggattattgccttttcaatccttcagagtttgatgggtttgatctgaaagagggaaagggtcatcatttggttgctagcgagagctgtatgactttaccagaattaagtaagcatgccgaccaggtgatatttgaagaatatgaattcgacagtcttttcaagtctcctgtagcagtctttgtaccatttactaagtcatataagggtgaaatgagaacaatttcaggtaaggacgaagatatcgatattgtccgtggcaactcagacagtacaaattccacatcaagcgagtccaagaatgcgcaggattcaggtagcgattatcatgatttccaattagttattgattccgggtttaattgtacttggataattcctgtcctgaagggaataccgtactataaagcggtaaaaaaattggacattggaggccgtttcctaactgggctactaaaggaaactctatcatttagacactacaatatgatggatgaaaccatacttgttaacaatatcaaggaacaatgcttgttcgttagcccggtgtcttattttgatagtttcaaaacgaaggataagcatgcactagaatatgtacttcctgacttccaaacaagctttcttggttacgtaagaaaccccagaaaagaaaatgtaccgttacctgaagatgcgcagatcataacactgacagatgagcttttcacaataccagaaacttttttccatccagaaatttcgcaaattactaaaccaggcattgtggaggccatcctagagagcctttccatgttgcccgaaatagtgcgacctcttatggtaggaaacattgtatgtacaggaggaaactttaatctgcccaatttcgcccaacggcttgcggcagaactacaaaggcaattacccacagattggacttgtcatgtttcggtgcccgaaggcgactgtgctctgtttgggtgggaagtgatgtcacagtttgcaaagacagactcctaccgaaaagcgagggtcacaagagaagaatactatgagcatggtcccgattggtgtacgaagcacaggtttggttaccagaattggatataa

SEQ ID NO: 77673 - DNA, 1380 bp, Saccharomyces pastorianus
atgagtggcagtgatagaggagaccggttatacgatgtgttgggggtgacgagagatgcgaccgtgcaagagattaaaactgcttacagaaagcttgccctgaaacatcatccggacaagtatgtggatcaagactcaaaggaggtaaatgaaatcaaattcaaagagatcactgccgcttacgagatcttgagcgatccggagaagaaatcacattacgacttgtatggtgatgataatggtgccgctagcagcggtggcgctaatggctttggagatgaagattttatgaacttctttaacaatttcttcaataatggaagtcacgatggaaataatttccctggcgagtatgaggcgtacgaagagggcaactctacgagttctaaggatatcgatatcgatatatctcttactttgaaggatttgtacatgggcaagaagctgaagtttgatttaaagagacaggtcatctgtataaagtgccacggttctggctggaaaccaaagaggaaaattcacgttacacacgatgtggaatgtgaatcatgcgctggaaagggttcaaaggaacgtctgaagaggtttggtcccggtttggtagcttcgcaatgggtggtctgtgagaaatgtaatggtaaggggaagtacactaaaagacccaagaatccaaagaacttttgccccgattgcgcaggcttggggctcctgtcaaagaaggaaatcatcacagtgaacgtggctccgggacaccactttaacgacgtaattacagtcaaggggatggcggacgaggaaatcgataagaccacatgtggtgatttaaagttccatctcactgaaaaacaagaaaacttggagcagaagcaaatctttttgaagaactttgacgacggcgccggagaagatttgtatacaagcattaccatatcgttaagcgaggccttgacgggatttgagaaatttttgacaaaaaccttcgacgacaggttactaacattgagcgttaaacctggcagagtagtaagacctggtgacaccatcaaaatcgccaatgaaggttggcccattctagataaccctcatggccggtgcggcgatctgtatgttttcgttcatattgagtttccaccagataactggttcaatgaaaaatcagaactactagcaataaaaacgaatctgccgtcatcttcatcttgtgcctcacatgcgactgtaaatactgaagatgacagcaacctgactaacaacgaaactatatcaaatttccggatcattcacacggacgatcttccagaagggataaggccgttcaagccagaagcacaggattcagcgtatcagaaagcaagaagttcgtactgctgcatccaatga

SEQ ID NO: 77674 - DNA, 882 bp, Saccharomyces pastorianus
atggcgtcccaggttaacgccttattactgccggtcatagagtctacgccgcttcatcaaataaccaaggtagcattgacgaccacactcacaagtaaacaaagcgattacaagttcaaagaaatagccgtgccgttaacaaaatcactacaactgtacgagaaggcgcaaagaagacaagatttaagggcaagcttaaaagcactggagagtatcatttaccaaacgcacttccaatggaataacccgctcccacgacatgcgcatctcttccaaaaacactaccactttctactgactcactggccatttgagaaccacagagacttggtagattccatcgctgtaaacaatgggaaactaaattcaacgtcttcaaggagcgtctggctgaaggcggattggataacactgtttaacgttaaaaacccttgggtccaaacgccgccatcgttaatgcgtctgagtgggacagatcttgataccttcacaccagagaggatattcctgataaattctcttggaaaccactacaaatttttaatagcgaacagtcatctaagctacaatcacaaaaaatacccctcccctggcgtgcaaattcctatcaggaacgctcttggcgaagtttctccggccaaacaaattgcccaacttttcgcaagacagctgtctcatatttacaagagcctcttcatagaaaaccccccgctctctcctgagaacgagctggcattgactgccgtcttctatgacgagactgtagagcgacgccttagaaggctctatatgcgagcttgtgcaagggcatatacgactactaatgccgactccaccacggagcctttgatgtttcattgcacccggtgggaagttgattag

SEQ ID NO: 77675 - DNA, 2475 bp, Saccharomyces pastorianus
atgagaacgaagagaactaggagtacaagaaatgtaggagcgagcatgcctgccggcgctgcgaatgcggatagtgaagactggaaagaatatgtctccgaagacataatagcccaattgaacaagcaccaactgccgtattctgaaatattagatgagaagatcgcggacttggccactcactggcacttccagtatgtgatggcttggctttccaatgtctgcgaatcatatactacaacgacatttaatactgaccagtatggcggtagctctaccaaatgcttgtggaagaatatcaaattcgatgaaggtgtatttgtaactgacgtattttcgaagatagacgggaaggactcgaactattacaatgatgaagtcgacgtagatgaaggatcgcaaaatttgtacgacagaattagattgcaattattgcatcaattagcgggaaataaaagcgggcaattgaaagattggaatgttatagttaaccatcacttgcaaaactcgagcgcgtattcagatttggttacggacttaccttttttggagcttgaaattgcacgccaattcgacatcatttacagtatcataaaattaattgaaatgaaaaatatgatcttcaaaaactacttagcgaataacttgcatctgtttacgtttagtgaagttatactggatgatgataatagtggaggggaggaaatgaagagcttgttttccttacccaatgttggtgtactcgtaaagaaaaccattcacagagtaaaagaaggctcttcctcccaagtctctcaaactctgaatatcccaataaaactacagaactgtactataaaagagagcgacccagacattcctgattcagtggagcttattcatctcgagtactctcacgatatcgatgcatatcttcaatcgattacaattgattatgatgtgattacaactaattgggggtccatgctagaatactggtcagagaataaaagttcgaaagccatagatgagttcataactaacttgataccggtgtacgcggaacatagactatattcggcaaaacttttgacccacagagaaaaggagagagcaattgcggagctaatgacaaggaggaaaagatcttcgagactggtagcgaaagaggaagaaaacaagaaaaaagacttggaaagtgagtggtttgaaaaactagatgaaagagaacaatttataaggcacagaaacaagctagtgtcgaaggacatcaaaaagataaaagatcttctttggaaccaattatggcaattgtacgatcaagattatagagatgaaaaattgaccaggcgtaacgagctcaaagatagaagtggttctggtacaccgttttttgaaacgtctttgggcagggaggaggacaatcccttaaatgaaatcgatatcggagttcttgatcacggccctaactttcaatctagtataatcccggtggaaccaccaattcctggaactgttgggccactacagacgggagacgtccctgaattgcctagtgacttctgcataacaaaggaagagctagatgagcttgccaactacgggatcttcactccgcagcaagagcccgacaaccaagattctgttttccaatgtccgggcgaaccagagctggcgcccatgattatcaccgaagacacggagactgacctcttcaataaccgcccattgatatgctgtgatcattgttacaggtggcagcattgggaatgccaacctccaaaaattatagagcttatatcttcaaccacaaaatccccacagcacacgctgtcgcaacgtgattttggcgtcatcataatgggaaattcccacggcaatagaaggtcttctcgcagaccccaatccacacttgaacccagcaccaagtcttcaagacctactgataaacgcaaaccgctgtctgaatgctccacttttatctgcgcttggtgcatcagggacttggaacttgagctgcgcaacatttttgtgcctgaattgaaaataataagggccaaacaaagaaaacaacaggaagaccgtgaaagaagaaaaaaaatgaaggaagaaaagaaaaggctcgaagagcttgcaaagaaaagggaactaaccgagtctgtctcacctccagtgtttaataatgcatttgcaaacatgtcaagtagcacaacgcctaatatcgccgcttacgaaaaaacaaatccagccatcaatccagcacctaatgtaaatgccgctcaccccataattacatactcgcagcaaactggcagcaaaactgtaccacaagcaccacaggcaccacaaacatcacaagcatcaatccaaccacagcagcaacagcaacagcaacagcaacagcaacagcaacagcaacagcaacagcaacagcaacagcaaccgctgcaccctaaagaacagaactttcacttccagttcccaccaaccaactag

SEQ ID NO: 77676 - DNA, 798 bp, Saccharomyces pastorianus
atgaaccaaaatggtgataagaacgaaggcaagttgtttcaactaccgtcattgccgccctggaaaacaccaagattcaacaaagccaactttaacaattttaccacaccgctacggaaaaggtcgacaagggtaataaatgatgattcgatgcccataacaggcgaagtactagaggagaggactgcagatgatctctatgggataaatatggacgtagacgaagtcgattatctgaatactttgagccacatcgaggaagaaaagcaatacgattattcaccgctttgtgagcgcaatacgctaagggaaagtagaattgacagttttttgaaagccgaaagggcagcacattgtcttgtgttccataaagtgggccatctagacggcatagacagctatcgacccgatattgacatcatgtgcggcgaagaggctaataaatatgacagtgcgaatccggagggcaatggttcaatgttgttagagagtgtacctggatgcaacaaagaagacctggagaggttatcaaggcgagaatttgtaacaaattcgaaacctaatatgagacggttggatgacataataaatcatgaaacgaacgccttaaaaagtttctggaacgactcaggattagtcaattcacttcaaagtcatcatttgcatgaagagtaccttcttttgcaagaagaattaaagaatgtgtacaagattaaatgccatgacagagtgccaatagaaagtctacgcgataagtgcagaagacactatagcaacgaggatagttcgtttctctga

SEQ ID NO: 77677 - DNA, 396 bp, Saccharomyces pastorianus
atgagtcaaagtcgttggagtatcgttctcatctttgcattgtttatttttggcagcactggagtgaatgccttcttcaatttcggtcatcatcagcaacagcaacagcaacaacaacaatcatatgaagatcaagttttaaataacccttgtgatgggtatttgtgtccggacaccctaacgtgcgttgcacagcagaaagactgtccttgtcccttccctaaatctcagttgaaatgtgtccttcctgataataaatttgtttgcatatccaaaccagccacacacaatgaaaagttgagagcaatatatgatgaccctgtcaagggccccaaagcaaagaacaaggggtttagggattgtggatgggtatcagatgcttacaaaaaccattga

SEQ ID NO: 77678 - DNA, 1134 bp, Saccharomyces pastorianus
atgtctaaagggagggtcaatcagaagcgttacaagtatcctcttccaattcaccccgtagatgaccttccagagttaatccttcataatccgttatcttggctatattgggcataccgctattacaagagtacgaacgcactgaacgataaagtacatgtagattttataggagataccactcttcacatcacggttcaagatgacaagcaaatgctatatctttggaataatggattttttggcactggtcaatttagcaggagtgaacctacatggaaagctagaacagaggccagattgggtctcaatgatactcccctccacaatcggggaggaacaaagagtaatactgaaacggagatgactttagagaaggtcacacaacagaggagattacaaagattagagttcaagaaagaacgtgcgaagttagaaagagaattactagaattaagaaaaaaaggtggtcatatcgatgaggaaaacatcctccttgagaaacaacgagaatcattaagaaaatttaaactaaagcaaacagaagacgtgggcatcgttgcacaacagcaagacatttccgaatcaaatttaagagatgaagacaacaatcttcttgatgagaacggtgatcttttgccactcgagtcactagaactaatgccagtggaagctatgtttttaacttttgcacttcctgttcttgacatatctcccgcgtgcctggcagggaaactgtttcaattcgatgccaaatataaagatattcactcctttgtcagatcatacgttatataccatcactacagatcacacggttggtgcgtaagatctggtataaaattcggctgcgattatttattatataagagagggccaccatttcaacacgctgaattttgtgttatgggtcttgaccacgacgtctctaaagattatacgtggtattctagcatagcccgtgttgtgggcggcgcaaagaagacatttgtgttatgctacgtggagagactaatctcggaacaggaggcgatagcactatggaaatcaaacaactttactaaattgttcaatagttttcaagttggtgaagtgttgtataagagatgggttcccggaagaaatagagactag

SEQ ID NO: 77679 - DNA, 333 bp, Saccharomyces pastorianus
atggggaattccaaaacaaacggtttttttactcctgagaaatacttgtacgggataatccagggcctaccacccacgcttcgaggattggcttttatttttttttttttggtggcgttttatttctttcccgctttctgggacttgtgcggagttttgagaggggcgcgcggcaaaggattcccaaaacggaaatcagacgccaatagccagcactcaaagcagttctggacccattgcgattttcccatttggttcttgcgcgtgctgattccgacacgcgcgtctataaatagcatgaagtatccgcacaccgcagcgttagtgaggtga

SEQ ID NO: 77680 - DNA, 420 bp, Saccharomyces pastorianus
atgggtgggcgaagtgcgcaacctcgaaggttttcttttgcgtgtcggattttacatccggcggtagcgcatgatgccatggctggctccagatacatcctcagggcaccagcatctataattagattggcgcaacatggctggctgcactgctgtcttcacttctttctttttccggcaatgaatgatgtatgttttgtggcaaaagggtccgcattgtacctgtttacagttgagattatcgtttttggtagcccttcattacggcataacgtattaagtttcttttattttgctttgccctggtttaaaagacaatgtagattaaaagttaattttaatcgattgaaggaaataagaggaatagcgcaagttgttaggaaagcgttctttatctccaagactttgccctgtatataa

SEQ ID NO: 77681 - DNA, 1308 bp, Saccharomyces pastorianus
atgaccactaacgaggaattcattaggacacagatattcggtacagttttcgagatcacaaatagatacaatgatttaaaccccgttgggatgggggcatttgggttggtttgctcagccacggacactttgacatctcagccagttgccattaagaaaatcatgaaacctttttccactgcagtgctggccaaaaggacatatcgtgaactaaaactactaaaacatctaagacacgagaacttgatttgcctacaggacatatttctttctccattggaagatatatattttgtcacggaattacaaggaacagatttacatagactcttgcaaacaagacccttggaaaagcaatttgttcagtatttcctataccaaattctaaggggtttaaaatacgttcactccgcgggcgtcattcatagagatttgaaaccgagcaacattctgattaatgaaaactgtgatttgaagatttgcgatttcggtctagcaagaattcaagaccctcaaatgacaggctatatttccactagatactacagggcacctgaaatcatgctaacgtggcaaaaatatgacgtcgaggtcgacatttggtccgctggttgtatttttgccgaaatgattgaaggtaagcctctgttccctgggaaagatcatgttcatcaattttcgattatcactgacttgttgggatctccgccaaaggatgtgataaatactatttgttccgaaaatactctaaaatttgttacttcgttaccacacagagatccaattccattttctgaaagatttaaaacagtcgaacctgatgccgtagaccttttggaaaaaatgctggtttttgatcctaagaagagaatcactgcggcggatgccttggctcatccttatttggctccttaccacgatccaacggatgaaccagtagccgatgccaagttcgattggcactttaatgacgctgatctgcctgtcgatacctggcgtgttatgatgtactcagaaatcctagacttccataagattggtggcagtgatggacagattgatatatctgccacgtttgatgaccaagttgctgcagccaccgctgccgcggcgcaggcgcaggctcaggctcaggctcaagttcagttaaacatggctgcgcattcgcataatggcgctggcactactggaaatgatcactcagatatagctggtggaaacaaagtcagcgatcatgtagctgcaaatgacaccattacggactacggtaaccaggccgtacagtacgctaatgagttccaacagtaa

SEQ ID NO: 77682 - DNA, 1710 bp, Saccharomyces pastorianus
atgaaactgaaaactgtaagatatgcggtcctttcgtcactctttgcatcgcaggttctcggtaagataataccagcagcaaacaagcgcgacgacgactcgaattccaagttcgtcaagttgccctttcataagctttacggggactcgctagaaaatgtgggaagcgacaaaaaaccggaagtacgcctattgaagagggctgacggttatgaagaaattataattaccaaccagcaaagtttctattcggtggacttggaagtgggcacgccaccacagaacgtaacggtcctggtggacacaggctcctctgatctatggattatgggctcggataatccatactgttcttcgaacagtatgggtagtagccggagacgtgttattgacaaacgtgatgattcgtcaagcggcggatctttgattaatgatataaacccatttggctggttgacgggaacgggcagtgccattggccccactgctacgggcttaggaggcggttcaggtacggcaactcaatccgtgcctgcttcggaagccaccatggactgtcaacaatacgggacattttccacttcgggctcttctacatttagatcaaacaacacctatttcagtattagctacggtgatgggacttttgcctccggtacttttggtacggatgttttggatttaagcgacttgaacgttaccgggttgtcttttgccgttgccaatgaaacgaattctactatgggtgtgttaggtattggtttgcccgaattagaagtcacttattctggctctactgcgtctcatagtggaaaagcttataaatacgacaacttccccattgtattgaaaaattctggtgctatcaaaagcaacacatattctttgtatttgaacgactcggacgctatgcatggcaccattttgttcggagccgtggaccacagtaaatataccggcaccctatacacaatccccatcgtaaacactctgagtgctagtggatttagctctcccattcaatttgatgtcactattaatggtatcggtattagtgattctgggagtagtaacaagaccttgactaccactaaaataccagctttgttggattccggtactactttgacttatttacctcaaacagtggtaagtatgatcgctactgaactaggtgcgcaatactcttccaggatagggtattacgtattggactgtccatctgatgatagtatggaaatagtgttcgattttggtggttttcacatcaatgcaccactttcgagttttatcttgagtactggcactacatgtcttttaggtattatcccaacgagtgatgacacaggtaccattttgggtgattcatttttgactaatgcgtacgtggtttatgatttggagaatcttgaaatatccatggcacaagctcgctataataccacaagcgaaaatatcgaaattattacatcctctgttccaagcgccgtaaaggcaccaggctatacaaacacttggtccacaagtgcatctattgttaccggtggtaacatatttactgtaaattcctcacaaactgcttcctttagcggtaacctgacgaccagtactgcatccgccacttctacatcaagtaaaagaaatgttggtgatcatatagttccatctttacccctcacattaatttctcttctttttgcattcatctga

SEQ ID NO: 77683 - DNA, 411 bp, Saccharomyces pastorianus
atgggagaaattttagaactaactaataagaatttcatgagccacttgaaaaaggacataacttcgcaagaatccttgaaaagtagaattgaggataaaaatggtgatgtcgctagcccgaaagaggataactatcctctattgaatggaacagcggcatggccagatggggtgattacctctgaagaaggatgttcatcttcaggtgagaaagagaattcaggcttatgttcagaagaaagttcagaagaagatccagaagaagctgaagaggaatctgcaagggcttttggagagttagttgcagtcttgcgggacaaagacataccactgaatgtattggacgaacctcagatgaaagattggcttgaaaaatacaccggtgtttatagaagctcttggcatggttga

SEQ ID NO: 77684 - DNA, 756 bp, Saccharomyces pastorianus
atgacagtaaaaaaaatagctattctttatacagatgaagataacgaatggagtaaaccatggggcaattttgttgatatggctatcaagctattagaacagaccaggaaattggaatgtatcgcagaagatgtcgaatatgaagtgttccacgtacaaaaaaacgtgttccctcaattgtcagatcttcagaaagatgagtatttaggcatatacatcactggttcaaaatatgattcatttgataatgaaattgaatggattatgaaattaagaagtttcttaaatgagatgctaactagcaagactgaatatccgcccgtagctggaatatgttttggtcatcaagttatcgcggctgctctaggaagttcagttggacggaatccgaaagggtttgaaggtggggttgtgtcactaaaactgaactctgtgggtcaaaagttatttggtgctcaagaattaaatctttctgaagtgcacagtgactgcgtgttcgatgtcccagagggataccaaaattgggcgtcaagtgaaaaatgtcaaaaccaaggattttacaggcaaaacagagtgctgacgtttcaaggacaccctgaattcaatagtgatgtcgctcagaaggggcttttgaagtctcaagacaagcttacccttgaagagtttaatagatacgaaagacagtgccaggagctggataacaatggcatacaagctgccaggaatatttggaggttatttttgccaaaaatatga

SEQ ID NO: 77685 - DNA, 2832 bp, Saccharomyces pastorianus
atggtcaaatcataccaacgttttgagcaagcagctgcttttggtgtaatagcctccaatgccaattgtgtttggatacctgcgtcatccggaaatagtaatggtagtggaccaggacaattgattacgagtgctctcgaggacgttaatatatgggatattaagaccggggatttggtcagtaaattatccgatggcttacctccaggcgcatctgatgctagaggcgccaagccagccgagtgtacatatttggaggctcataaagatacggatttattagctgtcggttacgcagatggtgtcattaaagtttgggatttgatgtctaagactgtgcttttgaattttaacggtcacaaagcagctataacattattacaatttgatgggactggcacaagattaatttctggttccaaggactccaatatcattgtatgggatcttgttggagaagttggtcttcataaacttagatcacacaaggattccattactggcttttggtgtcaaggagaagattggctgatcagcacctccaaagatggaatgatcaagctatgggacctaaaaacacatcaatgtatagagacgcatattgcgcatactggagagtgttggggccttgcagtgaaggatgatttactgatcacaactggtactgatagtcaagtaaaaatttggaaactggatatagaaaatgacaaaatgggggggaaactaacagagatgggtattttcgaaaagcaaagtaagcaacgtgggttaaagattgagttcataacaaattcgtctgacaaaacctcttttttttacatccaaaatgctgataaaacaatcgagactttcagaattagaaaagaagaagaaatagcaagaggtttaaagaaaagagagaagaggctaaaagaaaaggggttgacagaagaagaaattgcaaaatctattaaagaatcctactcctcctttatattgcatccttttcaaaccataagatcattgtataaaataaaatctgcatcatggacaacggtctcaagttccaaactagagttggtattaactacatcgagtaataccatagagtattattccattccatatgaaaaaagagacccaacaagccctgctcctctcaagacacatactattgaattgcaagggcaaagaacggatgtgcgtagtattgacatcagtgatgataacaaattacttgccacagcatccaatggttcattgaaaatatggaacatcaaaacacataaatgtattagaactttcgaatgtgggtatgcattaacttgtaagtttttgccaggtgggctactagtcatactgggtacaagaaacggggagttacagctctttgatctagcatcatcaagtcttttggataccattgaagatgcacatgatgcggcaatttggtcgctagatttgacctcagatggtaaacgattagtgaccggatctgccgataaaactgtcaagttttgggatttaaaagttgaaaatagcctagtgccaggtaccaagaacaaattcctgcctgttttaaaactgcaccatgatacaactttggaattaactgacgacattttatgtgtacgggtttctcctgacgatagatatctagccatctcgttgctggataatactgttaaggtattctttttggactcaatgaagttttacctaaatttatatgggcacaaattacctgtactatctatcgatatttcatttgattctaagatgattattacgtcttccgcagacaaaaatatcaagatttggggtttagattttggtgactgtcacaagtctttatttgcccatcaggattcgattatgaacgttaaattcttaccagagtctcacaacttctttagttgttctaaagacgcagtggtgaaatattgggatggcgagaaatttgaatgcattcaaaaactatacgctcatcagagcgaagtttgggctttggcggttgctactgatggcagctttgttgtttcttcatcccatgatcacagtataagaatctgggaagaaaccgaggaccaggtatttttagaagaggaaaaggagaaagaacttgaagaacagtacgaggatacattgctaacttctttggaagaaggaaacggtgatgatgcatttaaagctgatgcatccggtgaaggcgttgaagatgaagcatccggtgttcataaacagactttagaatcgttaaaggctggtgaaagacttatggaggcgctagatttaggaattgctgagattgaaggtttagaggcatataacagagatatgaagctatggcaaagaaagaagttgggtgaagcgccaataaaaccacagggtaactctgttctaattgctgtgaataaaactcctgagcaatatattatggataccctgttaagaataagaatgtctcagttagaagatgcactgatggttatgccattctcatatgtcctcaaatttttaaaatttattgataccgttatgcaaaacaaaactttgctgcactctcacttaccattaatttgcaagaatttatttttcattatcaaatttaatcataaagaattggtttctcagaaaaatgaagaattgaaattgcaaataaatagagtaaagactgaattaagaagtgcattaaaatctaccgaggatgatctaggctttaatgttcaagggttgaaattcgtcaagcaacaatggaatctaaggcataactacgaattcgttgacgaatatgaccaacaggagaaagagagtaatagtgcaaggaagagagttttcgggaccgttatataa

SEQ ID NO: 77686 - DNA, 873 bp, Saccharomyces pastorianus
atggaattcatatctgcagactattctagcagtgacggtagtgataccgagagcgaaagtagtaacaaaagtgaggtccaaatcgaacacacggagaaaacttgcatacagaaagccgattccactgatttacctgcaatcccggattcaattatattgaagtaccacatccctccgaatttacaaaagtacgagcaccaggatatgaatatgaatcgattttggcgttcgttcacatattttgagtggcgtccgactccagcgattcaccgacaacttcagaaaatcatatgtaaatataaagaaacatttatgaaacaagaatacactaatccgtatcaactggtggattttgacccgttgttcatctcacacttgggagcccccaaacctttacacgtttccttaactcgatcgttgttgtttgaaactgaagaacaaagacatgttttcattcaagaaatgcgtaatggtttacgaaataatgaaatagccccttttaaacttcaaatctgcccatatccgaagttatatatatcagaacgagccaacaccttgtacctcggtctccctgtctcagaatgtcccaataaggcacagatttctcctttcaaaacgataatagctgaggcacttcagaaatcaggcatttcaaactatcaggatttaattgtaagtgggcaaaatttacatgtttcaattgccatcgccagcaacccttcaaaagccacattaaaacgttatcaacaactaaacgagacgatgggggcgcttttactactcaataatgactttgcatacaaactagagttcttagttaactctatctactgtgatgaaaaccgtcactccattagaatcccttttaactaa

SEQ ID NO: 77687 - DNA, 858 bp, Saccharomyces pastorianus
atgtgggctcaattatcatatactagaccagaatctcagaagactgacttgacgtcgttgttttccacagatcaagagcaaaatccattaaatgactaccagtaccagatcaatattagggaactggaggagtattacaacaagacgattttaaacgaggataacatacaggaaacaagcagtgaaatatcttcggcagtttcattctctccaccaaaaaatacaaacgctattcaaccggggctactgtatgatccacagttaatgaacccttttctcccatccgctcacctgaatagcacggcacctactacttttaaaaagaaactagaggtacaaataaatccggactatgtcccaaaatcttcacaattaccattaacttcacagaatttgcaacagttgtctcaacaaaagcccaaaaatgatgcttctttttcatcagagaaggaatcctcagctcaacctaaggtgaaaagccaagtgcaggaaactcccaaacaattatacaagacagagctgtgcgaatcattcactttaaaaggaagttgcccttatggcagtaagtgtcagtttgctcacggactcggcgaattaaaggttaagaaatcgtgcaagaatttcaggacgaaaccctgtgtgaattgggagaaactaggttattgtccttatggcagaagatgctgcttcaaacatggcgacgacaacgacattgctgtttacgtgaaagctggtacttactgtaacgtctcttcgactagcaaacaatcagacgaaaagagaagcaatggtcgcggctccgccaagaagaagaatctaaatgttaaagtaaaggctttgcagagaatgacctggtga

SEQ ID NO: 77688 - DNA, 306 bp, Saccharomyces pastorianus
atgactatgaatggaataccagtgaaattattaaatgaggcacagggacatatcgtttctctggagctaacaacgggagcgacttatcgtggtaaacttgttgaaagcgaagatagcatgaacgtacagctaagagatgtaatagctacagagccccagggggctgtaacacacatggatcaaatattcgtacgtgggtcacagatcaaatttatcgttgttccagatctcttaaagaatgcaccattattcaaaaaaaactcatcaagacctatgccaccaataagaggacctaagagaaggtga

SEQ ID NO: 77689 - DNA, 87 bp, Saccharomyces pastorianus
atgtgtatgctttcttggtttatttctacttcacctctaaaagaatactgtggggggaagagaaatttgcaaagaaataacttctaa

SEQ ID NO: 77690 - DNA, 333 bp, Saccharomyces pastorianus
atgaccaaagatgccgtgaatctagatgcttacaccgtgagcttcatgcctttctataccgagtatcaaggaccaaccgaagagtttaaggattacaaattcgaagatactatttactttcgtggcaaggaactgaagagggaaaagtctgcgacgccttccagtagcgataacacaactagtaataccttcagtaatggcgccatcctctcgggaaacacaataactggcaagatagtttcagtgaataattacgaaagagagggcactgatcgcaacgaattggcgcgattgcaagaattgatctccctcatcgatgtcataaatcagtaa

SEQ ID NO: 77691 - DNA, 1389 bp, Saccharomyces pastorianus
atgttttcaagaacagcatccaagttccgtaatacacggaggcttttaagtacaatttcctcacaaattccaggaaccagaacctctaaacttcctaatgggttgacaattgccacagagtacatccccaacacatcttcggctactgttggaatatttgtcgatgctggttctagggcagaaaacgtaaaaaacaatggtacagcgcattttctagaacacttggctttcaagggtactcagaataggtcacaacaaggaattgaattggaaattgaaaatatcggatctcatttgaatgcatatacatcaagagaaaacacagtttattatgctaagtccctacaagaagatatcccaaaggctgttgatattctaagtgatattttgactaagtcagttttagataatagtgctattgagagagaaagggatgtcatcatcagagaaagtgaagaggtggacaagatgtatgatgaagttgtttttgaccatcttcatgagattacgtataaggaccaacctttaggaagaaccattctgggtcctataaaaaacataaaatcaataacaagaactgatttgaaagactatataaccaagaactataaaggcgacagaatggtattggcaggtgcgggcgctgttgatcatgaaaaattggtacagtatgctcaaagatactttggccatgtgcccaaatctgaatcgcctgtcccgttgggatcaccaaggggcccattaccagttttttgtagaggtgaaaggtttatcaaagaaaacacgttacctacaacacatattgctatcgcattagaaggcgtgtcatggtctgcacctgattattttgtagctctggcaacacaagcgattgttggtaactgggacagagccattggcacaggtacaaactccccctctccattagctgttgcagcaagtcaaaatggttctttggctaattcttatatgtcattttccacctcttacgctgattcaggtctgtggggaatgtacatagtaactgattctaatgagcataacgtgcagttaattgttaatgagatcctgaaagagtggaagagaataaaatctggcaaaatatcggatgcagaggtgaatagggcaaaagctcagctaaaggcagctctgttgctatcgttggatggatcgacagccattgtagaagatataggcagacaagtggtgaccacaggtaaaagattatcaccagaagaagttttcgagcaggttgataaaatcactaaggatgatattattatgtgggcaaattacagattacaaaacaaaccagtttcaatggttgccctaggaaatacatccactgtccctaatgtttcctatatcgaagagaaactgaaccaatga

SEQ ID NO: 77692 - DNA, 114 bp, Saccharomyces pastorianus
atgatgacatccctttctctctcaatagcactattatctaaaactgacttagtcaaaatatcacttagaatatcaacagcctttgggatatcttcttgtagggacttagcataa

SEQ ID NO: 77693 - DNA, 459 bp, Saccharomyces pastorianus
atgcaaattttcgtcaagactttaaccggtaagactattaccctggaagttgaatcttctgacactattgacaatgtcaagtccaagatccaagacaaggaaggtattccacctgaccaacaaagattgatctttgctggtaagcaattggaagatggtagaactttgtccgactacaacatccaaaaggaatctactctacacttggtcttgagattgagaggtggtggtaagaagagaaagaagaaggtctacaccaccccaaagaagatcaagcacaagcacaagaaggtcaagttggctgtcttgtcctactacaaggtcgatgctgaaggtaaggttaccaaattgagaagagaatgtagcaacccaacttgtggtgctggtgttttcttggctaaccacaaggacagattgtactgtggtaagtgtcattccgtctacaaggttaacgcttaa

SEQ ID NO: 77694 - DNA, 693 bp, Saccharomyces pastorianus
atgaaattgtttcaaaacagttacgatttcaactatccatgggaccaggtaaccgccgctaactggaaaaaatacccaaatgaaatatctacacatgtcatcgcagtggacgttttaagaagagaattgaaggatcaaggtaaggtcttagttactgaacggttgattactgtaaaacaaggtgttcccaaatggatcatgatgatgctaggagggaccaatatgagtcatgtcagagaagtttctgtggtagacttaaataaaaagagcttgaccatgagaagctgtaatttaacgatgtgcaatctattaaaagtctacgaaactgtaacatatagcccgcatcccgatgactcggctaataaaacacttttccagcaggaagcccaaattacagcatatggatccattagaaagctgtgtaataagatggaagattggtcagttcaaaggttttgcgagaacgctaaaaagggtaaaatgggattcgatgctgttttgcaagtatttagtgaaaattgggaaaaacatgttgatgacttgagcaatcaacttgtcagtaaagtcaatgaaaccatggaggatgttaaaatatccgcaggtacgcttcttaaaggaactgaaaggagcggcagaaccatcttacagcaaaatattgacttgtttagagacgcatacaaccacgaaaattag

SEQ ID NO: 77695 - DNA, 354 bp, Saccharomyces pastorianus
atgcttaaattcaaaaatatgtacatcactttgcatgataattttatcgcctatatattctttacatttttcacattcattgctttttaccgctctgaccaatcaacgttgtgccgatgctcgcaaaagatatttttgtccgggcaacggcttttgcgacagacggtaataatagtagggccccttgtccccttctcatcttattcttctcctttcttcttcattccattgttttttagtggccctaactcagtaccctttcaagattatcgttgctctccatggtgtccatcacggtcacatggtgcagtacttccttcctactgctctctgcgatggagccatcgcacataa

SEQ ID NO: 77696 - DNA, 471 bp, Saccharomyces pastorianus
atgacgcaattaaaatatttgttgctggtttctaggcaaggaaaaatcagattaaagaaatggtacacggcaatgtccgctggtgaaaaggcaaaaattgtgaaagacttgacacctacgatattagcaagaaaacccaaaatgtgtaacatcatcgagtataatgaccacaaagtagtatacaagcgatatgctagtctatattttattgttggggtgacgcccgatgttgacaatgaactgttgaccttggaaattatccatcggtttgtcgaaacaatggacacatatttcggcaatgtttgtgagttagacattatatttaacttcagtaaggtctacgatatcttgaatgagatgattatgtgcgatggctccatcgcagagagcagtaggaaggaagtactgcaccatgtgaccgtgatggacaccatggagagcaacgataatcttgaaagggtactgagttag

SEQ ID NO: 77697 - DNA, 390 bp, Saccharomyces pastorianus
atgtctaactcacaaacattgccgaaatatgtgtccattgtttcgacaaaccgatggataatttccaaggtcaacagttcattgtcaacatcgggcgtcaccccaacaataaaatatagactagcatatcgcttgtatactactttgtggtcattatactcgatgatgttacacattttgggttttcttgctaatatcgtaggtgtcaagtctttcacaatttttgccttttcaccagcggacattgccgtgtaccatttctttaatctgatttttccttgcctagaaaccagcaacaaatattttaattgcgtcatcttgtgtacctgtgtatccgtatataatctcctccaggatcgctcttgtttttggctgaaattgttgttataa

SEQ ID NO: 77698 - DNA, 903 bp, Saccharomyces pastorianus
atgctttatttgatcggacttggtctctcgtacaaatcagacattaccgttcgtggtttggaagctattaagaaatgttctagagtttatttagaacactataccagtatcctaatggctgcaagccaagaagagttagaatcttactatggtaaagagatcatcttggctgatagggaattagttgagactggttctaagcagatcctaaataacgccgataaggaagacgttgctttcttggtcgtgggcgatccatttggtgccaccacacacacagatttagttctcagagctaaacgtgaggcaattcccgtcgaaattattcataatgcgtccgttatgaatgcagttggggcatgtggcctacaactatacaatttcggtcaaaccgtttccatggttttctttaccgataattggagaccggactcatggtacgacaagatctgggaaaataggaaaattggccttcatactttagtgttattggacatcaaagttaaggaacaaagcatcgaaaatatggcccgtggcagattaatctacgaaccaccaagatacatgtctatcgctcaatgttgtgaacaattattagaaattgaagagaaaagaggtacaaaggcatacactcccgatactccagcagttgcaattagtagattaggctcgagctcccaaagctttaagtctggtaccataagtgagttagccaattacgattcaggcgagccacttcattcgcttgtcatcctcggcagacaatgtcatgaattggagctggaatacctgctagagtttgccgacgacaaagaaaagtttgggaaagatgtggcaaatgaccaagagtatttcaaacctgcggcatgggtcccacccacagaagacgacagcgacgagtaa

SEQ ID NO: 77699 - DNA, 1239 bp, Saccharomyces pastorianus
atgacaaagattaaggtagctaaccccattgtggaaatggacggcgatgagcaaacaagaataatctggcatttgatcagggacaagttagtcttgccctatcttgacgtcgatttgaagtactacgatctttccgtggagtatcgtgaccagactaatgatcaagtaactgtggattctgccaccgcgactttaaagtatggagtagctgtcaaatgcgcgactattacacccgatgaggcaagggtcgaggaatttcatttgaaaaagatgtggaaatctccaaatggtactattagaaacattttgggtggtacagtgttcagagaacctattattatccctagaattccaaggctagttcctcaatgggagaagcccatcatcattgggagacacgcattcggcgatcagtacaaagctaccgatgtaatagtccctgaagaaggcgagttgaggcttgtttataaatctaagagcggaactcatgatgtagatttgaaggtatttgactacccagaacatggtggggttgccatgatgatgtacaacactacagattcaatcgaagggtttgcgaaggcctcctttgaattggccattgaaaggaagttaccattatattccactactaagaatactattttgaagaagtatgatggtaaattcaaagatgttttcgaagccatgtatgctagaagttataaagagaagtttgaatcccttggcatctggtacgagcactgtttaattgacgatatggtggcccaaatgttgaaatctaaaggtggatacataattgccatgaaaaattacgacggtgacgtagaatcagatattgttgcacaaggatttggctccttggggttaatgacatctgtgttgattaccccggacggtaaaacctttgaaagcgaagccgcccacggtacagtaacaagacattttagacagcatcagcaaggaaaggagacgtcaacaaattccattgcatcaattttcgcgtggactagaggtattattcaaaggggcaaacttgataatactccagatgtagttaagttcggccaaatattggaaagcgctacggtaaatacagtgcaagaagatggaatcatgactaaagatttggcgctcattctcggtaagtctgaaagatccgcttatgttactaccgaggagttcattgacgcggtggaatctagattgaaaaaagagttcgaggcagctgcattgtaa

SEQ ID NO: 77700 - DNA, 1878 bp, Saccharomyces pastorianus
atggagctgccttcaatcaatagcaccacaagtatacccgacaaccaggagttaaggaattactatgacaagttgctgttcaagaacaatagtggcaagtcgctagcggatttgccaggaaaaatggcagattttaacgacaatagcgctgctgcgcatccccgctccagagttgacttaatcaacggttacatcggtttcagagaggataagcagtctcttctggggcagaagaacactaaaagggcctcgttcagcgcatttgcggacgaaggaaggaaacagagcgagatgagcattaacgggaagagccctaatttgtctcttttctcatttgagtttaacggcaccccgactcaggacagaaagccatacaaacaggattacttgaatgtgatgaacacttcgcctaacaatattctttctcccttaaacaacagctcccaaaaatactatccacagaaacagcagcagcagcagcagcagcagcagcaacaaagcatctttgacccgggaagaagatcttcctatatttctgatgcgctgattcatggcaatgcggctacccagcaaccacaatactcgcaacctgtatatattaacaacaacccatctttgcaagtaccatacactgctccttccgagtatactcagcagcaacagtactcgtcacccttcaatgctaggcgcaacacccagccagtgctgaacttgcatccggcagccgctcccacaaacgatgccggattggcggttgtcgacggcaagaatttgacgtcatccaaggagctgcatgacttatatcttgactgcgggtcaaactattttgctagggataaagtttataaatttattgacagcataaagggaactttatgcggggataatgtctccacctccagttccaggattatagagtttttggattttttgaaaaattgtaatctgaattacaacccacagtctgacgcattcatctccactgctgtttcaaacgcttcgtcgaccggggcggccaaatccaagaacagcacttcaatgcatttgcactataagccattagtgttagtatcgttgaaaaatggtaagctcgaactgttgtctaaaccacaaacagccacacttatactgaaaaggggcgatttggtcattattgatggtgatcgtggtaaagatttagttttggtggtggaaccggttgtagatataaatttggcactatttataaattttttgaagaaaaaaattcactttgattctctaatcaccaatagtcaacagcatttccccaatgaccagtttatcaagactctggttgataccaccaatggtaagccggtcgctcatgagttgaatccgaagttatatgatatcattgaactaacgcaattgatcatcccatcaaagcaggttctgagatttgccaccccgtgggaatcctccacgaatttacacaacaaattccaggatgagctaaaggctcttcacattgcacagctaaaactgaggtcgctaaataacaataactccggtggcgggttgaacatcaaaatattgaatgcagagttccaatttgacagaaagaaattgactttctactacatttgccaggagcgtaataatttcagagacctgatcaaagaactctttaagttttacaaaacaagaatttggctttgtgctataccgaacaatttatcgatagattccaaattttatgattcaaacaagtttgagtgggagatgtatcaggatatgatgtcccactattccatggacaacactggaattgtcgtggcccctgaactgaatcgtttgaaactggacgacttccagatcggtgtttatatggaattggtgaaggttttgttcggctaa

SEQ ID NO: 77701 - DNA, 660 bp, Saccharomyces pastorianus
atgaaccaagcaatagacttcgcacaagcaagcattgagtcctacaagaagcacggcattctggaggatgtaattcatgacacaagctttcaaccctccgggatacttgccgtagagtactcatcaagtgcacctgttgccatgggtaacacgctgcccactgagaaggcacgttccaagccccaattccagttcacgttcaataagcaaatgcaaaaaagcgtaccacaggcgaatgcgtacgttccccaagacgacgatttgttcacactggtaatgaccgatccggatgttccctctaagacagatcacaagtggtctgaattctgccacttggtagaatgcgacttaaagctgttgaatgaggctactcacgagacctccggagcaaccgaattttttgcatcagagttcaatacgaagggctcgaacacactaatagaatatatgggaccagctccacccaagggatccggtccccacagatatgttttcttgttatataagcagcctaagggcgtggactcatctaagttctcgaaaattaaggatagaccgaactggggttacggcacccctgccaccggtgttggcaaatgggctaaggaaaacaacctgcaactagttgcctccaatttcttctatgcggaaacgaaatag

SEQ ID NO: 77702 - DNA, 606 bp, Saccharomyces pastorianus
atgtctagtgccatcgttgctaaactgaacaaagaggacatcattaaggacaccgtcaaggacttggcgttcgagattcttggtgagttgtcggtttcgtacgttgattctgacgacatcaaattgggcaatgccatgccaatggaagctacgcaagccgctcctaccatcaagttcacgcccttcgataaaagccaattgtcagccgaggataaactcgctttgttgatgactgacccggacgcgccctctagaacagaacataagtggtcggaggtttgtcactacatcatcactgatattcctgtcgagtacggacctgggggagatattgccatttcggggaagggtgtcgtgagaaataactatattgggcctggtccaccaaagaactccggttatcacagatacgtgttcttcctgtgcaagcaacccaagggagcggattcgtccacttttaccaaggttgagaacattatctcctgggggtacggtactcctggtgcgggtgcctatgactatatcaaggagaacaatctgcaactggtcggtgccaattattacatggtcgaaaacacgaccgttgatttcaactatgacatgtaa

SEQ ID NO: 77703 - DNA, 2412 bp, Saccharomyces pastorianus
atggcgttggaagaagtggtacgatacttaggacctcacaatgagatccctttgacactcactagagactcggagactggccatttcctcctgaaacattttctgcccattttgcagcaatatcatgacacggggaatattaacgagaccaacccagatagtttccccactgatgaggaaagaaataaattactggcacattatggaattgctgtaaatacagacgaccgaggtgagttatggatagagctggaaaaatgtctacaattattaaacatgctaaatttattcggtttgttccaggatgcattcgaatttgaggagcctgaaacagatcaggatgaagaagaccccagccattcgaaactaccagaaaacaagaccaaaagtgaaaattctaaggataatatcagctcaaagaggattaataatttacaagatatgagcctggattctgatgcacacagagaattaggctctcctttaaaaaaactaaaaatagatacctctgtgatagatgctgagagtgactccactccgaatactgccagaggcaagcctaacgatgatattaataagggccctagcggcgacaatgaaaataatggcactgatgacaatgacagaaccgctggacctatcataacattcactcatgacctaacttctgactttttgagcagtccactgaaaatcatgaaagcactaccttctccagttgtaaatgataatgaacagaagatgaaactagaggcattcttacaacggttgttatttccagaaattcaagaaatgcctacatcccttaataatgacagcagtaatagaaattcagaaggggggagctcaaaccaacaacaacagcacgtatcatttgatagccttttgcaagaggtaaacgacgcttttcctaatactcaattaaatcttaatattcctgtagatgagcatggaaacacaccattacattggctgacttcaatagcaaacctggaattagtgaaacacctggttaagcatggttcaaacagattatatggtgataatatgggggagtcatgcctagtgaaagctgtcaaatcagtaaataattacgactctggtacttttgaggcacttctagattatttatatccatgtttaattttggaagactcaatgaatagaacaattttgcaccatatcattattacgtctggtatgactggctgttcagctgctgccaaatattatttagatattttaatgggatggattgtcaagaaacaaaatagacccattcaaagtggtactaacgaaaaagaaagcaaaccgaatgacaaaaatggggaaagaaaggactctatactagaaaatttggacctgaaatggataatagcaaacatgctcaatgcgcaggactctaatggagatacttgcttgaacattgcagcaagattgggaaacatttcaatagtagacgctttattagattacggtgctgacccatttgttgcaaacaaatcagggttgagacccgtggattttggggcaggtacttcaaaattacaaaatacgaacggcggtgacgaaaactcgaagatggtctctaagggtgattacgacggtcaaaaaaatggaaaggccaaaaaaataaggtctcaactgttgaaaaacccacctgaaacaacttcgttaattaatgatgtccaaaatttactgaattccatctcgaaagattatgagagtgaaacagtgcaatataatgaaaaattagaaaaactacacaaggaattgaacgaacagcgagaagaattagctaattctagagaacaactagcaaatgtgaagcaattgaaagatgaatactcactaatgcaagagcaattgaccaatttaaaagcaggaattgaagaagaagaggaaagttttagggaagagagcaaaaagctaggaataattgcagatgaaagttcaggtattgattgggactctggcgaatatgatgcagatgaacccttcaaagtagagttcctttcagatttcttggaggataaattacaaaagaattatgaaggcgatatttccaaactattagaagcggagtcgaaagagcagataatggaacagatacgaaatcaaattcccgcagaaaaaatccaatcgatgcttccaccaacggtcttattgaaggcaagaataaatgcatacaagcggaatgataaacacctaaccaatgtattggatacaatcagcaccaaacaatcagaattagagaataaatttagaagagtgttatctttatgtttgaaaatcgacgaaaataaagttgacaatatgcttgatggtttgttacaggccatatcttctgaagacccacaagacattgacactgacgaaatgcaagattttttaaaaaagcatgcttcatga

SEQ ID NO: 77704 - DNA, 759 bp, Saccharomyces pastorianus
atggtcgaagattccagagttagagacgccctcaaaggtggtgatcagaaggcattaccggcctctttggttcctcaagcacctcctgtcttgacatcaaaggataagattactaagcggatgattgtggtattagcgatggcatccctcgagacacacaagatatcgtccaatgggcctggtggtgacaaatatgtccttttgaactgtgacgaccatcaaggtttattaaaaaaaatggatagagacattagtgaagcaagacctgatattacccaccaatgtcttttgacgttgctagattctccaatcaacaaagccggaaagctgcaggtctatattcaaacaagtcgaggaattctgatcgaggttaaccccactgttcgtataccaagaactttcaaaagattttcaggtttaatggttcagttactacataagctttctatcagatcggtaaattctgaagaaaagttacttaaagtcattaagaacccaattaccgatcacctacctactaagtgccgtaaggtgacattatcctttgacgcaccagttatccgcgttcaagattacatcgaaaaactagacgatgatgaaagtatatgtgtctttgttggtgccatggcaagaggtaaagataactttgcggatgaatacgtcgacgaaaaagtcggcttgtccaattacccattgtctgcctcagttgcatgttctaaattttgccatggcgctgaagatgcttggaatattttatag

SEQ ID NO: 77705 - DNA, 1476 bp, Saccharomyces pastorianus
atgaattctccaacaatgaaatcggaacaacttactccaaaactctcaccaatgtccttttgtttggatgaccaaaaaaatgcaggctcttttcaaaatctattgaactcacctacgaagctaaaactagacactggcccgattggtaattccttgttatatccaacatcactctctaaattgagcgagttatcaagaggtggacgttctaaacaaagaaggggctctgacactatgaggtctgtatcgcctattaggtttcagtttttgaacaacactccaaagatgttaaaacccgagtacctatctcaaacaaccaataacctgccattgctatctgccctattgaagaatagcaagaaaactactagtgaaggccagaattcaaatcctgatccattgaacatagagaaaaacatcattaaacaaagcatcaaggacaaactagagcagctgcgcagttcagaatccgttgcgcaagtgcaaaagaaagaacgaaatcccccttcatttgaggccaaagtctgtgcagaagaaccgatattacggaaaaacgccgaagggttgctcccctcatacgttcctgttcctgctactcctttggaagatccagaaaatcatggggtgcgaaaggtcgaggacaaaggacttagagtcgtctccggcggctccactcagtgtctaagcaccgaagtgaacgaattgcctaaggatctgaatctagacaatttacctacggataataacggattcgttcaatatggtctcaaaggcaataacaacaacaacagatatagctttatctcgtctacgtcgacggactatgagcccgaatggtgtgacggacaacaacatatttcaatgcaaatggcctctatggccaatgcagaggaggcaaatagtcgtgaaaaatcgaatttagacataaagatcaagcagctagaacttgaaattacagaattaaagttgcagaatgaaaaattagtgcattccatgacgacgaacagatacattgaagaaagatttatgcttgaggttatgaaggatcctagtatacaggctcaaagatcccaaagagatattgagagaaaagtcaagcaactggagaaaaaattcttcaattgtaaaaaagttcttaagaaattgactgaatcctccgcagtagtggccacctccacttcaaaaactgaaggaaattcagcaagaatcccatgccctaagactagactggcacgcgtttctgttttagacctaaagaaaattgaagaacagccagattcttcttcgggaacttcgtccgaggaagatcatctaacaaacgatgatacggatgctaatactagcgaagatttaaatgttgcttttgaagaggagccaacttctgctatttccacaacagcatctgtgcagagtggggaaagtaaaagaggtttccaacttaaccttcctgtccaagtggagaagaaggaaaaatga

SEQ ID NO: 77706 - DNA, 798 bp, Saccharomyces pastorianus
atgtcttgggacgacgaagctatcaatggttctatgggtaatgatgacgccgttttgatggactcatgggatgctgaaattggtgatgacgaacctgtcatgcaatcatgggatgcagaagaggaagaaaagaagcctgccccaaagccaaaaaaagaacaaccaaaaaaggttaaaaaagggaaagaatcctccgctgacagagccctattggatattgacacattggatgaaaagacacgtaaagaattaatcaaaaaggctgaaatggagtctgacttaaacaatgctgcagatttgtttgcgggtttaggtgttgccgaagaacatccaagggctcgtgctttacaaaaggaacaagaggaacaagctctaaaaagacccgcctttaccaaggacacacctatcgaaacacatcctttgtttaacgccgaaacaaagagagagtaccaggatttaagaaaggctcttactgctgctattacaccaatgaacaaaaaatctccgctgaactactcctcatcgttagcgattgatttgattagagatgtagcaaaaccaatgtccatcgaatctataagacaaacagttgctactttgaacgttttgatcaaagataaggaaagagaggagaggcaagctcgtctggcccgtgttagaggtggtactgctactgggggtgctggtaagaagaaagtcaaaggtaagaccaatttgggtggcgcatttaagaaagatcaagatttcgacctagatggccccgacgattttgaattcggtgatgacgactttatgtaa

SEQ ID NO: 77707 - DNA, 765 bp, Saccharomyces pastorianus
atgaaggcctgttccatattatttaccaccttaattactctagccgctgctcaaaaagactctggttccttagatggccagaactctgaagatagctcacaaaaggaaagctcaaactctcaagagatcacacctaccacgacaaaggaagcccaagaaagcgcatcaactgtagtttctaccggaaaaagcttagtacaaactagcaacgtcgtcagcaacacctatgctgtggctccaagtaccaccgtagtgacgacggatgcacaaggcaaaaccacgacacagtacctatggtgggtggccgaaagcaactctgccgtaagcacaacttcaactgcctctgtgcagcccaccggagagacgtcaagcggaatcaccaactccgcatcctcctcaacgacatcaacatcaacggatgggccagttactatagtaactaccacgaattcgttaggtgagacttacacatctactgtttggtggctaccgtcctcagccacaactgacaacacggcttcatcaagtaaatcatcttcgggatcctcatcaaaagcggaatcaagcaccaaggtagtaagcactatcaaatcaacttataccactacgtcaggttctacagtagagacactgaccactacatacaagtctacagtcaacggtaaggtagcgtccgtaatgtccaattctaccaatggcgcctttgccggcactcacatagcttatggtgcgggtgcattcgccgttggcgcccttttgttatag

SEQ ID NO: 77708 - DNA, 1731 bp, Saccharomyces pastorianus
atgatttctgctactaattgggttccaagagggttttcctcggaatttcctgaaaagtatgttctggatgatgaggaagtggaaagaattaaccaattagcacagttgaatttggatgatgctaaagctactttggaagaagcagaaggcgaatcaggtgttgaagatgacgccgcaacaggtagttctaataagttgaaggatcagttggatatagatgatgatttgaaagaatataacctggaggaatatgacgatgaggaaattgcagataatgaaggtggtaaagacgtttccatgttcccgggtttaagtaatgatagcgatgttaaattccatgagggtgaagaaggtgaagatccatatatttcattgcctaatcaagaggatagtcaagaggagaagcaggagttacaagtttacccatccgataatttagttcttgctgcgagaacagaagatgacgtttcgtatttggatatctacgtttacgatgacggtgctgggttccacagtagcgatattcccgttgaagaaggagatgaagctgacccagatgttgctcgtggattggttcgtgaccctgcactttacgttcaccatgatttaatgttgcctgcttttccactatgtgttgagtggcttgactacaaggttggatccaattccgaagaagcagccaattatgctgccattggtacgtttgatccacaaattgaaatttggaacttggactgtgttgacaaggcctttcccgatatgattctgggtgaacctcttgataattcaatggtatccttgaaaagcaaaaagaagaagaagaagtctaagactggacacattactactcatcataccgatgctgttttatccatggcacacaacaaatatttccgttccgttttagcatccacctctgcagatcataccgtaaaactatgggatttgaactcaggtaacgcagcccgctccttagcttccattcattcaaacaaaaatgtttcatcatctgaatggcacatgttgaatggttccattcttttgaccggtggttatgattctcgagtagctttaacagatgttagaatttctgacgaaagtcaaatgagtaaatactggtctgccatggcaggtgaggaaatagaaactgttacatttgccagtgaaaatataatattatgtggtactgattctggtaatgtgtattctttcgatattagaaacaatgaaaaccgtaaaccagtttggacattgaaggcacacgatgctggtatctccacattatgttcaaacaaattcatccctggtatgatgagtacaggggccatgggtgaaaagactgtcaaattatggaaattccccttggatgatgctacgaacactaagggcccaagcatggttctgtctcgtgatttcgatgtcggaaatgtattgacatcgtcattcgctccagacatcgaggtagcgggtaccatggtcattggtggtgtcaataaagttttgaaactatgggacgtttttaccaatagatctgtacgtaagagctttaaaagtgaactagagaatgttcaagcaagagcaaaagaagaagcccaaaaactaggaaaaagttcaagaatcgccagaaaatacaccagtaacgataacccagatactgttataaccattgatgatcaaggtgaagatgaagaagaaagagaaggtgaagatgagcatgatgacatggcataa

SEQ ID NO: 77709 - DNA, 360 bp, Saccharomyces pastorianus
atgggatatactttatttcgattcattgttccttttaatccttacttttcttctttttatccttcttttccttcttatctttcttttcctttttgtccttcttttccttcttttctttcttttccttcttcgattttttttctttcttttccttcttttcttcatcatcatcttctaattttctcttctttgaggattccttttccttggtttcttccacttctgcagctggtttatctttgttataaagttccatggcttcttgaatggctaattcattcttcaaagttggcttaccagtgttgtagaattctaatctttgctcaacttgtttctttagtacggaaccaaaaacattag

SEQ ID NO: 77710 - DNA, 663 bp, Saccharomyces pastorianus
atgaacccattattccccaaaaatctgcttcaattaacctctattggtgaaattaaaactacactgacggtgaaaagtccaagtcttccccaatcttcaggtaaacactcgtggaattacgacggaaactttccaaacgaggttgatcctgatcaaaaaaatgacaccggcgatgaaacagtatatggcttttctttcccgatttattcatttggaaagacgttattattttctatggaggagaatttcattagtatatcgccgatttttggtaacatgataagtagatctatcatatcacagttagcccagttctcccctgatataatagtaattggcacctctgataaaatcgccagcatgaaggtaatgacggaaaatgaatgtacactacaaccaccagaatttataacgggattcataggaagtgtgctaacacaattgattgtcggtcccagtaagggactgaaatttaaatgtcttgtagcgcctagtgaggggcctaatggatttgagaaactttcgttgtctgacatgggttctttagttgatttgtgcggtcaatggcttggttttgagccttcaagatattctgaagaatgctatcgcttatggaggtgtgatagcgcggcaattggtgcacaatcaggcctatatatatga

SEQ ID NO: 77711 - DNA, 345 bp, Saccharomyces pastorianus
atgtctgaattaggtgccaaatatcaacagttgcaaaatgagttagaagagtttattgtggccagacaaaaattagagacacaattacaagaaaacaagattgtaaatgaagagtttgaccaattagaagaagatacacctgtgtacaaattgacaggtaatgtccttttaccagttgaacaaagtgaggcacgtaccaacgtggacaaaagattagagttcatcgaaacagaaattacaagatgcgaaaagaacataagggacaagcaggaagaactagaaaaggtgagaagcgagctaattaaactgaacaatacagcagcttccactggcccaggaaggtaa

SEQ ID NO: 77712 - DNA, 783 bp, Saccharomyces pastorianus
atgctttgtcgcaagactgccagaacgggctgtaaattctttcgtttatatcattcgaaccctatcgaacatgttaaaccaattcatattaaacctttaacttatggaaaagaatcaccccagtataaagtattgtcactagctctacaaaagtttgttcccgagcacggtttctctgaaagatccattgttgaatctttaaatgagctcggctatccttcctccatgatctcttcaataggtgctcccaactcgccctcgtttttccattcttccaccgctgtcatggaactgataaagtttcaattggtagataaaaggtatcgtttaactgaaggaatcaaccctgacgtaactccacaatacaaactaccctcattagaacatttgctgttaaaaagattggagatggacaagccaatcggtgggcatttgtcggaactaatgtcacaattggctattccaagcgcctttctctttgaaactgcaattcctgaactacacagattgtccgatgatatgatttacttttctaacgaaaaggaccaccatgattctgcatggtatgctaagagattggctgtttcgagcacctacatcggttcaaagttatttatggctcaggataaatcccacaattacaaagaaacgtttactttttcaaaggataaattacatagggtcatgcgtttgggtgagtactacaacaatactgaagagtttgcctggtacacgttaatgtctacggtaaatttaatcaaatctcaattagttaggggttaa

SEQ ID NO: 77713 - DNA, 336 bp, Saccharomyces pastorianus
atgctaggaagggcattgcgacctgggtggctgggcattactaggacggtggtgaagaaaccaagttgcgggtcctactttaacagaacctttcaaacagcaattaacactacaatgcctcccatgcaagagggcatgctgagtacaatgatgatgatgacggctacggcaacaaggatcactggcacagtcagtgagccattaaacggttcaaatatagtgatgcaactcgattcagtgatgagaaagaggaaaaaaaagatgaagaaacacaaactgcggaaaagaagaaagagggagaaggcagaaagaagaaagctatctcagggtagataa

SEQ ID NO: 77714 - DNA, 1422 bp, Saccharomyces pastorianus
atgggtggagaaattattactttgcaagcaggtcaatgcgggaaccacgttggtaagtttctctggtctcaattggcgaaagaacacgctataggcaccgatgggctatctcagcttcctgattccagtacggaaagagatgatgacacaaagcctttcttccgcgaaaacagtaggaataagtttacgccaagggctgttatgatggattccgagcctagtgtcatcgccgacgtggagaacacatttcgtgggtttttcgacccaagaaatacctgggtagcttctgatggcgctagcgctggtaattcttgggccaatgggtatgatataggaactcgtaaccaggatgatattcttaacaagatcgacaaggagattgattctaccgacaatttcgaaggtttccagttgctgcactcagtagccggagggaccggttcagggctcggatccaacctcttagaagcgctgtgtgatcgatatcctaaaaaaatactcacgacatattctgtgttccctgcaagatcttctgaggttgttgttcaatcttataacactattctggctttgagaagactgatagaagatagcgatgcaacggtggtgtttgataacgcttcgttgctgaatatttccggtaaagtgtttagaaatccgaacatcgatttacaacacacgaatcaattgatatcgaccataatatcttcagtaacgaacagtatacggtttccgagttacatgtattcatccatgtccagtatttactctaccttgattccttctcctgaacttcatttcctaagccctagtttcactccatttacatcagattatattcacgatgatatagcgcataaaggccattccagttatgacgtcatgttagatttattagacccttccaattctcttgtctctaccgcgatgaacaatccaacatattttaacgtttataatacaatcattggtaatgtagaacctcgtcagatatcgcgtgctatgaccaaattacaacaacgcatcaaattcccctcatggtcctcttctgcgatgcacgttaacattggaagaagatcgccatacttgcctttacaaccaaatgaaaacgaagttagcggcatgatgttaagcaatatgtctaccgtggtgaacgtctttgagaatgcgtgcaatacttttgacaaagtatttgccaagggcgcatttttaaataattataatgtaggcgacttgttccaatcaatgcagaacgttcaagatgaattcgccgagtcaagagaagtagtacaaagcctgatggaggattatgtagctgcagaacaagattcgtacttggacgatgtacttgttgatgatgaaaatatggttggcgagttggaagaggacctggatgccgacggtgatcataaattagtataa

SEQ ID NO: 77715 - DNA, 453 bp, Saccharomyces pastorianus
atgcttttattttcttcttttttttctcacaacaaatgtccgaaacaaaaaaaggggcctcagccattaaaggtagtgaaaggcacttctaagagttgcgccaaacaagggaagattaaagggaaagaaaagctctggcaggctaaaactggcagactggtcatgagtgaaactggcgaaacttcagagtattataagcaggcgctggaagaatacaaagaggtccaagaagacgaagacccggatgtgtgggacacgagaatatccaagaccggatgctacgtagagaacctcgcattacagctgtgccatgccgaaacaggtgactggaggcagtgcttcaacgagatggcgttatttaggaagtgttgggaaaagaatggtaatagagagcgcgtaagcacagtggacgtggatgggacgaccagtaaggattcggaaaagaagaaatga

SEQ ID NO: 77716 - DNA, 2187 bp, Saccharomyces pastorianus
atggtatttggttttacaaagagggacaggagggtacctgatttatctaggtatgattactactatcagaaccatgaagattataacaaaagtcctcagctctctgctgctgctgcctctgctgcttctgccgcatcaccggatcgaaccaattactcaaggtcgcactcgctggttagtcatgcaccttcaataccgagacaaagaagttcggtaaagagcccaggaagaaggctttccacatcctctgccgctccgccaacgtccagggcagcagctaagcagtattcacagaagacttactcgttgaggtcgcaaaggagcggagagtaccatttacacccgcccggttatactactaatgggagccgtatgaattctatgacgtctggtgcgaatgtcagaagaaactacggtaagaacaaatcgacggccggcaacaataacgattcaagggccaactccattaccgtaaagactacacaagtaacagacccttcaggaaggactcaatcaattaccaaaaagacaataagaaaaataaatgggtatgaatacgtagaaaccacgactacgactaagaatttggttccattaggtgactcgcagcgtcatttcgatgaatttagtgaaaattacatgttgcaagatgacgacattttagaggaacaagctagtgataacattcacgatataatcgaggaaaacgaaacagataacgaaaagccatattccccagtaagcgaaagtcatttacaagatgattcagagctaaacgtggaaaaaccagatttcccacctggatcatatttccaccataagtattctacagacgttatgcctctagaagaagaaagtagtttatcaaacttcagtgacgcattagattatattcctcccacccatcagaccagtagtaaatatattcataataaaaggaagcaagcatcgacgacaagaaggaagaaaagaccgcctgccgtgaaaaacgcagaagcagaggccaagaaaccattaaccgaagcagaaatgtatctgaaggcactagaggttgctaaaagaaacgtttatcacacggatgctgcttcggataacgcatcggcccccctcgggagtaacaaatccaggaaaagtaggatgggtcaaaaaatgaccttgagaagcagtagtgattctccgacggcgactgctaatcttgtcaaatctaatgtcgaggttcaaccaaaaagatttacaagttccttcttcagcagaaatactaaaagcgccccccatgaagtgcacaatcactctgtgtctacacattttaaatcgaataaggcggttgacccagttccagagcctaaaagtgcaaacacagggctaacagataaagaaatgtatgaccaagctttgaaaatcgcacaagcgaggtattacaactcacatggtattcaacctgaagcagtcgataatagcactacggcggctaaacctcgtcaggtcggcgttagccatctgggatccactgggagcatcccgcccaatgagcagcactatttaggggattctgaaattccagtccaaagcgaagtgcatgaatacgagcccattccattgcagaagacaaaaacaactggttcttccaaaaataagttcaaaaccatgttcgataaagtgctgcaattctctcaagaaaactacggctaccagcacaagaaggaacaaggcgaacaaactccagttactcgtaatgctgaagaaagcttcccagcagcgtctatttcggaaggtgtgacaaccgcaaagccatcttcaaacgaaggtgtgatgacgaatccagtagttacagattcaccttcaccccttcaacaacaaatagactcaactactgcgtcctcgaatgggcaaagtcagggcaatgtacctacctccgcagtagcttcaacaacgagaacaagatcaccggaactgcaggataatctaaagtcttcttcttcgcttttacaggaccaaacccctcagcgtcaggaagacgccacggatccaacaacatcatcgacgaatgaattatctgccgctgagccaacaatggtcacttcgacacatgccactaagacaatacaggctcaaacacaagatcctcccacgaagcacaagaagtccagtttcttcactaaactgttcaagaaaaaaagcagccgttag

SEQ ID NO: 77717 - DNA, 969 bp, Saccharomyces pastorianus
atgtccattgtagcactaaagaacgcagtggtgacccttatacagaaagcgaaaggtagtggtggaacctcagagttgggggggtctgaatcaactcccttgttgaggggtagtaatagcaatagttcaaggcatgataacttatcctcatctagctcggatattatctatggtagaaattcagcgcaggatctagaaaactcaccgatgtcagtagggaaagataataggaatggcgataacggttcggataacgaaaaggcgaacctagggttcttccaatcagtagatcctcgcgtaattagcgatttgattatcgggctaagcgacggtttaaccgtcccctttgctctaacagctggtctatcttcacttggtgatgcgaaattggtcattaccggtggctttgctgagttgatctcaggtgcgatttctatgggccttggtggctatttgggagcgaagagtgaatctgattattatcatgctgaagtaaagaaggagaaaaggaaattttacgataactccaacctaattaacagagaaattgaagacattctgttagagattaaccctaatttctcggacgaaacaatcgtttcgttcatcaaagatttacaaagaacacctgagctaatggttgacttcattatcaggtacggtaggggtctagacgaacctgccgagaatagagaactaatcagtgcagtcactatcggtggcggttatctacttggtgggctagtaccactagtgccatatttttttgtctcagatgtgggcacaggtctcatttattctataatagtcatggttgtaacattattctggtttggttacgtaaagacaaaactatccatgggtagtggcagttcgacttcaaagaaagttacggaaggtgttgaaatggttgttgtgggtggtgtagcagcaggtgcggcttggttctttgttaagttactgggttaa

SEQ ID NO: 77718 - DNA, 663 bp, Saccharomyces pastorianus
atgtcggcaggtgatatatcagccataaatatcaagtctgtcaaaaaaaacagaaggaggaagaagagaagaacagctgatgtttcatcatcagattcttcatcatcggatccatcatcagaaagtgaaaaggaggaaatccaaaatggggccatcgaagaacacgttggagaaaatggtaaaagtgatcatgttttctcaaaaggtaatgacgaagacaaacaagaggacattgcaatagaagtttcggatgtcgagcttacagacgaagaaagcaaggatttgaagttaaattcaaaagaagtgatagacgatttaaccaaaatttctttgagcaagatcccagagcctacgaaatctcaaaacaaggagggttttatgaatgcatcgaaaattgccgaaaatatcaagcttgcgagagaagaatacaatgaattggcagaaaactttgtgcccaaagggaaagacaagacaaagttaagggaagaatacttaaatttactttttgaaaactacggtgatgatatcaatcgtcttagagctgccccggatttcacgaataaatcactatccattttggcagatgctctgcaggaaggcataggaatgtttgatattggtgaactagaattggtcttgaaaaataaagaaatggagaactga

SEQ ID NO: 77719 - DNA, 1224 bp, Saccharomyces pastorianus
atggcggttgcgatcaaaaaggagaagacgaaatttgcccccgttaaggaagttttatccgagaaggatcatgctaattatactaaatttcaggatacatcgaaactagaatggttttgcaggacgtcaaatcacaaaaagttcaagtcacatagtttattaaaagcagtaagaaatccaacggaaacaagaatagagacacaaactctgtattttacggatctcaccaacggcaaatgtggattaattcaactattatattccagtgttatgggcggtatatacaaaggttttcagttaaatttcaaaatatttaaagccagcagtgaggaaaactctgaagaagacattgatatatgggaaagctttaaaattgataatatcaaagattttgatacgttaaaagttgaatcggacaatgttacgtttcacttcgtacctttggaaaattcttcctccagtggatttgctcaattattaattaagatagatattccgaagggaagtacaagctgtttactaaaagatttgaaggttgacattaccgtaaatttacaagaaggattcataataaacccggacggttccaattattaccttgacaagagcatcagcttggaagagttagcaaaaagagactcttctagtacgtccagaaaaatgataagacatgtttttgttcctagaggtttttgcaatggtaccatctcatataagaaaaacgataaacctgtgaagctggacttgaaggacacgcctatgttgtatctggatgctgtccaggggctaatacccaataaggcggctagtaaatggaattttctttgtttcaatggtgagaagcgttcgatgatgtgtattgaattcaccacaacaaaagaatatggcagcactacagtgactatatgggcggttagtgataaggacaaaattttggaggtcgggtcaagtgtaaatgatcatgctgttaaatttccatctacaaaagaggataagcaaaatggttggaaatatcctacatccatttcatttccgcgtggttttgaagaatctaatttaagattagtcaataggtacgatataatgagtgagctgcccgctttcattaggtctattgctgaaaatctggcaaacatgaagccattcatttaccaattctgccagaagtctaaattcgatgacgatgaaggagtttccatcattgaaagtacatttatcaattga

SEQ ID NO: 77720 - DNA, 1188 bp, Saccharomyces pastorianus
atgtctgctacatcttcaagtggtgacgtgaaaaaatttcaagctgtaccaaaaccaacgagcaatgcatcaccaccaccagcatcgagtgggtttaacgcaaggaccctatggccggatttgatagaaacaccagaaaaccagtgggtttttgagtgcaaagatattattgaaaagataggcactaatggaccgatagcagtggaaatgaaaaaaaatatggaaaaatgcttaatgtacttttacacacttaaaaaaaaattaaatctttttgatcacacctatacggcatcatgcattctattttacaggtattggttcatatatggaatacctacagccataactgaatgtattcatatatcacagggaattctggtcaccgcttgcaaaacaatggagaataataggcctatagaggcctatattaaggcgacttgtgagtttttgatgcaaaatataccgtctttaaaaagtcgaacaaatattgataaacttaaatgggaatttagagataagttagtgacgaatgaaaaaaaaatactatgtttatttggctttgacttaaatatcagtaatccaaaagaattgattgaagaagtgttcagtggctattatagattcaacagggatcacaatctgccagaaaactttaaaaaagctcttccaaaaattcttcaagaatcaagaaattttatggtccaagctgtcacccagccagtttctttattgtgcgacggttatacgttcattgtactatctctcatatacagtggtttagagtataaaaagcttgtagacaaagatttcagatatccgaaaaacttcttcaaggatagattccctatcgaagtaacgccggaaaattttgccaatatctttaccgattacaagttactggaagagaattttttcaacttaaaaagtaataaaggtgctaaattacaaattgattcaagcatgattgattcggtgattgacgaaagtggcgatgtggaaaatgaagtttcagaaatctctgatccgtttaactacgagttgattaaatccggtgaggtgaaggaagagtttttgaatcatattgaaacaagggttaaagatttactagataaggctaaacaagaaagtatgaagagaaaggctaaagatcctataagaaccccagatgccaaaaaacctaaaatataa

SEQ ID NO: 77721 - DNA, 306 bp, Saccharomyces pastorianus
atgacaagggtctcaatcgatcgtaatcttcttgaccggccgtatcaaacaaacctaacgtatatggttcatcaccaatcatcacagtcaccgcatagttatcgaacactgttggaacatagtcggctggaaattgattcgttgtataggagattagaaggcacgttttcccaacagcaccatcaccgacaacaacacactttagcgtttgcattttgtggaagagctaatacgtttatttcttgttttataagttttgcttctctaattcgtttgttaacctatctcctcaggaaaatagaatag

SEQ ID NO: 77722 - DNA, 1362 bp, Saccharomyces pastorianus
atggagaaagctttggaattagacggagaatatccggaatctctgagggatgaattcaacatccctacatttaaatccatgggactatcgtccgacgataagcctgtgacgtacttatgcgggaattctttaggtttgatgccgaagtcaactaggaattcaattaatgctgagctagatgcgtggagcgactgtgctgtggaatcgcatttcaaacatcctgaagaagccagaggaaaggtgccttgggtcagcattgacttacctattcttccactactagcccccatcgtaggtgctcaagagaatgaagttgcagtgatgaatagtctcactgcaaatttgaattcattgttaattacgttttataaacctactgagaaaagattcaagatcctttttgaaaagggctcctttccatcagactattatgctttctacaaccagtgcaaaattcatggaatttcggaacctgagaatgtttttattcagatcgagccacgcgagggagagacttatatcagaactcaagatatcctggataccatagaggtaaatcaagatgaattggcgctggtctgtttgtcaggtgttcagtattacacggggcaatatttcgatattggccgaatcacctcatttgcccaccaattccccgacatattggttggatgggatttagcacacgctgtagggaacgtcccattgcaacttcatgattggggtgttgactttgcctgttggtgttcttacaagtacttgaatgccgggcctggtggaattggtggcttatttgtccactcgaagcatactaaaccagaccctgctaaggaaagtttgccaagattagctggttggtggggcaatgatcctgctaagcgatttcaaatgctggaagtattcgagccgattccaggagcattgggattcaggcaatctaatccaagcgttattgacacagtggcattgagaagttcattggaattatttgcgaagtttaatggtattaatgaagttcgtaaaagatcgttgttgctgacgaactatatgacggaactgttggaagcctccaagtattacaaacaccctttaaggatcgagaaattaccatgtttttttacgatattaactccaacaagcacagatgaagaacatggcgcccaattgtcactttacttcgattctgacactggaaaagaggatattatgcccaaagttttccaatatttgcatgaccatggtgtcattggcgatgcaagaagaccaaacgtaattagattggctcctgctcccttatataatacattttcagatgtatacattgcggtgaatgcactaaatgaggcgatggataagttgtag

SEQ ID NO: 77723 - DNA, 348 bp, Saccharomyces pastorianus
atgggggctagtagtggaagaataggtaagtcaatgctgacccaaggcacctttcctctggcttcttcaggatgtttgaaatgcgattccacagcacagtcgctccacgcatctagctcagcattaattgaattcctagttgacttcggcatcaaacctaaagaattcccgcataagtacgtcacaggcttatcgtcggacgatagtcccatggatttaaatgtagggatgttgaattcatccctcagagattccggatattctccgtctaattccaaagctttctccataattaccaatttgtctcttttttccacagaatatttaggcttaatatgtacgtattga

SEQ ID NO: 77724 - DNA, 2628 bp, Saccharomyces pastorianus
atgtcactgaacaacataacattctgtgtctcacaagatctggatgttcccctgaaagtgaaaatcaagtcattggaaggacataagccactgttgaagccatctcaaaaaatcctgaaccctgaattaatgctgatagggtcaaatgtattcccttctagtgatctaattgtgtccttacaggtatttgataaagagagaaacagaaatttaactcttccgatatacacgccgtatattcctttcagaaactctagaacctgggattattggttgactttgcccatacgtatcaaacagcttacctttagcagtcatttacgcattattttatgggaatacaatggatccaagcaaattccctttttcaatctagaaacgagcatctttaacttaaaagactgtactttaaaaagagggtttgaatccttaaaatttcgttatgatgtgattgaccactgtgaagtggtcactgataacaaagatcaagaaaatttgaataaatattttcagggtgaattcacgagactcccttggcttgacgaaatcactataagcaaattaaggaaacaacgagaaaataggacttggcctcagggcacctttgtcttaaacttagaatttccaatgttagagcttcctgttgtgttcatcgaaagggaaattatgaatactcaaatgaatattccaactttgaagaacaatcctggactaagcacaggcttacgagaaccgaataggaatgaccctcaaatcaaaatttctttgggggacaaatatcactccacattgaagttttacgatcctgaccaaccaaacaatgatccaatagaggaaaagtataggagattggaaagagcatctaaaaatgcaaacttggacaagcaagtgaagccggacattaaaaagagggactacttgaataaaatcatcaactacccccctggcactaaattaacagcacatgaaaagggttcaatatggaaatataggtattatttgatgaacaataaaaaagctcttacaaagttattacagagtacaaatttgagagaagaatcggaaagagtagaggttttagaactaatggactcatgggcagaaattgatatagacgacgcattagaactattaggctcaacttttaaaaacctttcagtgagatcgtacgccgtaaataggctgaagaaggcatcagacaaggagctggaattgtacttattacagttggtagaagctgtctgttttgagaacctgtccactttttccgacaaatctaacagtgaattcactattgtggatgccgtatcttcgcaaaagctttcgggtgattctatgttactatctacatcgcatgccaaccaaaaattattaaagtccatctcgagtgaatcggaaacttccgggacagaatcgctaccaatcgtcatttctcccttggctgagtttttgattaggagagcactggtcaacccaaggttaggaagtttcttctattggtatttaaagtccgagtctgaggacaagccatatttagaccagattttaagttccttttggagtagactggataaaaaatctcggaatatactgaacgatcaagtcaggctaataaatgtgctcagggaatgttgtgaaacaattaagaggctgaaagatactacagccaaaaagatggaattactagtgcatttattggagacgaaagtcaggcctcttgtcaaagtacgaccaattgctttaccactagaccctgatgtgttgatatgcgacgtttgtcctgaaacttcgaaggtatttaaaagctccttatcgccactaaaaataacattcaaaacgaccttaaaccaaccatatcacttaatgtttaaggttggcgatgatttgagacaagatcaactggtagtacagatcataagtttaatgaatgagttattaaaaaacgaaaacgtggacttgaaattgacaccatacaaaattttggcaacaggaccacaagaaggtgccattgaatttatccctaatgacacattagctagcatactaagcaaatatcacggtattcttggctaccttaaactccactatcctgatgagaacgcgacattaggcgtacagggctgggttttagataattttgtcaaatcttgtgctggctattgtgttattacatacatcttaggtgtcggcgataggcacttagacaacttactagtcacaccagatgggcacttttttcacgcagactttggttatatcttgggtcaggaccccaaaccttttccgccattaatgaaattgccccctcaaattatagaggcgtttgggggtgcagaatcatcaaattatgataaatttcgcagctactgttttgtggcatattcgattttaagaaggaatgcaggcttaatcttaaacctgtttgaattaatgaagacgtcgaacatacctgatatcagaatagatcccaatggtgctatattacgtgtaagagagagatttaatttgaatatgtccgaagaagatgccacagtgcattttcagaatctaatcaatgatagtgtaaatgctttgctgcctatcgtgattgatcatttacataatctggcacaatactggcggacctga

SEQ ID NO: 77725 - DNA, 966 bp, Saccharomyces pastorianus
atgatttgcataacgtgcatgcggcccgtagattccctttatacagtgtactccaatgaccacattcagctgacagattgtccatattgccaagagacagtagacaaatatgttgagatagataatgtcctgttattcattgatttgcttctattaaaagcaggtgcatatagacacttggtattcaatgctttggaattgcatctctcaaaatatccgaaaagaaaagcgctaaatgattgccagtgtttgcgtgactatacgcaaactttgttatttaacgtaaagaactggttttgtaaatatgaccggttaaatcgcctttggcttctactattatcattcgagatttatttaacttgggttactgaggagagtaaatacatctattatttgaaccgtaacaataatgatggtaagctcatcatgctttcaaaaaaattaccagagagcttcaaatgggactcggcaatcatgcgcaataccattacaagtaaagtgtttacctggagcccaccaatacaatatctttactttgcaagttattgtattcttgacgtttctttattccacacctttacccagtatttcatactgaaaaagttgcattggaagcactattccgtttcttcaaaggatgtcatatcatatacgatcttattatcgtacggtgccaaaatttttccgatattgatgttgatatggccttatgatactctaatttcgatgagtatcattaagtgggtagctaatctctatattattgaatcgttgaagattgtaactaatctttcctattggaatatcataaagatttttataagcgtgtctttattacgatatttcatggttaagccaatacttataattttcgtggcaaagttcaacttttcagttattaagaatttaatacaccaggagtttatactactactacagaagtcaggaacttatttattgttataa

SEQ ID NO: 77726 - DNA, 819 bp, Saccharomyces pastorianus
atgtctcgcgttggtgtcatggtattaggacctgcaggtgcggggaaaagcacattttgtaattccattatatcacatatgcaaactgtaggacgaagagctcatattgtaaatttagaccctgctgcagaagctaccaagtatgaatttactattgacattagagatttaatttccttagatgatgtcatggaagaaatggatttgggccccaatggtgcgctaatatattgcttcgaatatcttttgaaaaatctagactggcttgacgaagagatcggggatttcaacgatgaatatttaatctttgactgtcccggtcaaattgaactctacacgcatatccctgtcttaccgaacatagtgcgccatttaactcaacaactgaatttcaacctttgcgccacatatcttttggaagcgccatttgtgatagatagctcaaaattttttagcggtgcactatctgctatgtctgcgatgattctattggaactaccccatatcaatgtgttgagcaaactagacttgataaaaggcgacatcaataagaaaaaactgaaaagatttttgaatcccgatgcaatgttattaatggaaacggaaggaatgaatcaagcatccaaccctaaatttctaagactgaaccagtgcatagccaacctcgtcgatgatttcggtatggttcaatttttacctttggaatctaataatcctgacagtatagaaaccatattatcgtatgtcgatgacataacacaatgggcagaaggacaagaacagaaagagcctaacgaccaaatagatgtcgaagaatag

SEQ ID NO: 77727 - DNA, 1164 bp, Saccharomyces pastorianus
atgagcactgcaactacaacagttactacctccgatcaggcttctcatcctaccaagatatattgctccggtttgcaatgtggtagagaaacttcgtcccaaatgaaatgccctgtttgtctaaaacaaggcatcgtttccattttctgcgacacaagctgttatgaaaacaactacaaagctcacaaagctttgcacaatgctaaggacggcttggaaggtgcttatgatcctttcccaaaattcaaatattctggtaaagtgaaggcttcatatccacttaccccaagaaggtatgtccctgaagatattcctaaaccggactgggccgctaatgggctaccagtcagtgaacaaagaaatgatagacttaacaacatccctatatacaagaaagatcaaattaagaagattagaaaggcatgtatgttgggtagagaagttcttgatattgccgctgcccatgtcagaccaggcatcactacagatgaattagatgaaatcgtccacaatgaaacaattaagagaggtgcctacccttcccctcttaattattacaactttcctaaatcgctttgtacctctgtcaatgaagttatttgtcacggtgtgcccgataaaactgtcttgaaggaaggtgatattgtcaatttagatgtttccttatactaccaaggttatcatgcagacttgaatgagacatattatgtcggcgaaaacatttctaaggaagctcttaatactactgagacctcaagagaatgtttgaaactagccattaaaatgtgtaagccaggtaccaccttccaagagttaggtgatcatattgaaaaacacgctaccgaaaataagtgcagtgtagtaagaacttattgtggacatggtgttggtgaatttttccattgttccccaaatattccccactacgccaagaatagaacacctggtgttatgaaaccaggtatggttttcaccatcgaacctatgattaatgaaggtacttggaaggatatgacctggcctgatgactggacttctaccacccaagacggtaaactgagtgctcaatttgaacatacactgttggttaccgaacatggtgttgaaatcctaacagccaggaataagaaatcaccaggtggcccaagacagagaattaaatag

SEQ ID NO: 77728 - DNA, 1833 bp, Saccharomyces pastorianus
atgcttaaaataaaggcccttttctcgaaaaagaaaccggatcaggcagatttgtctcaggaatctaaaaaaccattcaagggtaagaccaggtcaagcggtacaaataacaaagatgtttcccagattacttcttcccctaagaaaagctttcaggacaaaaatatagttcagtacccgagtgttgtcgcagatgaccatcatatgaagtctttaaccgatgaattagtaaccacgatagactcggactcttcaccgagtgataatattaccacggaaaatgtggaaacagttacttccgtgccagctatcgatgtccatgaaagtagtgaaggtcaattaagttccgaccccttaatatctgacgaatctctttcggaacaaagcgagattatcagtgatatccaggatgacagtactgatgatgacaatatggaagatgaaattccggaaaaatccttcctcgaacaaaaggaattgataggttacaagctgatcaataaaatcggtgaaggtgctttttcaaaagtctttagagccatacctgctaaaaatagttctaatgaatttttaactaaaaactataaagctgttgccattaaagttatcaaaaaggcagatttatcctcgattaatggtgatcatcgtaagaaggacaaagggaaggacagcactaaaacttcttccagagatcaagtcttgaaggaagttgcactacataagacggtttccgctggttgttcacaaattgtcgcgttcatagacttccaagaaacagatagctattattatattattcaagagttactaaccggtggggaaatcttcggcgaaattgttaggttgacctatttcagtgaagatttatcaaggcatgtaatcaaacaattagcactggctgttaaacatatgcattcactaggtgtagtgcatcgtgatataaaacctgagaatcttctttttgaaccgattgaattcacacgctctataaaaccaaaattgaggaaatcggatgatccgcaaacaaaggcagacgagggaattttcacaccaggagttggtggtggtggaattggtatagtaaaactagctgattttggtttgtctaaacaaatattttccaagaacaccaagactccttgtggtacagtcggttacactgcccctgaagttgtcaaagatgagcattattctatgaaagtggatatgtgggggattggttgcgttttgtacacaatgttatgtgggttcccgccattctatgatgagaaaattgacactttaactgaaaaaatatcaaggggtgagtatacctttctgaaaccttggtgggatgaaatcagcgccggtgccaagaatgccgtggctaagctattagaactagagccgtctaaaagatacgacattgaccagtttttggacgacccatggttaaatacattcgattgtttaccaaaggagggcgaatcttcacaaaagaaagcaggtacttccgaaagacgccatccgcataagaaacaattccaactatttcaaagagactcctcgctactgttttcaccagctgctgttgctatgcgtgacgcctttgatattggtaatgctgtgaaacgtaccgaagaagaccgtatgggaacacgtggaggattaggctcgcttgctgaggacgaagaattggaagatagttacagtggcgcccaaggcgatgaacagctggaacaaaatatgttccaattaacgctggatacgtccacgattctgcaaagaagaaaaaaagttcaagaaaatgacgtagggcctacaattccaataagcgccactatcagggaatag

SEQ ID NO: 77729 - DNA, 306 bp, Saccharomyces pastorianus
atgtcgttgcaatattttggaacacttacttatcttataaaaactcaaaggttatggagaaggacaaggtacctgttcattatccacccgtggtcgaataactggataagaaatcctgattttgaaaatatttggaattcaactagcatatttatcagaccttgttccttggggtactggaacagcatatacctaatagactttcggcagagagcagaccaacttcataaaaatttgagtcaccaaagttggctagcaatctgcttttcctttacagatgtgcttggtcaggaacaatttatttaa

SEQ ID NO: 77730 - DNA, 1710 bp, Saccharomyces pastorianus
atgatgaccaaagctttttttaacaaactaccgtttgaggtattccgtcggtacgttaggacaggtaaaagcatccctcaaagaagccccaggacaagaaaatctcttctggtgggtgggactattgcatcagcagtagttttgtacaactttaatgacacttttcatgattctgtaaagcacacggcgctgacgactaaaagaatcgctgtcgtcacacaagctaccgctcgttgcttctaccattacaagagggctctaaataaaagctatgagaacaaaaaagaacgagaagttgccttaaataaatgtcataagatgtgtgccttaatcacgttgcatgcgctacgatcgaatggtgggatatatatcaaattaggccagcacattggggccatgacctacctgttgcctaaagaatggacggatacaatgataccgttgcaagaccactgtcccgaatccacctacgaagaaattgatgagttatttaaagaagatctaggcaccagcattgaggatatgtttttagaattcaacaaaaccccgataggtgtagcttccttggcacaggttcatgtggcaaaactaaaaaatagtgacggtaaaggttctagtgtagctgtcaaatgtcagcatccatcgttgaaggagtttataccattagatgttatgctgacaagaacagtgtttgaactgctggatgtcttcttccctgattatccgttaacgtggcttggtgatgagcttcagtcttcaatctacgtggaactgaattttaccaaagaagctgaaaatgcagaaaaaacccgtcattattttagtaagttcaagaagcaaacagcattgaaaatacccaaggtcattgaaagccacaaaagaattttgattatggaatatgttggaggcaaaaggttggatgatttggagtacattgacagtcacggtatctcgcgcagtgaagtttcgagttgtctctctcatattttcaataacatgatttttactcccaatgtaggtattcattgtgatcctcatggaggaaatctggccatacgatctgttaagcccgctaaagataatggataccataactttgaaattgttttatttgaccacggactctatagatatcctagcacgagaacaagaagactttatgccaaattttggttgtcgctcctattcgacaaggaccagacaaaaatgaagaagtatgccaaaggattcgcaaacatcaccgacgaacagtttccccttttagcggctgcaattacgggccgtagcattgatgctgctttgaattacgacatttcaacgagtcgaacacaagaagaaatggacgtcatggcaaatgggatcttggaaggaacgttactgagcgacttgatgagcattttgtctagaatccctcgtgtggtgcttttgatattgaagactaacgacctaaccagacatcttgatgaatgtctacagaatccactcgggccagagaggactttcctgatcatgacgcaatactgcgccaagacggtctacgacgaaaaagtggaaagaattaattcggagtatgcgaggtggtctattaaatggatgtgggagaacttgacaaactggatagtctatgagaggcgtattaatcaattgtatttttatgattttgtgttgtggtggaaaaaatttattccgaagacttggttgtcatcttaa

SEQ ID NO: 77731 - DNA, 372 bp, Saccharomyces pastorianus
atgggtgtgggtggaacgaggattgtatcgtttagacagccgaattattacccggttactcaacaaaaaggggcaagccagacaggtgcagtggctcagccgtacagctcgtactgtggtttgctaatgcgctgggcggttgttgagataagaagaagagggaaagggaaagggaaaggaagaaagaggaagagagagagagagagagagagagagaaagggcacacgaaattcaggatacggcggaggagttatctttattttatacggtcttgccttgtaaggccctactcaagctggaacaagaaaaacagttgtagcttccacaagatgttggctatagagattgttctgtgcttaaaggctcgctaa

SEQ ID NO: 77732 - DNA, 966 bp, Saccharomyces pastorianus
atggttgacgctaggggtagtacgccatgtttaattggtgattctataagaaacgttaatgatggaaatagtctggatttccagtatactaatcagtttaatgaggaaagtgaggcttcgaggttactaacgccacaaacgagttccaatcacgccctaagcaagatgcagaaggatgatgatattcgagatagatcttatacatctgtagcggaattgaatcgtgagggtgctttgctgaccgatgaagttgatttggagaatgttgatgcttcgaaagttcgcagcaatagagacgacctagaggcagaggagaaaaggaaaaaactactcttgttgaaaaaaaagcaaagaaataaatccatcaactcggaaagtttttcctctccttctctgcgtgcttccaaatctaattcactgattacatcaactgatcctgtcgaagatcacatcagtaagtactcttcatcaggcacccctgaaaatattacaggtgaggcagacgacgaagacgaagacataattagaaactcttacgggcaaatgatcaaaaacaattccaacaggccacatttggcgaagggtgaatcgtaccagtccgcggaacaggaaatagatcatacggcgcctgaaaaatcagagaaaagacaagaaagaagcggtagatcctttgatagacaaaaatcttcggctgagtttctaagatccttatcgaggtcaataagtcgtggacccacaaagaacaaaacggtttcgccctctaagggagaagactctagaatgtatagtaccagcaactactctatatcattagttgatttggagaacggacccaaaattatcccggaaactttagaagaagagcaggaggacgccgaaaaggagggtgttttgatggaagacgagggtaatgaagaatacaccaaagatttggaagaagcagctaacaaagctcaaccacagtag

SEQ ID NO: 77733 - DNA, 1719 bp, Saccharomyces pastorianus
atgttgagatcatccgttgttcgtagtcgcgctactttaaggcctttattgcgtcgtgcttactcctctcataaagaattgaaattcggtgtagaaggaagagcctcccttcttaagggtgtcgaaactttagctgaagcggttgctgctactttgggtccaaagggtagaaacgttttaatcgaacagcctttcggtcctccaaagattactaaggatggtgttacagttgccaaatctattgtgttgaaggacaagtttgaaaatatgggtgccaagttactacaagaagttgcctccaaaaccaatgaggctgctggtgacggtactacttctgctactgttttaggtagagccatcttcacagaatccgtcaaaaatgtcgccgctggttgtaaccctatggatttgagaaggggttctcaagttgcagttgaaaaagtgattgaatttttgagcgccaacaagaaagaaattaccacatctgaggaaattgctcaagtagcaaccatttctgccaatggggactctcatgttggtaagttactagcttcagctatggaaaaggttggaaaagaaggtgtcatcactatcagagaaggtagaacattggaagatgaacttgaggttactgaaggtatgaggtttgatcgtggttttatttctccatacttcatcactgatccaaagtcgagcaaggtggaatttgaaaagccattgctattgttgagtgaaaagaaaatttcttccattcaagatatcttaccagctttggaaatttccaatcaaagcagaagacctttgttgatcattgctgaagatgttgacggtgaagctcttgcggcctgtattttgaacaagttaaggggtcaagttaaggtttgtgctgtgaaggcgcctggtttcggtgataatagaaagaatacaattggtgatattgcagtcttgacgggcggtactgtttttactgaggagttggatttgaaaccagaacaatgtaccatagaaaacttgggttcttgtgactctattaccgttactaaggaagacaccgttatcctgaacggtagtggtccaaaggaagctattcaagagagaattgaacaaatcaagggctccatcgacattaccaccacaaattcatatgagaaggagaaactgcaagagcgtttggccaaattgtccgggggtgttgctgtcatcagggtcggtggtgcatctgaagttgaagttggtgaaaagaaggaccgttacgatgatgctttgaacgctaccagagctgcagttgaggaaggtatcttgccaggtggtggtactgccttagtgaaggcatctagagttttggatgaagttgttgtcgacaatttcgatcaaaaattgggtgtcgatatcataagaaaggccattacaagaccagccaagcagatcattgaaaacgctggtgaagaaggttcagttatcatcggcaaattgattgatgaatatggtgatgattttgccaagggttacgatgcctctaagtcagaatacaccgacatgttagccactggtatcatcgatccatttaaagtggttagatccggtttagttgatgcttctggtgttgcctcactattagctactaccgaagttgccattgttgatgccccagaaccaccagcagctgctggtgctggtggtatgccaggtggtatgccaggaatgccaggtatgatgtaa

SEQ ID NO: 77734 - DNA, 195 bp, Saccharomyces pastorianus
atgtctagtcgccaaggtggtaagatgaagcctctaaagcaaaagaagaagcaacaacaggacttagatcctgaagacattgccttcaaagagaagcaaaaggccgatgctgctgctaagaaagctttgatggctaatatgaaaagtggtaaacctttagtgggtggtggtatcaaaaaatctggtaagaaataa

SEQ ID NO: 77735 - DNA, 2484 bp, Saccharomyces pastorianus
atggaaggtttgaagaaaaagatttttgatgtttgcctgaaaaatgacttagcacagactaggaatgaaacgaaaggaatccactatgggttaatgactttggaaacttctaaacaactggaggaatttctccatttgctagtaataaagagagaagtaattcaaaattttgagttgttatttcacatcataaatgttgccgttaaaatcaccgattcaaatcttccaagtgatgatatctggcatttcattttaaaattaagattttcttctgagattaatatagacgaataccccaaagttttaaattatttacttgagactggcatcgcaatggaaaatccagtcagttggaaatgcttggccgttattagcagcatcctcagcagtgtccctcaatccaaaaagattataactaacctgatcgagacagaacatgccaaaaagattggtcagttgtttgataatattcaagatttgcaacaaggaaattttctggtggaaattctctctaactgttttaaaaaaagtgcttcaaattccaagaaagtggaaaaaatacctcagttatggcaaagcaggtctaagaacaaatttttctttgaaaatgaattttacccttttagcagcaaaaatgggagcttacaaacctgccaatttctgtgcaataatttcatgtcaactttatccttcacgggtattctaaggcaggtttcttatagcggatctgaaacattaaaaaatctccgtatatttaagaaaaaagacgatgaaaattcttacttcattcagtgcatttacaacaaaatctatctttggttagacgagaaagcccctttggaatttgaaagaaagaaaatcaggattaccaaaaacttaaaaaataaaattcaaattaaattgaggcaacctttctacgaatgtgtgagaactaccgctgataaaacagcactcttatttaacaaaacgagggggtttcagctcgaatttgaagacgagaaattaggtgaaacttttttccacaatgtcaacaatatacctaagattagtgaagtactaaactttttagttttagactatattgaagaagaaccagagaatgaaggtgaagaagaagagcaaaccagaagggcagatgagcagaaagaggatgaagaggaagaatctctcgatgaattatccactcccatggtatatccaataaaatcatctatttcccataaccataacgaaaaggttcagttagtcactcccgaccgttctgtttccatacgatctgatgaatgggatttaaagtcaaatactgaagacgaagaaggtaatgttcttacagacctgaaaataagcagcactaaggaaacaaaaaggcaaacagactacgtccatattgattcagaagaccagtcaccagtagtatccgctcagatgagaaaaatgagaagagaatctacgaaaacactagaaatattgagacaagagttcaaagataaggatgtacaaaacaaagaagaccagtccgaacaaatacaaaacccgtttgtaaatacatcctcgttagttgtaggtaaatcctgtcttgttaatcctaaggaaaagcctaatattgatcaaacggtcgtcggaataaccgaattaaagtcaaattcttccattaagaaaagggatatcaacattctcgacactatatttgggcaacctccgtccaagaagcaaaaacaattccacaaaaaggagaaaaagaagcagcagaaaaagttgacaaactttaagcccattatcgatgtcccttcccaagataaacgaaaccttaggtcaaacgctccgacaaaacccaaatccataaaagtaagtaagctgcgtaccgataagaaagttacaggggaaaaatcaagcccagaaacaacggcagagaaagttgatgatcagactgtgcgtagcaacgatgaacaagcagtgagcagagcaactaaagaaaagcgctttccagatgtcaatgaaggcaaagaaattactaacgatgacgctaaagtatctctcgagtccaaaaaaaacaatgaaacttttgttgattcaagtgtagtagaaaaacatacccccccagacaaagactgtaacaattgtaacattacagatattttggaatctaccactgttatcgacttgcactcaccccatggattatctgctcctggtcagaatactttcacaaacaaactgcaagaacaaatttatagttcaataaatcatttttctaacgaattggtaagaaaaatttcgataataaaccaagagttaaacaagaaaatcttaaaagagttgtccgaaaaataccaaaaactattcgccgaattacaagataatttccagaatgataccaatgagatgcttaaattcatgggcgagatcaaagacatgatgaatctcccggaagatcagctagttcatgctattaggacaagaaaatttgataacaacaagagataa

SEQ ID NO: 77736 - DNA, 204 bp, Saccharomyces pastorianus
atggattctaagaccccagtcaccttagctaaagtcatcaaagttttaggccgtaccggttctcgtggtggtgttacccaagttcgtgttgagttcttggaagacacttcccgtaccattgtcagaaatgtcaagggtccagtcagagaaaacgacattttggtcttgatggaatctgaacgtgaagctcgtcgtttgcgttaa

SEQ ID NO: 77737 - DNA, 1029 bp, Saccharomyces pastorianus
atggattctgagttgaaagggcagcagctaagtgatgcagaatggtgtattaaaaaaattattggtgagggaaattgtctcctattatttctaccgacgtcatctccaaccacaattgtaatgattgttttagtttccttggaacgcttagttccctacgttttcaaactttcacaaactcaattatcacagcaatgccagagccaaggttttacggatagtatattattaaatctaattaaactaaaactaatggacattctacaagctcctcaagaaattaaccaaattggattggtagattcaaatttggtttttagtttcgatgtatctgcggatattacagtttccataaatagcgtaccttcacatgttactaaggatatgttctatatgattttgcaaagtttatgtatgcttttattaaaattggtaaacctttccacccaataccactatgtacaacgggatattttgaatcaaaagcaaaaatgcttagattttcttttaatttctcttcgtgatttagacggtgggagtaaagttatcagtcaatgggctcctgaaaattctaagaactatgaatctctgcagcaatgcacagacgatgacataatcaaaaaattactacataaaggaaaattccagcatcaagaatttctggcggactcattgaaaacattattatcttttagaaacaaatttcaagatgtgtcgcggtttgaagaatctggagaacttaacgaaaaagagcgcgtcagatttcctgcggtgaatcatttttataatgatgattttgaattgcaagtagaccctacaaatgaggctcgatcaaatagctgcggtaaaattaaaccaaagacagatttcaagccaaaatctagagaaagtagtaccagttcgcaacttcgcctggagaatttttctgaatctgaggctacaccagaaaaaacaaaatcaagttcttctttggtcgaagaatacccacagaaaaaaagaaaatttggaaaggtgagaataaaaaactaa

SEQ ID NO: 77738 - DNA, 2106 bp, Saccharomyces pastorianus
atggatagatcccattttcctatgacatctactaccggagagcccgttttaagtggtaagaagggcaagaggaggaaggtcatcaagtcatgtgcattttgtagaaaaagaaaactgaaatgcagtcaggccaggcctatgtgtcagcaatgtgtaattagaaaactaccgcaatgcgtttacacagaagagttcaactatcccttgtctaatacggaactgttcgagcaagtgcccaatgtagcgttggttcagaagattgagaatttgcagactctactgaaggaaaacgataacaataatgcgaaaccggtgtattgcaggagttcagaaaatccattacggtcactgagaacttcggttttaggtgataatggctcgaggtatgtgtttggccccacctcctggaaaactttatctttgtttgaacaaaataagtttcaaactgagtttcaaaatttatggaaagtcttgaaaccactttctgaatgcactaaatcgcaattaaatgaaaatgatgttgtagcagatttgcctagttttcctcaaatggaaagctgcattaaatctttttttgctggaccgctgttcgacatattgcatatcttcaaccaagacgatattctgtccctcttggacagactttttattagagataccacggacaagaacctagtcatcctcctcgatttgcaaggtaatgcaaaagataagtataaccttggcattgtacttcaaattctttgcttgggctattataaccaagatatcccttcttccgtgagtcatttccttcacagtttaagtgcagcgtccttgtcatcatcgagctcaaattttgtggaaaaactacaatttttcttattgtcctatattagtgtaatgataagttgcacggacggtgtatgggatgcgactcaaggcgttgacttaatcaacgagctatgccaggggtgcataagtttgggtttaaatgatattgataaatggtatttgaacgaaagtgaggaaaccaaacaaaacttgaggtgtatttggttttgggctttattccttgatgtatccacctcatatgatataggtaatcctccgtctatttcagatgatcttttcgatttaagtatatttactgcgcagaatttccaatcaccgagtattgactttaggagagttaagctaatgcacgattttttagatgtttcccgattcactactcgtgaaattcacaagagagagatgaacgaaaaattgaccactttttcattgagattgattgaatttatacaatctaacttttcacctatcgaacattatacaaattcagtttactactctgatattgatccctttgatatattgattttatcaagatctctaagtatagttgctagtatatacaatattgagatgatcatcgctcaacaaagcagaatcatagataagaacagaatggttcagttcttgttgatatccatatcagtctgtgttaatacaatggtatttcattttaaagagcctatcaacgaccaggagaacgtgttaactgaagggctaaaactgtctattattctaatcaatccacttttaatacgaatagtatcgcaagtgtacagtttagcatttaataggttaatcttcagggagaagggattccttttccttattgaccttgacactgggaaaaaaatacaattcattaaatatgaagaagaaaactttgatgaacttttgacaggattcgatgttaggactgataaatttctctcattttcaggaacaataataagattttacgaaatcgttgatagcatatttgctgttaatgaaagaaataagcgattgttaaaagcagtttccaatttttatcagttaacttcaactttggcgtttgaacgcgtaagtagggttttattcgataaagcgtcccaagcaagaatagagactgaaaaaatttggctgaaaaagggcattaatatggagcacttcagtgatctcatgattgaagattttattaatgatgtttggaaaacgttcaaagagatttccaaagacctttggtccattgacaaaaagaaattttataaacaatatcatttcgatttataa

SEQ ID NO: 77739 - DNA, 1713 bp, Saccharomyces pastorianus
atggttgccgctttaacgtatttgcctactgagcttatccaaaggatatttgagttcactgtggtggaaacagactctcaatattggttgtacaatttagtggctctaattgatttttctgtctcttcgagaggtggtggctctataacggaagacttcttgacaaattacgttaggaagaatttgatggttttagatctgacctgtgaggccacgcaagactcgattttacgagcggagtacgggtttctgaagagattgttgccatacattgacatggacgcacaatatatcagagttgttgatttggaaaccaatgttgacaaggcccagaatttaaaagcagaaaaacttattgttatatttgacgaattctcagatttgaaactcatagaaaccttcttccctttggcgaattccaattcaaacataaccgagttcgtattctgtgttcgcaatataaagagttcgttttattcacctttggaaaaattacatattgcgaacatagtcgcagatattgatattaacacattgtacctggacttcgtggattcaaatatctattcggatcaaaatttgtttgggatttttgatcccgatatatttcagctgattaataaaaactatagaaacttcttttctaagactaacgaaaaggggaagaaaagaccccccatttgcaagaaaatctgttttccctttgttgaaacattgaatttggattatatggcccttgattcattctttaattcgatactgcataaactaacaacaaagataaaaacatttgaaaggaacaatgagtttgacgtggataaaaatttaaatttaaactcgacaacgacagtagcagctttaattatcaagtcgatcttgcaacaattcttcaacaattttcatatcagcttccctaatttggttaccttgaattttattaagatgtctacctacccaaacaatcatgagattacccaatgttgtaacttcatagatttatcttcatatgttctaaacaaatgtttaagtgagaatatctcgatgaatttcctctttcagttgcactctttgaaaaattggtcaatgcccaagattaaagaattcactgggcacaaattcaagtatgacgaaacaacattttcaggttcaccagaaaggtacatcaaatcattgaggggaaacattaaaattttgcaagaaatggcaattaacgaaaccaacgatggtacttgctatttcagagtcaagttgatacctgagggggtagaaaaaactcaaataatcaactggatcccctttacttcttcatttagcgatgataccttcaaacaaagacaccatttaaagaggccaatgatttgcttgaagaacaactctttaagatcgctcactgtcaaaatcatacgtattgaaaaatgttcatccatccgaatccagggattttacctaccaaatctgcaggaactgttcatcaacaataccctttgcgacaccacccaacaccaaaaacaagcgtcaaatgatatgagttgtatagagttcacttcatggaatgaactaccacaatgcaagaaattgggatttgctcaattagaggacgactctaactacgttcttaatatcagtaacctacaagaccatttaccaaatctggacctgcgggagagtttcccaactttcttcgatataagacagaagtttgtcgtggtttga

SEQ ID NO: 77740 - DNA, 645 bp, Saccharomyces pastorianus
atgataaagtcaacactaatctacagagaagatgggctgcctctttgtacgtctgtggacaacgaaaatgatccctcattatttgaacaaaagcaaaaggtgaaaatcgtcgtttccagattgacaccacagtctgccacggaggccactttggaaagtggctcttttgagatccattatttgaagaaatccatggtgtactacttcgtcatttgcgaatctggatacccaagaaacttagcattctcataccttaacgatatagcgcaagaatttgaacactcatttgctaatgagtaccccaagcctaccgtaagaccataccagtttgtaaactttgataactttctacagatgacaaaaaagtcatacagtgataagaaagttcaggacaatttggaccaactaaaccaagagcttgtaggtgtcaagcaaatcatgtccaagaacatcgaagacctactttacaggggagattctctcgataaaatgagtgacatgagttcttctttgaaagaaacatccaaaaggtacagaaagtccgcgcaaaagatcaacttcgatctcttgatcagtcaatatgctcctattgtcattgtcgctttctttttcgtctttctcttctggtggatcttcctcaaatag

SEQ ID NO: 77741 - DNA, 1053 bp, Saccharomyces pastorianus
atgtctcaactgccaacagattttgcttcattgatcaagagattccaatttgttagtgtcctcgattccaaccctcaaaccaaagttatgtccttattgggaaccattgacaacaaggatgctattatcacggctgaaaagacgcactttctatttgacgaaaccgtgagaagaccctctcaagatggccgctccactccagttttatataattgtgaaaacgaatattcttgcatcaacggaattcaggaattaaaggagattacttccaatgatatttactactggggtttgtcagtgataaagcaggatatggagtcgaaccctaccgccaagttgaatttaatttggcctgctactccaattcatatcaagaagtatgaacaacaaaactttcatttagtcagagagactcctgagatgtacaaaagaattgttcagccttacatcgaagaaatgtgtaataacggtagacttaaatgggtaaacaacattctttatgaaggcgctgagtcagaaagggtcgtttataaagatttttctgaggagaataaggacgacggcttcctaattttacctgatatgaaatgggatggcatgaacttagactctttatatctagttgcgatcgtctacaggaccgatatcaagacaataagggatttgagatattctgacagacagtggttaatcaacttgaacaacaagattagatccattgttcctggttgttacaactatgctgtccatccggatgagttgagaattttggttcactaccaaccttcttattatcatttccacattcacatcgttaacataaagcatcccggtttaggtaatagtattgccgcgggcaaggccatcttgttggaagacatcattgaaatgttaaattatctaggaccagaaggctacatgtacaagacaatcacctacgctattggtgaaaatcatgatttgtggaaaaggggtctggaagaagaactcactaaacaattggaaagagatggtatcccaaaaatacccaagattgtgaacggttttaaataa

SEQ ID NO: 77742 - DNA, 351 bp, Saccharomyces pastorianus
atggtggcagagggcccggtggccaaaagattaataagtgcaattctaaggtacaactacggcatgaacccactgggatcgttgtcgagtgccaagaaacgcggtcacgtgagcaaaatcgaaagcttgcccggcttaagctcgcgcgcgaacttgcggcgtcgtacgacacgatgccgtccagagaggaggcgcttctacagtggcaccgtcaacagaaacgctcgcagcgccggcgcagcgtcgcgaagtacgagcagcgtgaagaggccgctcgagtcgaaaaagaggaacgcgaggcccgagacagagaaatggtgcgcgagttattccgccggtaaccgcaggtga

SEQ ID NO: 77743 - DNA, 468 bp, Saccharomyces pastorianus
atgatgaggggagcgagtaagaggtcaatcagcagtgccgcagtgctgctgattaaaaagaacaagctaccaccgcgaccaaagttcacgccagagatggaagcacaatgcactgagaaattccttcatggtggcagagggcccggtggccaaaagattaataagtgcaattctaaggtacaactacggcatgaacccactgggatcgttgtcgagtgccaagaaacgcggtcacgtgagcaaaatcgaaagcttgcccggcttaagctcgcgcgcgaacttgcggcgtcgtacgacacgatgccgtccagagaggaggcgcttctacagtggcaccgtcaacagaaacgctcgcagcgccggcgcagcgtcgcgaagtacgagcagcgtgaagaggccgctcgagtcgaaaaagaggaacgcgaggcccgagacagagaaatggtgcgcgagttattccgccggtaa

SEQ ID NO: 77744 - DNA, 342 bp, Saccharomyces pastorianus
atggagtgctttccttcgttttccttctctggcttctcctgcttctccttgttcttggataatggcgatgaggataggtctgataactggatatttttcaatgacattgatttctgcaaaagtggttttgaatacgaactaaagcaccgcaaacacaacaacgagccttgccgccgtattctagttttgaaacatcgaagcggtaatgtacgtattaaccgtatcattagtctattagatgttcagagtttacatgtatacataaacctcttccattcttccttcatcgataaagttactatacacttaactaaacagtacattttccccggactaccatag

SEQ ID NO: 77745 - DNA, 945 bp, Saccharomyces pastorianus
atgatacggttaatacgtacattaccgcttcgatgtttcaaaactagaatacggcggcaaggctcgttgttgtgtttgcggtgctttagttcgtattcaaaaccacttttgcagaaatcaatgtcattgaaaaatatccagttatcagacctatcctcatcgccattatccaagaacaaggagaagcaggagaagccagagaaggaaaacgaaggaaagcactccattggcctgttagacagattttcagaggactttattactcagggcaatggattgaaacctactacttcacaaaatcaattggatactataaagttttatcaaatgcttcgtgaaagaggcaatttttccgatgaacaatgtaaaattatcatagctctattgttgcaactactaaatgatcagttttattcttgttacaatgatttgttcttaagggatatggagctgaataaacaatcacatttgttcagctcgctagaaacagaattgaaattcgcaattcaaaactctagggacacgcaactaaatgagcaccacttgcaattattaaaactcaaaagagaacttaactcaatccatgatgaactgaatgaaatcataatagatcttttgcaaaaggacgctaaattagaatttaacaatcaaaaattagaaaacacccttttgtatcgacaattaaacctgaaattgaacgactgttctaacaagattcaaaccaagatactgggggatatcaggtcacatatcgaaaatttaagatggcagacaaccagaagcggtcttttggtaatattagtccttgtttgttcgattatgatcggtgtaagcgcatctaagaaggaacgcccaggtttacaggaacctgaggaacctgaaattttagcaccaaaggaagacattgatactaccttccctcaagaccaacatgatatagattaa

SEQ ID NO: 77746 - DNA, 843 bp, Saccharomyces pastorianus
atgtcgcaagaaattaggcagaatgagaaaatcagttatcgtattgaaggaccattcttcatcattcacttaataaaccctgacaatttgaatgcactagaaggtgaagactatatttatttaggagagttactggaactagcggacagaaatcgtgatgtatattttacaattatacaaagcagtggtagatttttttccagtggtgctgatttcaagggtattgcaaaagctcaaggggatgataccaacaaatatccctcggaaacaagcaagtgggtgtcgaattttgttgctagaaatgtttatgtcactgatgccttcatcaagcattccaaagctttaatttgctgtttgaatggaccagcaatagggttgagcgcggcactggtagcgttatgtgacattgtgtacagtataaatgacaaggtttatttgctatacccctttgctaacttaggactaattaccgaaggtggtacaacggtctctttgccattgaagtttggcacaaatacgacgtatgaatgcctcatgttcaacaaaccattcaagtacgatataatgtgcgagaacggatttataagcaagaatttcaacatgccatcttcaaacgctgaagcgttcaatgcaaaggtcttagaagaattgagggagaaagtgaaagggctatacctgcccagttgcttagggatgaaaaaattgctgaaatcgaaccacatcgatgcattcaataaggctaactcagtggaagtaaatgaatctctcaagtattgggtagatggagagcccttaaaaagatttaggcagctgggctcgaaacaaaggaagcatcgtttatga

SEQ ID NO: 77747 - DNA, 786 bp, Saccharomyces pastorianus
atgtcagatatagaatcattgggagaggcagcaggtttatttgaggagccagaggattttcttcctcctccaccaaaacctcattttgcagaatatcaaaggtcacacatcacaaaagagtccaaatcagatgttaaagacatcaaactccgtctcgttggaacgtcaccactttggggtcatctcttgtggaatgcaggaatatacaccgcaaatcacttggattctcatccagaattaataaaggggaagactgttttagaattgggtgctgctgctgctttgccttccgttatttgtgctttgaatggggctcaaatggttgtttcaactgattatccagatcctgatttaatgcagaacatcgattataatataaagtctaacgttcctgaaggatttaataatgtcactacggagggttatatttggggaaacgattattctccattgttggcacatatcgaaaaaataggtaacaataatggaaagtttgacttaatcattttaagtgatttagtcttcaatcatacggaacatcacaaattacttcaaacaacaaaggatttattagctgagaaaggtcaggcattggtagtattttcaccgcatagaccaaaattgttggagaaggatttagaattcttcgaattggctaagaacgagttccatttggttcctcagctaattgaaatggttaattggaaaccgatgtttgacgaagacgaggaaacaatcgaagtcagatctcgtgtttatgcgtactatttaacacatgaaaagtag

SEQ ID NO: 77748 - DNA, 171 bp, Saccharomyces pastorianus
atgtttttacgtttttataatcgactactttatatctataacgaattatttaattttcttcgatttactgtgtttctgccattttgcgaattcgtgccccatcatgtcttattttatttaattgttacatatcaaaggacactggtttacaaatataaaaatgattgttga

SEQ ID NO: 77749 - DNA, 135 bp, Saccharomyces pastorianus
atgattacaaacggcgaacttcccatcagcagaacatgcaatttcaccttcagtacaggtagatttaccgttcaatttaccagccgcatattgagcattcaattctttagccaatgtacgagctgtactgtctga

SEQ ID NO: 77750 - DNA, 1068 bp, Saccharomyces pastorianus
atgtctactggaagcagtgatagaaaggatgacgtcaaattattggaactgctgaattctatagatgaacagtttttagtgccatacaaaaagccggaagacttgcgtaaaatctcctctactaccaaactacaaggttccaccccaactaaggaactagacaaattagcctctgtattgaaggcacattgcacaaaaataggtattgtttgcaagccaggcacttttgataacaatcataaagttgtgattaccgaaatccaaaattttagtaggccattattctacttactaagtttattccctttgttttacaataacaaggattgccccaaatactttacagaccaactggatgaaagtacgctacaattgctcgatggcttgagagatttcattgccgaattacaagaaagattgaaaaatgacgaaaatgcatctctagacaaagaaaggttaacctcagttggtaaagtattcaatgcgtgcgattctctctctaattgttccaaggctggaccttatgggatcctagcaaacatcttaaaagataatgtggccataatggacgatacaatgaatgaaataaaagagtggcttgaggaacccgatttttcagcaaactcggacgatatatttttggattttgaggattcagaatccgaatctgattcacagaaagaggaatttgaccaggaaaaggtctatgaaaatataaagtcgtttttcgatgggtttacgaggaagataaagctaatcaaattacttgtatcaactttcaggaaaactctggtgtcaaaagattttactcctaagaggaatcaagcagaaactttagacagtatacatacatatctgaaggaaatacagttacttttggatgaagtggtatccactgtacaatttgagccgaagaactttaccaatgaggaggtaaaagaagaacaggctgcattagttgcagtaactaaaaaagttcttatccaaatgagtaaactatatgaaggtgatccaaaaagaaagaaatggattgacacatgggagataaaattcaatgaattgttttag

SEQ ID NO: 77751 - DNA, 1938 bp, Saccharomyces pastorianus
atgctgaaatttagaattaggccagtgagacatatacggtgttataaacgacacgcatatttcttacgatataaccatacgactacccctgcacagaagttacaagcacagatcgagcaaatacctctcgaaaattacagaaatttttctatagttgcccatgttgaccatgggaagtcaaccttaagtgacagactgctggaaataacgcatgtcatcgatcccaatgcgagaaataaacaagttttggataaattggaagtcgaaagagaaagaggtattactataaaggcgcaaacatgttcgatgttttataaagataagaggaccggaaaaaactatcttttacatttaattgacacgccaggacatgtggacttcagaggtgaagtttcacggtcatatgcgtcttgtgggggagcaattcttttggttgatgcatcacaaggcatacaagcacagacggttgctaatttttatttagccttcagtttaggattgaaattgattccagtaataaacaaaattgatctcaattttacagatgttaaacaggtaaaggatcagatagtgaataactttgagctccccgaggaagatataatcggagtaagtgctaaaacaggattaaatgtagaggaactgttactaccggctataattgatcgtataccaccaccaactgggaggcctgataaacccttcagagcattattagtggattcttggtacgacgcatacttaggagcggttcttctagtgaatattgttgatggttttgtacgtaaaaatgacaaagttatttgtgctcagacaaaagaaaaatacgaagtcaaagatattggaatcatgtatcctgacagaacttctacaggtacgctaaagacaggacaagttggctatctagtgctgggaatgaaggattctaaagaagcaaaaattggagatactataatgcatttaagtaaagtaaatgaaacggaagtacttcccggatttgaagaacaaaaacccatggtatttgtgggtgctttcccggctgatgggattgaattcaaagccatggatgatgatatgagtagacttgttctcaacgataggtcagttactttggaacgtgagacctccaatgctttgggtcaaggttggagattgggctttttaggatctttacatgcatctgtttttcgtgaacgactagaaaaagagtatggttcgaaattgatcattactcaacccacagttccttatttggtggagtttaccgatggtaagaaaaaacttataacaaatccggatgagtttccagatggagcaacaaagagggtgaacgttgctgctttccatgaaccgtttatagaggcagttatgacattgccccaggaatatttaggtagtgtcatacgcttatgcgatagtaatagaggagaacagattgatataacatacctaaacaccaatggacaagtgatgttaaaatattaccttccgctatcgcatctagtcgatgacttttttggtaaattaaaatcggtgtccagaggatttgcctctttagattatgaggatgctggctatagaatttctgatgttgtaaaactgcaactcttggttaatggaaatgcgattgatgccttgtcaagagtacttcataaatcggaagtagagagagtgggtagagaatgggtaaagaagtttaaagagtatgttaaatcacaattatatgaggtcgttatacaggcccgagctaataacaagataatcgctagagaaacaattaaggcaagaagaaaagatgttctccaaaagctgcatgcttctgatgtctcacgaaggaaaaaacttttggcgaaacagaaagagggtaaaaagcatatgaaaactgtaggtaatattcaaatcaaccaagaggcatatcaggcttttttgcgccgttag

SEQ ID NO: 77752 - DNA, 834 bp, Saccharomyces pastorianus
atgataccaaagcttatagtttttggggggaacggatttttaggtaaaagaatttgtcaagaagcagtgacttcgggctacaaagtcgtttctgtgtcaaggtccggtaaagctcctcatagcaatgaattaaatgataagcaatggatgcaggaggtccaatggaccgctgctgacatttttaagcctgattcttaccatgaattattgaataatgctactaacgtagttcattctttgggaatcctcctagaaaatgaaaattacaagcaaactctatccaaatcccctacatatgattcaaaatcacgccttctatcttttggtgcaggtccaaatcctttaaaaaaaagcagtccttattttacttatgaaatgatgaataagcaaagtgctattattttggcagatacatttaaacaaaaaatcctaaagaaaagcaaaaaggaacaagaaaaagcaaatcaaagatcttttacgtatatttccgccgataaaggttttccattgattcctagtggctatattagttcgaaaagagaggcggagattaaactagaaaaaatgcagagatatttcaggcctattattgtgagacccggttttatgttcgatgagcacagaaatgcaattggaccacggtcttttattcatactgcacttgaactactttactgcggtaacaaatttctattgagaaataagctgcagcttttgaacgacttgattaggccaacagtatccactcagcaggtaagcaaatccgtcctgaaaaatatcgaaaacgcagattttaagggggtagttacacttgaggaaatacttaaagcataa

SEQ ID NO: 77753 - DNA, 582 bp, Saccharomyces pastorianus
atggttacccttgaatacaatgcaaacagtaaactgatcactgcgagtgatgctgttgttgcactatctaccgaaactaatatcgatcaaataaatgttctcactacatctttgattggagaaaccaacccaaattttacaccacaaccgaatgaagctctaagcaaaatgatcaagggtttatttgaaagtggtatgaagaatttacaacaaaaaaaattgaatgaggcattgaagaatgtttctttagcaatcgaaatggcacaaagaaaaagagcgccttgggaagcttttgctattcagctaccagagctacactttatgcttcgtagtaaaatagatttatgtttaatactcggaaagcatttagaggcgttgcaagacttggatttcttacttggtacgggacttatccaaccagacgtatttgtcaggaaggcggactgtttgctaaaattgaaacagtgggaagaggctagggcaacatgcgagagaggtttagctttagcccccgaggatatgaaacttagagcccttttaatagaaactgcaagaaatctggccgaatataacggtgaataa

SEQ ID NO: 77754 - DNA, 330 bp, Saccharomyces pastorianus
atgatgccgaggaaaccaaagaaagtcattgaacttttcatagcattttccttgtcgaagaaaaaacaaacagaaccacaagctgaacaagatcattatttttggctttcttcctctcatctttttatattcgaatccagtacaataaagaaaaagcaaaatacactacgcactctttgtaatcagccacacaaaatgcagaatttattttttaaacaaaaaatacaattgtacatagacacatctttatctttcctattactactattcttttatttcaataactattactttctaagtatgacctacgcttctttggtaaataaataa

SEQ ID NO: 77755 - DNA, 375 bp, Saccharomyces pastorianus
atgttccctatcgcttccagaagaatactcctcaatgcttcagttctgccattgagactgtgcaatagaaatttcactaccacaagaatatcctacaacgtcatacaagattggtatttgagggaactaaaagacaccaaactggctccaagtaccttgcaagatgctgaaggtaatgttaagccttggaacccaccacaaaaaccaaatctaccagaattggaacttcaaggcccagaggctttaaaggcttacaccgagcaaaatgtagaaactgctcatgttgctaaagagactgaagagggtgagtcagagccaattgaagaggattggctagttttggatgatgccgaggaaaccaaagaaagtcattga

SEQ ID NO: 77756 - DNA, 390 bp, Saccharomyces pastorianus
atggtcgaaggtgattttgtcgatgagcaatcgaacattgccttactaagctccaaatccatgtgtggtgatcatcatagcgtcaagaatagcataggggatgagatctttaaattattgacaaagattttaaattcggatgagaaagcaagcggagatgtgcacacactcgtttctgggaccccggatctctcaaattttaacctcgataatgaaccactggaaaacatactcgctgttttcataatatcttttattattgtagtggttggagttttactacttgggttgattggcatgatattcatatctctccgttcaggcagcagtaatgataagaaactacagtccaacgatgaagaaaagcaagcacttgctgaaaaagcatga

SEQ ID NO: 77757 - DNA, 696 bp, Saccharomyces pastorianus
atgacgagatactattgtgaatactgtcattcgtatttgacccatgacacgttaagcgttcgtaaatcgcacttggtcggtaagaatcaccttcgtataacagctgactattataggaacaaagcaagagacattattaataaacataatcataaaagacgccacattggaaaaagaggcaggaaagaaagagaaaacagtagtcaaaatgagacgctaaaagttacatgcctttcaaataaggagaaaagacacatcatgcatgtgaagaaaatgaaccaaaaagaactggcacaaacctcaatagataccttgaaattgttatacgatggctcaccaggatattccaaagtatttgtggatgctaacaggtttgatataggagatttggttaaagccagcaaattaccccaaagagccaatgaaaaatctgcacaccattccttcaagcaaacttcaagatccagagatgagacgtgcgagagcaatccatttcctaggttgaataacccaaaaaagctagaacccccaaagatattatcacaatggagtaacaccattccaaaaacttctatattttacagagtagatatactgcaaaccacgatcaaggagtccaagaagcggatgcattccgacggcatacggaaaccgtcgagtgccaacggatataaaaggaggcggtatggaaattaa

SEQ ID NO: 77758 - DNA, 735 bp, Saccharomyces pastorianus
atgccagcattattaaaaagattattgtttcaagtgggtcctcatccaaacgaaagaacattcaccttatcctctgtttcaactgatgggcactatatttccttgagaccatttgttaagccaagcggtgatgagttatcttttcctttcgaatgggcctttgccggtacaaacgaaacagttaaagttaatgatcaaggaaacggtgtcgttactcaagatttcaatttctggttggatacaaatgtgtacttgaacgttccaaacacccatcgtggcgaagtgaacaccacttggaaaaattgggattctggttgtgtcgaggagacaggcgctgtttacccatttggtgccgacaaagaaagcgtctctttcagagaattgtggcaaccagttgacccatcaagagaagatctagtcatcgtctcaccaaacaatgagaagttctcgtcgaatgctaggtcaattgtcctcaaagttactgacgaagcttatgatggtttggttattgttattggtagatggattcaagggtttttgtcccaaaagaataataacactattgaaggcttgaacttcatcagattacttgaaaaagattcaggtaaatctgagttcttattaagctacggtaaggaagtcaacaaaattccacaaagctacgaaaatttgaagaaaggttccactgtaaccagcaatgggttgaactgggaagttattgaatatcacgcttaa

SEQ ID NO: 77759 - DNA, 264 bp, Saccharomyces pastorianus
atgtcactaagaaacatatcaatgatcacaaaaaatttgcaaacaactgccaagtgttatgtcccaaaaagttcacctacatcaacaactattccggttataagggatgctagtactactcaatgtcgcagaataactaccgtcatcaatattacgagtctgaaaggatattctccatctccaagaacagttcatgataagccaattgttatttgcactgacaacgaagaggtagagactgtatcggagcacgtaaaagtataa

SEQ ID NO: 77760 - DNA, 1563 bp, Saccharomyces pastorianus
atgagtttaaaggaggaacaagtgtccattaagcaggacccggaacaagaagagcgtcagcatgatcaattcaatgatgttcagatcaaacaagagtcgcaggatcatgatggagtggactcgcagtacacgaacggtacgcaaaatgacgacagcgagagatttgaggcagctgaatccgatgtaaaggtggaacccggcctcggtatgggcatcacctcctctcagagcgaaaagggtcaagttctgcctgaccaaccggagattaagttcattcgtcgtcaaatcaatggttatgtagggtttgctaatttgcccaagcaatggcacagaaggtccataaagaacggattcagtttcaatctcctatgtgtcggccctgatggtattggtaagacaactttaatgaaaactttatttaataatgatgatattgaggccaatttagtgaaagattacgaggaggaacttgcaaatgatcaggaagaagaggagggtcagggcgagggtcacgagaaccaatcacaagaacaaaggcacaaggtcaaaattaagtcatatgagtcggttattgaagaaaatggtgttaaactgaatttgaacgtgatcgatactgaaggatttggtgattttttaaataatgatcaaaaatcatgggacccgatcattaaggagattgactctcgttttgatcaatacttggatgcggagaacaaaatcaacagacattcaataaacgataaaagaatccatgcatgtctttatttcattgaacctacaggacattacttaaagcccctggacctgaagttcatgcaatctgtatatgaaaaatgtaacttgattcctgtcattgctaaatctgacatcttaactgatgaagagatcttaagtttcaagaagaccattatgaaccagttaatccaatctaatatcgagctgttcaagcctccaatttattccaacgatgatgcagaaaatagccatttatccgaaagactatttagtagtttaccttatgctgttattggttccaacgatattgtagagaactacagtggtaatcaagtgagaggccgttcctatccatggggggtgatcgaagtggacaatgacaaccactctgatttcaaccttttgaaaaatttattgatcaagcaattcatggaggaattaaaggaaaggacaagcaagatactatacgaaaactacaggtcttctaaattggcaaaacttggtattaagcaagataattcagttttcaaagagttcgatccaatatctaaacaacaagaagaaaaaactttacatgaggcaaaactagccaaactagaaattgaaatgaaaacagttttccaacaaaaagtttccgaaaaggagaaaaaactacaaaaatcagaaactgaattgtttgctagacataaagaaatgaaggaaaaattaactaaacaattaaaagctttggaggacaagaaaaaacagctagaactttcaataaatagtgcttctcccaatgttaaccactcccccgtccctacaaagaagaagggatttttacgttag

SEQ ID NO: 77761 - DNA, 462 bp, Saccharomyces pastorianus
atgaactctgaacagctgctgcataactatgtttcggattcgctactcactactctgataagttttcaagagttcaagcagcaactacagtcgtacacgagcgacgagcaacaactgcaacattggtacgaattgcttcaggccagggatgcgcgagtgacctctgagttagaagcacgaatcaagcagtttttcataacgttgcgctctagattactgcgatttctggaaagcgagcaactatcacactcccttagcctcgagacactgatcgacgcgctgtacaagattaatgacctgttgcaacagcgtttgcagattctggatgatgctattcaggaaaagacctcggaactagcagaatttgaaaatatggttcgctcaccgagtgcaggagacaatgccattcctggcctattacaaattatacaatcttatattaatctattagaggaaaactag

SEQ ID NO: 77762 - DNA, 2367 bp, Saccharomyces pastorianus
atgaagatggccgtggatgaccctacgtatggcaccccaaagattaaaagaactgcttctagcagtagtagtattgaaacgacagtaacaaagttgctgatgtccaccaagcacctcctccaggtattaacacaatggtctaaggggacaacctctggaagattagtatctgatgcatacgttcagttgggcaatgacttcaaagtcgtatcgaaattcttcatgcatgcgaaagttgacatgtcagatgttggtgatgtgccaatggctttaagacgtgtattggaggtgacattgagggaaccaccatctgatgaaactttaaataaacatctgccaaaaatcagagagattatagtgacacttttagacaaactaaaggttaaacaagcaattttgaagaatatgcagcaagagcatcggataagtgtaaaatcacatcatcaacaaaacccttcctttactagtaacctttcattgggtagtgaagggacccgtgaggggactccattaagtagcagaaaaagcagtattgtacgtgatcagaggcaaagcgattcagtcgaaaatagttatggggaaaaagtgaattctacttctacgggaacaccctctgctcagtcagcagaggcaacattgacaaaaccaagaactaatattaaacaaaaccttaaatctaacaatgctccaaacgcatctgatgatgatgatgcactttcacaattgaagaagggaactaatttacaaaggagagcctcaaagagatactctgcctaccatatggctaaattgacaaatcagtctacaacagaagctgctgcggctgccggcctcatgacaacaccttcaccctcgatgttgcatctagaggaaaccgtaagaaagtcaaagttatacggaaataacaacaatgatgatgatagaaacattaattcagctgaaaataagggtaaaagcattgacgatgtatcaaaggcgagtccattggcgaaaacgccattgcctattgagaatgttcgtgcatctccacgaagattatcaagcgttgttacaacttcgccagataaagccatgaatggaacttgtccagtatttttaaggataggagacaaaacaaagaagtgtcatgtgcaactgcctactacaaaaaacgcattaaggctcctatttattgagcgctttgcgtattctcctggagcaaattccttcccagacatatatattatggatcctcaatatggagtattctatgaattagaggaactaaatcttctcgatattaaagaagggtttgttatcgagctaaagctcgaagagaatccaaataatacgatcaaggaattcattgacacagttaagatggagatatcgaatagtcagaatgatataataagacatttaaaagaaatgagttttggttctgcaattagcggcaagcaaatggaagttttaccacaacctggccttgaagctaacaaacacgatcttgtggggcaaaacaagaaagatgatgataaaacgatcaaagatattcagtacgaattggggaaaataaaacaagtgcataatattaataggtcaaatattaatgagactattttcaacattttacgaaaggtcgataactttaagtctttatcattttctgccaaaaactcttccaacagaatgtacatggaaaaatcacagaccgaactcggtgatttatccgatactctgctaagtaaagtagatgatttgcaagatgtaatcgaaattatgaggaaagacgttgctgagcgtaggtctcagcccgctaaaaagaagctagaaaccgtatccaaggatttagaaaatgcccaagcagatgtacttaaactacaggagtttattgatactgaaaaaccacattggaaaaaaacttgggaagctgagctcgataaggtctgtgaagaacaacagtttctcacgttgcaggaagagttgattttagatttgaaggaagacttgggtaaggcattagaaactttcgatcttattaagttatgttgtgaagaacaagaaaaaaacccttcgagatcaaaaagtaatcctattttgcctattatgagaccgggcacatttaatcaggtaagggagcaagttatggtggccgtccaatctttaaaccctgaccacgatagtagggtcgaagctattgacaaggctgagaagatgtgggagatggaaagaaaacttaaagctagtaatgaatttgatgatgaactggaaaattttgtgggtaattcaaacctgaaaaaatcgggaggctttgaagaagtagaaaggataagaaagcagaaggatgaagcaaatttgagagcatattttgggccggggtttacttaa

SEQ ID NO: 77763 - DNA, 1281 bp, Saccharomyces pastorianus
atgtcgcaccaaaaccagcttattccacaagcttatatttctaactttcacaacagattgacaaacgaagatgatggtatccccatctttacaatggctcaacaaacaaggcagcataaaagggctaaagtggtcaactatgcggaatatgacaacgatctctttgatgaattcaatatgaacggttctaatttcaacaatgctgatacacactataaagataatgcagtgtctcatgaaaatactccggcacttacaaatggtgttaccatggacggttccgaatacaatgtcctagagaacatgaatggagctgatagtattatctctaacaacaaatacgatgcgggttcaaacatggttgtggaatctttatctggtttgaatagcaataacaacgccagcaatggtccgagcaacaaagcgcaggcacaggatattggaaacgccgttctaccggatctgcaagaccaacaccacaaccccttcaacatattgagataccctaaaataagagatactttcattaacggaaaagtggtgtctccatatagactcaacactgatcaagaaacgaaggcaaacgccaattctggagaggcaatcatgataccaattactttggatatagaacatatgggtcataccataaaagaccagtttctctggaactacaatgacgactccatatctccggaggaatttgcctctatatactgtaaagatcttgatatgacttccgctaccttacaaactcaaattgcgaatataataaaagagcagttgaaagacctcgaaaatattgcagccactgagataatgtctgacctccacgtgataatcaacctaacctgcaacttacaagacagattttttgaagataacttccagtggaacttgaacgacaaatcacttactccagaaagatttgctacatccattgtacaggaccttggcttaacaagagagttcatccctttaatatctcaatcgcttcatgaaactatcttgaagataaagaaggactgggtagatggccacttgattcaggaccatgtcccaaacgatgccgcatttgggtacttatctggtataaggctggatattgatgaactgggctccaattggtgcccaagggtggaaatattaacaaaagaagaaatacaaaagagagaaattgaaaaagaaagaaacttaagaagattgaaaagagaaactgatagattatctagaaggggtaggagaagattagatgacttagaaaccacaatgagaatgtag

SEQ ID NO: 77764 - DNA, 780 bp, Saccharomyces pastorianus
atgttcagaaagagattagtgaacaaaagctcttctgatgaaaagaaccagaaaaagaggcagaaaattaattttagcgaagagaaactagtggccagcgatgaagaaaagggttccagtgacctcatgagcttagccaagagtagaaatagcaggacacttcaactttcacatgagaatgaaggtaaactacagaaaaagggtgaggatttagataaatacactttaacggtcaacgacgacagcactaaagaagatcttctaaactttgagagaaaagaactggctgagaaggcaaagaagaggcgacctagtgatgacaatgagctggtactgaacatgagcggtaaaaataaacgcctcactaaacagattaaccaaccaacgaatatccggaccacggtgctgatggattttcagcccgacgtttgcaaagattacaaacagacgggatattgtggttacggagatagctgcaagttcttacactcgagggatgatttcaagactggctggaagctgaaccaagaatggaatgcggataaagaggactccaaagcggttactctagacttggaaaagataccgtttaagtgcactctttgtaaggaagattacaagtctccagtggtcacaaactgtggccattatttttgtggatcgtgttttgccaaagatatgaaaaagggcaccaaatgctttatatgccacaaggagacccacggcagtgcaaaggtagcatctgacttacagaagatgctaaataaaaggaaaagttga

SEQ ID NO: 77765 - DNA, 237 bp, Saccharomyces pastorianus
atggctagagaaatcaccgacatcaaacaatttttggaattgaccagaagagctgacgttaagaccgccactgttaagattaacaaaaaattgaacaaggccggtaagccattcagacaaaccaagttcaaggttagaggctcttcttctttgtacactttggttatcaacgatgctggtaaggctaagaaattgatccaatctttgccaccaactttgaaggttaacagattataa

SEQ ID NO: 77766 - DNA, 723 bp, Saccharomyces pastorianus
atgtcagggttcattaagagcacgttgcttggtctaggccaagattacttagaagatcaatatcaagagttcgcagaacagcatttccagccaaccagggatccgttttatgaaacgaataaagatggtaaaaagcaccgccgcagactgccatattattgcactaaggatgaaagtaaagcgtggaaaaaggtccaaaacaaagcctggctgcatgacaaatcactgtgcggatgctgttgctggacaaacactataggatgggcaccattacttgcacttctaccggttataggacccttattgatgtattgggtgcatgataagttgattgaattggcagatgacaggtataaattgcctgcggaaatcaaggtgaagatgcatggtaatatcgttatcgatttacttattagtttagttcctattctgggaagtgtttttgcatggttgcacgcatgttccacgagaaacgcagctatagtttacaattttgttggaaaaagggcattggaaagaaagcaagcggagctcatgcatcaaaaagaagaaaatgagaaacattccaatgccaatactgcacctccagtagttggtggcaacaaaaatgtgaatggaaacagaaataatagtaagatgtacaacagaccgcctgtgacagctccgcctgcaccagcatacacgcgcagtactaacggtcgccctcaaagaggttacaggtga

SEQ ID NO: 77767 - DNA, 261 bp, Saccharomyces pastorianus
atgaccagaactagcaaatggacagtccacgaagcaaagtctaacccaaagtatttcacccataacggcaactttggggagtctcccaaccacgtcaagagaggaggctatgggaaaggcaattggggcaagcctggcgatgagattaatgacttaatcgattctggcgaaattaagacagtcttcaacaagaccagaaggggctctaactcccaaaacaatgaaagaaggctttctgatttgcaacaataccacatctaa

SEQ ID NO: 77768 - DNA, 1974 bp, Saccharomyces pastorianus
atgtcttcagttgatgtactgttaacagtaggtaagttggatgcctcattggcgttactgactactcaggatcatcatgttattgagtttcccacagtattattaccagaaaatgttaaagctggatctatcataaaaatgcaagtttcacaaaatttagaggaggaaaaaaaacaaaggaatcattttaagagtatacaagccaaaattttggagaagtatggtacccataaaccggagagcccagttttgaaaattgttaacgttacgcaaacgagctgtgttctagcatgggatccattgaaacttggctcagcaaaattgaaatcactgatcctttataggaagggaatacgttcaatggtaattccaaatccattcaaagtgactaccacgaaaatatccggtctttccgttgatacgccatacgaatttcaattgaaactgataaccacgtcaggaacattatggtctgaaaaggttatattgcgtacacataagatgactgacatgtctggtatcactgtatgtttgggtccattggatccattgaaagaaatttcagacttgcagatatcccaatgtttgtctcacatcggggcgagacctttacaacgtcatgttgcgatagatactacgcattttgtctgtaacgatctagacaatgaagaaagcaatgaagagctcataagggcaaaacataacaacataccaattgtcagaccggaatgggtgagagcttgtgaggttgagaaaagaatcgttggtgttagaggattttacttagatgcagatcaaagtatactgaaaaactacacattcccaccagttaatgaggaagaactttcgtactcaaaggagaatgagccggtagccgaagtagcagatgaaaataagatgcccgaggacacaacagatgtcgaacaggttgcatcacataatgacaatgagggtaatccttcggaagctaaggagcaaggagaaaagagtggacatgaaactgccccagtaagtcctgtagaagatccattgcatgcttcgacggctttggagaatgaaaccaccatcgaaaccgtcaacccctccgtaagaagtttgaaaagcgaacctgttggtactcccaatatagaggaaaacaaagcggactcttccgcagaagccgtggtagaagaaccgaatgaagttgtggctgaaagttctccaaatgaagaagcaacgggacagaaaagtgaggataccgatacacattctaacgaacaagctgataatggatttgtacagactgaagaagtagctgaaaacaacataaccacagaaagtgcaagggaaaataacgaacctgcagatgatgcagcaatggaatttggacgtccagaagctgaagttgaaactccagaagtaaatgagtctataaaagatgccaatgaacctgtggaggatgccaatgaacctgtggaagataccagtgaacctgtggaggatgccaacaagcctgtggaggatgccaacaagcctgtggaggattccaatgaacctgtggaagataccagtgagcctgcgaaaaatgccggtgaacccgtacaagaaaccaacgagtttactaccgacattgcctctccaagacatcaagaagaagatatagaacttgaagccgaacctaaagatgctaccgaaagtgttgcagtcgagccatccaatgaagatgtaaaaccagaagaaaaaggttcagaggcagaagacgatatcaacaacgtttccaaggaggctgcctctggtgagagtactacccaccaaaaaactgaggcctctgcttctcttgaaagcagtgccgtcacggaagaacaagagacaacggaagccgaagtaaatacagatgacgttttgtccactaaagaagctaaaaaaaatagtggcaacggcaacagtaataagaagaagaataagaagaataagaagaaagggaaaaagaaatga

SEQ ID NO: 77769 - DNA, 378 bp, Saccharomyces pastorianus
atggaaaaggatgaggaggatgaagaatctgaagaagcagaggaagagctgctggtgcttgaatctgatgagaaactgaatgatgtgaacgatatggaggcaatgctggtagacgaactcgtatgtgacacgagggacctacttaatgtcgatgaagtaagggaagatgagtcagcacttgaggaagaaaccatactggatgacaaaatggaacttgaagaactaactctacttacggaagaacgtgcagtagatactgctgaagaattcgaagatgatgattgcacgaaaaattgtgcacgtatcgtcgatatgcatgacagtattaaaagtaataagcggaaaccattcttggttgtgaaagacaacatactatga

SEQ ID NO: 77770 - DNA, 1131 bp, Saccharomyces pastorianus
atgttgtctttcacaaccaagaatggtttccgcttattacttttaatactgtcatgcatatcgacgatacgtgcacaatttttcgtgcaatcatcatcttcgaattcttcagcagtatctactgcacgttcttccgtaagtagagttagttcttcaagttccattttgtcatccagtatggtttcttcctcaagtgctgactcatcttcccttacttcatcgacattaagtaggtccctcgtgtcacatacgagttcgtctaccagcattgcctccatatcgttcacatcattcagtttctcatcagattcaagcaccagcagctcttcctctgcttcttcagattcttcatcctcctcatccttttccatctcttcgacatccgcaacttctgaatcatcgacgtcttctacgcaaacgtcaacatcatcttcatcctcactgtcgtcaacgccgtcctcttcatcatccccatcaacaatcacttctgcaccttcaacctcctccacaccatccactactgcctataatcaaggaaccactatcaccagtattattaacggtaagacgattctctcaaatcattatactaccgttacgtacacaccatcagcaaccgctgattcaagcaataaatccaaaagttcgggtctttctaaaaaaaatagaaacatcgtcattggttgtgtggttggtattggtgtaccactgattctggtgatactggctttaatttacatgttttgtatccaatcatcaaggacggactttattgactcagatggtaaggtcgttacggcatatagagctaacaaatttacgaaatggtggtatatgcttttgggtaagaaagttagtgatgaataccactccgattcaccattaggtggtagtgcatcgtccgcaggtggtttagacctagatgaagcagatgatgtgatggagcaaagctcccttttcgacgtcagaataagagatagcgatagcgtattaccaaacgccaacaccgccgaccataataataccaatagcggtggagagcctataaatagtagcgttgcgtcaaatgacataatagaagaaaaattctatgatgaacaaggtaacgaattatcaccacgaaattattaa

SEQ ID NO: 77771 - DNA, 327 bp, Saccharomyces pastorianus
atgcctccaaagcaacaattgtctaaagctgccaaagccgctgccgctcttgctggtggtaagaagtccaagaagaagtggtccaaaaagtccatgaaggacagagctcaacacgctgttattttggatcaagaaaaatacgacagaatcttgaaggaggttccaacttacagatacgtctctgtttccgttttggttgatagattaaagattggtggttctcttgccagaattgctttgaggcacttggaaaaggaaggtatcatcaagccaatctcgaagcattccaagcaagctatctataccagagctgctgcttccgaataa

SEQ ID NO: 77772 - DNA, 381 bp, Saccharomyces pastorianus
atggataatttgataattgctgggattttattgttgatcaaggctatgatattctgtatagttaatatactagaagttctcctcgaggatataggaatcctcaaatccctatttttacataatgctattacgattatttcttcttccgtcttatattttttattgtcctattacatcatcaatcctcgcatttcagcttccattatatttgatgactgtttctcaatctttatgttatcttcttacaccgtatgtgatgatatactaataacacggatacttaataaacagatgatgttacagtttcatccaatacgaacgattatcaaattattgcaacatttcccagtgaaatcttcaccaaatgctcatacagcgtga

SEQ ID NO: 77773 - DNA, 174 bp, Saccharomyces pastorianus
atgaatgtgtttatgccaataagggtttttttgtacagttatgtgattataaacagtcttttgtctagtttttttcaccagtatcggcctctatttataaaaaacggagcagctttcggtgtcagtaattctgaaaaaatttgtgtcactctgattgtaaatgaattaatttag

SEQ ID NO: 77774 - DNA, 876 bp, Saccharomyces pastorianus
atgagtgcttcgaagattctttcacaaaaaattaaagttgcgttggtccaactgtcaggctcgagtcctgacaaaatggccaatcttcaaagggctgcaacgttcattgaaagggctatgaaggaacagccggataccaagttggtcgtattgccagaatgcttcaattctccgtactccactgatcagtttagaaagtattcagaagttatcaatccgaaagagccttcgacgtcagttcaatttctgtctaatttagccaataagtttaaaatcatcttggtaggaggaacaattccggaattggatccaaagacagacaaaatctacaacacctctataattttcaacgaggatggcaagttgattgacaagcatcggaaggtccatcttttcgatgtagacattcctaacggtatatcgttccatgaaagtgaaaccttgagccctggagagaagtctactaccattgacacgaaatatggtaagtttggcgtaggtatatgctatgacatgaggtttccggaactcgcaatgctaagtgcacgcaagggtgcgtttgccatgatctaccctagtgcattcaacactgtcacagggcccttgcattggcatttactggcaagaagcagggcagttgacaaccaattgtacgtgatgttatgttctcccgcaaggaatctacagagttcttaccatgcatatggccactctatagtggtggaccccagaggcaagattgtagctgaagctggcgagggagaagagattatttatgctgaattagatcccgaagtcattgagtcatttagacaagcggtacccttaacaaaacaaagaagatttgacgtgtactccgatgtaaatgcgcattag

SEQ ID NO: 77775 - DNA, 2424 bp, Saccharomyces pastorianus
atgccagatttgaagtccaaaaccttgtcaagccaatctttgggagcggctattcctccagaaattgtgtaccaaatacttacataccagtttagggatttgttaagaaatgaccatccaggtacggcagaaaagtttaacgaaaacttaactacatttgtcaaaagtaatttaactgttaataagacattctcccatatttgtcaagttctcatttatagatattgtaatttaactaccgcaaagagatttcacggtcttttacagactttaaagggaaatagatgcctttgcaataagattgaagtagccgatttccaagaattaacgtctattggactggggaggtccagtgagatgaataaaatgattaaaaatctaactaacgaaactcttcttgagtttctaatgctcacaaaagcaaacttaagggaattcttagcatgtgaaaatattcaagacgatttagacgataatatcataaagtatattctatctccaggaaaagtcttgagtgtagtggatttctgtggctgttcaggtaccactttcacagaaagttttattaaggccctggataaatactaccctaataaatcgattgatcagtaccggctggaacctattcaacaaaattatcagattacctgcttaggcctaaatgattgtattgatctaccatcacacgttctttggaagatcttaaaaatgttaccagaactacaaaaacttgatttatctcatacctccattgatgatagtaccttatatcacggcatacctcactggaaaaatttaactcatctttccctcgctacttgtcttcaagttactccaagagcggttctggagttttttagtcatcacccaacaattacagaccctgacaacacttctacattagaatggctgaatgttagtgtcattgcccattcctcatcttggaatgaggtgcacacaatgtttttactaaaaaaactttgtcaacatggccataacaaaactttgcaatatctaaatatcggcggtttaccgcttcatgttgcaccttctttcagcgaggaccctattagcgaatccacctattattaccaatgccgcgatagcttacagttcattaagtggaattttcctaagttgaaaagtttaagtataaaaggtaatagcatcccgatatctacgctcgtagaatttttaacaccaattgatcaagaccatcctaattgtgctcaaaaattgaagtttttgaatatttctggtaactcttatgttaataaatggactattcaggactcattattgtacacttgttctccaagtttagtcgcgttagaagtttcctttgactcgtggcaacagattgaaaaactaaatgatagacatgaaattattgcatacagatataaaaacccaaattcggtaattaaagatatttcaacagcagaacaagtaaagtggaaatgttacattgattcttcgtatggtaggagatattggttatataagactgatccttttctgaatcgtgatgacttggattctaagtcaaatttaactaggtatgattttgagggtcacaaaatcatagaaattataaaccagccggatttcctaaagtttgcccaaagtaaaatcatgcttggatgtggtctagttcctcaaagtggtattagacgtaaactatgttacagagatttaaagccaccagtttctcaattcttaaatagaaaaggtgcgatcagccttggtgatactccactaccaataattaccccaacattacctcgtggtgggtggagaatcatccataatgaggacgacaacaacagtcatgtggaagatagccaaaatcacgtgaatgccatcccaagaaggaattctctgttgagcagacccactttaagaagcaacaatggttcttcctctgccaacccctttgctatcaatgtttctcctgcatctcaaatcagggatggtttgtactgggataggtcggtccatgatttacgtgagctatcattgcaagaacaaagaattcaggagttagctgatgagcagcaggaactaagaacaatcgcaaactttgaagagactgacgacgaatatttgcacgatcccgacttgcaacggagaaggtcccaacttcacttatttgaaagttcgcgctcacgttcaggaaataaaacaagaccaagtttaactggtgaacactcgtcctcggcatcgtttctatccttctcccacttcaaccaccttcacaagcgtaagaattattatttcacgcatcccgatgaatttgtctatgatccaaaggatcctctgacgactcaaagatatagattacattttgaaatagtcaatgaatatcaagtttttgggtgcatcgagcgtggaatgtatagatactacagtttaaaagcatag

SEQ ID NO: 77776 - DNA, 1188 bp, Saccharomyces pastorianus
atgttgagaactcaagccgccagattgatctgcaactcccgtgtcatcactgctaagagaacctttgctttggccacccgtgctgctgcttacagcagaccagctgcccgtttcgttaagccaatgatcactacccgtggtttgaagcaaatcaacttcggtggtactgttgaaaccgtctacgaaagagctgactggccaagagaaaagttgttggactacttcaagaacgacacttttgctttgatcggttacggttcccaaggttacggtcaaggtttgaacttgagagacaacggtttgaacgttatcattggtgtccgtaaagatggtgcttcttggaaggctgccatcgaagacggttgggttccaggcaagaacttgttcactgttgaagatgctatcaagagaggttgttacgttatgaacttgttgtccgatgccgctcaatcagaaacctggcctgctatcaagccattgttgaccaagggtaagactttgtacttctcccacggtttctccccagtcttcaaggacttgactcacgttgaaccaccaaaggacttagatgttatcttggttgctccaaagggttccggtagaactgtcagatctttgttcaaggaaggtcgtggtattaactcttcttacgccgtctggaacgatgtcaccggtaaggctcacgaaaaggcccaagctttggccgttgccattggttccggttacgtttaccaaaccactttcgaaagagaagtcaactctgacttgtacggtgaaagaggttgtttaatgggtggtatccacggtatgttcttggctcaatacgacgtcttgagagaaaacggtcactccccatctgaagctttcaacgaaaccgtcgaagaagctacccaatctctatacccattgatcggtaagtacggtatggattacatgtacgatgcttgttccaccaccgccagaagaggtgctttggactggtacccaatcttcaagaatgctttgaagcctgttttccaagacttgtacgaatctaccaagaacggtaccgaaaccaagagatctttggaattcaactctcaacctgactacagagaaaagctagaaaaggaattagacaccatcagaaacatggaaatctggaaggttggtaaggaagtcagaaagttgagaccagaaaaccaataa

SEQ ID NO: 77777 - DNA, 594 bp, Saccharomyces pastorianus
atgtctgtttgtttagccatcacaaaaggtatcgcagtttcttctataggcctctactctggtcttttggcttccgcttcattgattacatctactactccactagaggttttaacaggatcccttactcccactttaaccactttgaaaaatgcggccaccgccttgggagcgtttgcgtcaactttcttttgtgtgagctttttcggcgctcctccctcattgagacacccctacttactctatggtatgcttgcagctccattatcttcatttgttctaggatgtgcctccaactatcagtctagaaagtacagtaaagtctctaaggaatcttctttatttcccgaagacagcaaacccgctgcttccgaactgagcgattctattattgatttaggtgaagacaaccatgcttcagaaaatacacctcgagacgggaagcctgcagcaaccacagtatcaaagccggcagaggcattgcacaccggtcccccaatccatactaaaaatctaattgcagcaactgctattgctattgttggctttgtacaagccgttattggcgtttatggggaaggacaatttatctag

SEQ ID NO: 77778 - DNA, 564 bp, Saccharomyces pastorianus
atgcgcaatgggaagatattatgctgccattgcttttacaataaaggtgatcatgaagacgacgaaggaggccgcagcatagagagtctgtgcgccgtgaacttagccgagggtcttaatccaaggacaaatgggcctggcaaggactctttctcattttcaacatccggttctaagccatcatcatctttgtcctttccagtcacatcttccatggtttcttcaacttcttcgtattctagttttcttttcttgttagtggtaaaccacctattcagtggcaggcttaggtgtgggtcacctgaatttattattcgttcatttactatcacactaggtcctctgaaccataatatttcaccctttgtttttttccatggaaacatctcttctcttccagatctcttggtttggctgtgcagatcagtacgctgcaaaacatctacgtttttggttatagagataggtaagacaaacgaggaggctgcatcgatcattatattacccaaattacctcttgatgcctgcgatgttaaatcatcgattattgttgggatattataa

SEQ ID NO: 77779 - DNA, 1449 bp, Saccharomyces pastorianus
atgcctgactacgacaattacactacgccattgtcttctagatatgcctccaaggaaatgtcagcaacgttttctttgagaaacagattttccacatggagaaaactatggttaaatttggctattgctgagaaggaattgggcttaactgttgttacagatgaagcaattgagcaaatgcgcaaacacgtcgaaatcactgatgatgaaatcgcaaaagcttctgctcaagaagccattgtaagacatgatgttatggcacatgttcatacatttggtgaaacttgtccggctgctgcgggtatcattcacttaggtgctacttcctgtttcgttacagacaatgctgatctaatctttattagggacgcctacgatattattattccaaaacttgttaacgtcatcaacagattggctaagtttgctatggaatacaaggatttgcctgtattgggttggactcactttcaaccagcacaattaacgaccttgggtaagagagctactttatggatacaagagctattgtgggatttgagaaactttgaaagagctagaaacgatatcggtctacgtggtgttaagggtactactggtactcaggcatcattcttggccttattccatggtaatcatgataaagttgaagcccttgacgaaagagtaactgaattattaggtttcgataaggtatatccagtcactggtcaaacctactcaagaaaaattgacattgacgtgttggctcctttgtcttcttttgctgctactgcacacaaaatggctactgacataagattattagccaacctgaaggaagttgaggaaccttttgagaaatcacaaatcggatcctctgctatggcttacaagagaaacccaatgcgttgtgagagagtgtgctccttggctagacacttaggttccttgtttagtgacgccgttcaaactgcatccgttcaatggttcgaaagaactctggatgattctgctattagaagaatttctttaccaagtgcatttttaaccgcagatattctattatctactttgttgaacatctcatccggtttagttgtgtatccaaaggttatcgaaaggagaattaagggtgaactaccttttatggctactgaaaatatcatcatggctatggtagaaaagaatgcctccagacaagaagtacatgagcgtattagagtgctctctcatcaagccgcagcagtagtcaaggaagaaggtggggaaaatgatttaattgaacgagtaaagagggatgaatttttcaagcctatctgggaagaattagattctttactggaaccatccacttttgttggtagagctccacaacaagttgagaaatttgttcaaaaagacgttaacaatgctttacaacctttccaaaagtacctaaacgatgaacaagtcaagttaaatgtttag

SEQ ID NO: 77780 - DNA, 1320 bp, Saccharomyces pastorianus
atgaaacggttcttactcagtcgaagacagagacaccttcgtatgatttgctttcacaatataagtctctttagagctaatggtgactccaaattgatcaaggaatatggtgatggatttataccatgtttctttatcttggaatccataagaggggagctgctttatgtgagcgaggtacaatcaggttctttgcgtaaactctcttttcaggaattaccaaaactaactggtgcatctactatgattgtcctaaaattggtaggactagttccgagtgatattttgtgtaccataagttcagataaaaatggtatcattgacgataaatggtgcgttttatgtacctacacgatagatcttaacaagttacaacccataaatgaagacacagttctaattacaggcaccaacgcaccagtacttgatttaatagatggatcctacacattggctgcagaaaaaattaagccactaaagggccttgttagttctcacaaaaggaatataagtcaagtcaagatcaaattttcattggcatatagctctttactaaaattaaacaaactattggagtattcttcccaagtccatgaggaaatcaatgaaatttccagcaaaatagaagatgactttttgtcactcaagaatcaaaatcattggtatatgagaacagtacagaagtccatagaaacgctagaaaaggaagtcctacaaaggaaaaaaagcaagaaaaatatagaaatggcgcaactcgagagtaatgatactatcaaccattctaaaacagaactgtctctgatgtcgcaggacgagtctataaatgatgactatggaagcatatattctagatttgtgcaaataaaagataggttggaccaactgaggtttaagaaactgtatcagctgatagggatcttccattcaacggatttatttaattcagatagaggctatatttactttgaaaaaccttctagcgtaaatgatgttattaataggctcaagctaaaacctttgaatatagagatattacttagacaagccggcgaatccacaaagcacagagaatatgtaaacagccagttgggttattaccttttatttctccatttgacagccatccaaattttcaaggctcctttaccctatagactaatgtattatggtagtacatcagtgatcgacagtcaatatccgttgtatttcactgatcaaatgatttctaagcatcaagcaaagctgattaaagccatacattattttaatgctgatatattgcaatttaaacagattctggagaattaccgtccaacatag

SEQ ID NO: 77781 - DNA, 297 bp, Saccharomyces pastorianus
atggcagttagtaataataataataatagtaatagtaaagaacgcacccaaaatataaaagaagtggagcaaaagttgggcgagaatccaaagattactttaaaagggggagggaaaactaaaatcatggattttgaacagttacgcaagccccattgcgtaaggcccagtgcaagatttccagttgaagatactgccggtggtttattgagaacgggtggccacaggcctcagctaagtgatgaagaagtctctaaaaggcaccatgaacagtctcttggacaagaagatcattaa

SEQ ID NO: 77782 - DNA, 657 bp, Saccharomyces pastorianus
atgacacaatataatttcattatagatgcttcagcttttgaaaagggtctaggcaacatcaagaggtggtgctcggactgtacagaagctgtgactttgaacttttatattccaacattcacattaaatgaattggatttccttcaacaaaggcgtaaaagttttgcagctcgagaatccttgaagtttatcgatagattagatgattctaaatttgctaatttgaaagtttttatcgaatttcccgaagttttagacattattttatggtcagatgtaatggaacataatgatagttctggaaagatgaatattgcaaaattgcctaagagattaaagaatttgttgaaaagttgtatttacaaatgctacctagaaggaaatgaggggctacattggtttttaattagtgaagatcctcaaatccgggaaatggccatgcaatgcaatattccttcctgttcaattgttgatgtagattcaatcttgtccaaggacatgaatgataaatcatttagagaaagtgaaaaattcaataatatgatgctaaaaaatggcactaaggaagaaagcgaaaacggtagagaaattatcaggactaacttcaataaaacagtttacgcttctagaggtacaggcgaattgtggtccccataa

SEQ ID NO: 77783 - DNA, 258 bp, Saccharomyces pastorianus
atgcctcaaaaaccacttaaagttactaagaaagccaaggacccccgtagggtcacaaagaaacaaaaaaatttgagaaaagctgccccattgcaattgaaatcaaaaaagaaatctttgcaacatctgaagaaattgaaaaagagctcttcccttaccgaaaccactgaaagattagttgcgagtaaagtcgggcatttggagttgttgagaggtactagaaaggagttggaaaaaggtaagaagaactctaaatga

SEQ ID NO: 77784 - DNA, 333 bp, Saccharomyces pastorianus
atggtcaaaggacgtcattcaaaacgcaaagggaatttccacattattttacgtaatgcttcgttgttacaaagacagaaacttgacaaatcaaggtcaactggatcgttgctcgaaagtcgccgtcagccatgcgttttactttcgtttgcaaaactccttctcttgtgtatcgtatttagcccgaaattagactataccaaaaaaaagaccaagattcttaagcttcatcaatcctttggaactgcaattattcttacaatctttcatttacatggctcaagaagtgttgctgctcaaaatttcattctatttcatgattatttacattaa

SEQ ID NO: 77785 - DNA, 123 bp, Saccharomyces pastorianus
atgataagagtgttcattggaagtcttccaatgctggacttgaaaaatagggtgtcgtcttactggcacttctcgagcactccggttgcgagaagaataacggatcatacttgtttaatgtaa

SEQ ID NO: 77786 - DNA, 306 bp, Saccharomyces pastorianus
atgatccgttattcttctcgcaaccggagtgctcgagaagtgccagtaagacgacaccctatttttcaagtccagcattggaagacttccaatgaacactcttatcattattctttatgcattacgtttcgcagtaatcctagaaccctaactttttctaaaattaccgtcaaaaatgacggacgcaacttttctcagaaattttttttttcatttctcttaaaaagttttctacgctggataaattgttctcttccctttgaaatatggagacgttcaaagtcaatttccacacatttaaggtga

SEQ ID NO: 77787 - DNA, 537 bp, Saccharomyces pastorianus
atgcctgcgtatcactcgactttccctgtagatcctaacactgaccgcatggtagggaactttgcgcttctgcccttgaacactaagttcaggggtcctgcataccccagcaattccgattacgatattatcgacgagtgcttggacctatttcgtgccaattccttcttcaagaactttgaaattaaatcacccgccgacagagtgctcatctacggaattctctttatcaatgattgcctagcccatttgaaaataacaacgtcatttaacgaagccgtcaaagtgttaaccaatgtggccttggacaactttactttaccaggtacaccgggtttccctctgaataatgtttaccaagttccagtacaagatcataattcgatggacttgttgaagacttatattcagcagttccgtcaagaattggcaatgagactattagaaagagtctatagctctacagattctaaggaatatccctcaaagttttggttggcgttcacaagaagaagattcatgaacaaatctctataa

SEQ ID NO: 77788 - DNA, 390 bp, Saccharomyces pastorianus
atgttcatattaggcagtgtcggatgtgtcgaggcggacgaagcctcgccattatattgtctctcggctgccttgataaggttgtcaaatgacgagatgggaggcaacgtgatgtggttcatagcactattgtttgcattactcatcgttcgctgcacatgccacacaaaaaacacccaccctgatttctcgaaaccaactttttgtcaccaacatgcagcgcttaccaacagtctgtcttctttataccgttgctttgttccagatggtactgccatgcttccaacggctacaaaaaaaacaccgcaacggcgaaaaaatggcgcaattattcaccgtgtagtcatttaccacggccgggaaagcgcgaatgggatcagcaaacaataa

SEQ ID NO: 77789 - DNA, 729 bp, Saccharomyces pastorianus
atggaagttttaaagaacattagaatttatcctttgtcaaacttcatcacatcaaccaagaactatataaacctaccaaatgaattaagaaacctaattagtgaagagcaggagagtaaactagggttcttgcacatcattgaaagtgattttaaaccttcggtagcgctgcaaaagttggtgaattgtactacgggggacgaaaagatcctaatcatagatatagtatcaatatggtcccaacaaaagcaaaggcagcatggcgcgatctacatgaattcgctatcttgcataaacatcacgggattaatcgtatttctagagttactgtatgactctcccatggatgcgttaaggaggtgccaggttgataatttcaactttcaattacgaggaatagtaatcgacaatttgtctttcttgaattttgaaagcgacaaaaactatgatgtaataaatttatcgaaatttgaaaaactgtttaagattctaaggaaactaagagaatttttgggctgctggatcatcaccaaaagttttcccacagacttctataatggtatcgaaaacaccttagttgataagtggtccatcaagaggaaaagcggcgttacactgtaccccacaaaactacctgattcatacatgaagggaatggatctgataatctacagagaagttgttgacggcaggccacagtacagaaggatagccgcacttgaagaatga

SEQ ID NO: 77790 - DNA, 1047 bp, Saccharomyces pastorianus
atgccaactctagtaaatggaccaagaagagactctaccgaagggtttgataccgatatcatcactcttcctagattcataatcgagcaccagaagcaatttaagaacgctactggtgatttcacattagtactgaatgccttgcaattcgcgttcaaatttgtatctcacaccatcagacgtgctgaattggttaacttggttgggttagcaggcgcttccaacttcactggtgaccagcaaaagaagttagacgttctaggtgatgaaatatttatcaatgccatgagggctagtgggatcatcaaggtccttgtatctgaagaacaggaagacttgatcgtttttcccacaaacacaggctcatacgcagtgtgttgtgatcctattgatggttcctcaaatttggacgctggtgtttccgttggaactatcgcgtctatattcagactgctaccagactcatcaggtactataaacgacgtactgagatgtggtaaagaaatggtagccgcttgctatgccatgtacggttcctctacgcacctagtattgacattgggtgatggagttgatgggtttaccttagacacaaacttgggcgaattcatcttgactcatcctaacttaagaattccgcctcaaaaggccatctactcaattaatgaaggtaacaccctttactggaacgagactataagaacatttattgagaaagtcaaacaaccccaagcagacaacaacaacaagcctttctcggctaggtatgttggatccatggttgctgatgttcacaggacgtttctttacggtggccttttcgcatacccttgcgacaagaagagccccaacggaaaactgaggttgctttatgaggccttcccaatggctttcttaatggaacaagcagggggaaaagcggtcaacgatcgcggagagagaatcttggatttggtgccaagtcatatccatgacaaatcttctatttggttgggttcttcaggtgaaattgacaaatttttagaccatattggcaagtcacagtag

SEQ ID NO: 77791 - DNA, 1443 bp, Saccharomyces pastorianus
atgtcctccaaccgtgttctagacttgtttaagccatatgaatctttcctgccggaagtgattgctccagaaaggaaggttccatacaaccagaaacttatctggacaggcgtttctctactgatctttttgattctgggccagattccgctgtacgggatcgtgtccagtgagacttccgaccctctgtactggctacgtgccatgctggcctccaaccgtggtactttactggaattgggtgtttcgcccatcatcacttcatctatgattttccaatttttgcagggtactcagcttttacaaatcagacctgagagcaagcaggacagagagttgttccaaattgctcaaaaggtgtgcgctattattctgatcttgggccaagcccttgtggtcgtcatgacaggtaactacggcgctccttcggacctcggattgcccatctgtttgttgttaatcttccaattgatgtttgcatcgctgattgtgatgttattagacgaattgctatctaagggttacggcttgggttccggtatttctctgttcacggcaaccaatattgccgaacaaattttctggagagcgtttgctcctactacagtcaattccggtcgtggtaaggagttcgaaggtgctgtgattgcctttttccatcttttggctgtcagaaaggacaagaaaagagcccttgtcgaggccttttaccgtaccaatctacctaatatgttccaagtgttgatgaccgtggccatcttcctctttgttttatatttacaaggcttccgttacgaattgcccatcaggtcaaccaaagtgagaggtcaaattggtatctaccccatcaaactcttttatacttccaacaccccaatcatgttgcagagtgcattgacttctaacattttcttgatctctcaaatccttttccagaaatacccaaccaatccattgattcgtttgatcggtgtttggggtatcaggccaggcacccagggccctcaaatggccttgagcgggttggcctactacatccaaccattaatgtctttatctgaagctcttctggaccctatcaagaccatcgtctacatcacatttgttctcggttcatgcgcagtattttccaagacgtggatcgaaatctccggcacttccccacgtgacattgccaaacaattcaaagatcaaggcatggtcattaacggtaagagagaaacctccatttacagagaattgaagaagatcattccaactgctgctgctttcggcggtgctaccatcggtgctctttctgttggctccgacctactaggtactttaggttctggggcatccattttgatggctactaccaccatctacggctactacgaagctgccgccaaggaaggtgggtttactaagaacctcgttccaggattttctgatttgatgtga

SEQ ID NO: 77792 - DNA, 399 bp, Saccharomyces pastorianus
atggattgcccctcaaacgttgtgttattgttgctgcaattagttttgcagcgccaacaaactctagctcatcgagataagtcggttgatttgcaaacgctgttaaaagatcccgtcattgataatgacgtactagtagagttcaagacacacaagttggtgcaattatatggccctcaatactgccgcgacatatctctgagagggctcaaaacaatggttacagatatcttcgcaaacggaatcccaaaaaatgcgcaatcttcagggaatgatcaaccagtgactgtagtggacctggccaattactactacatgcagagaatcaatgagctacagaatacagaacttcctcaattgaaagaggcattgctgacaaggctggagcacatgatctaa

SEQ ID NO: 77793 - DNA, 1299 bp, Saccharomyces pastorianus
atgagctctactttctttacatgcaactgttgtgttattcagttcaagactagtgatttgcaaagatatcacatgaagaccgaatggcacaggtacaacttaaagagaagaattgccaacctgctgccaattggtgcggaacagtttgctgagaaattgcaaatttcagaaaaggaacaagctgaaaatcaggttgatgagtttggtttccctgttctaaagcctgttatgaaccaaagtaacgttttgcctcagaaacagaagaaaccgatcaagtcaaagagaggaagaaaagttggtacgaacttattgaagaggaaagacagggatattgctaaagaaaaacagaatagatcggtgtccccttctggatcaatatcttcacaattatctaatttgacagtaggaacagaaaacacgaatacagattatggtgaagatactgtctctgaatacggtttcactagtgactctaattatgagtatgctactagtgatgaggaactagatatagcggataagccaagcgataaagaaaatgaaaagattaccatcacggaatgtatatattgcgggaaagacaataaagaagtggaaagaaatgtcaaacatatgtttagcgagcatggtcttttcatacctgaaaggtcatatttgattgatctaaacggtttactagagtttttaataaaaatgattgttattgatcataactgtctgtgttgtaactttcatggctccggtttggaaagtataagagcgcatatggcttctaagcgtcattgcaggctgccatatgaaacaaaggaggagcgtcagcttttcgccccattttacgattttacttacgatgatcactctattagcaaaaatcttcagaatgacagagcaattacttccaagctttcatctgtctatggggccaaaaatgatgaagaagatggggaggtagatatcacgttggtctcatccgaaaatgacattaatgcaaactataccaccgtatctattgatgaatctggtttagaacttaccttgccaacaggcgctaggctaggtcatcgtgcgggccagaggtactatagacaaaatttaccttcgcagccaaaccctaacgaaagcagaagaacgattacagctgctgatagaaggatggtcagtggtgttaccgagaagcaatataagaagggtatgaagaaaatgcaacaattggagaaaaatgccattaatacgcagatccgtcgcgaaattaaaagggttaactttcaaacacattacagggatgagttgttgcaatag

SEQ ID NO: 77794 - DNA, 171 bp, Saccharomyces pastorianus
atggctcacgaaaacgtctggttctctcacccaagaagatacggtaaaggctcccgtcaatgtcgtgtttgttcttcccacaccggtttgatcagaaagtacggcttaaacatctgtcgtcaatgtttcagagaaaaagctaacgacattggtttcaacaaattcagataa

SEQ ID NO: 77795 - DNA, 339 bp, Saccharomyces pastorianus
atggattggctgaaaaatacaacaattgtagtgttattcagtcattcaactgacaaaagtaacaaacacaagaaacgtcaagtccagtgcaatatgcgaaagaacactttagatatggtcactataggtatcgcatgccttgtgggagtctacacgggcacgagatttttcgagcccattgttatcgatagattgcgtaaggatggaaacttgagaacggacattcccatcccagaatacgacgaggacggaaatctgttaaagttcacgccatctttatcatccacaccagctgcaccacttacaccacctacacctcctactccaccacaacagtaa

SEQ ID NO: 77796 - DNA, 840 bp, Saccharomyces pastorianus
atgcagggcacttttaaaaggttttaccatcccacgcttacgcggatgtccttcttggataaattcctcaagcctatgatggcaacggcttccccaaaggaataccagatcaaacaactggtcaagccaataggcttaacacaagcaccaaggaaaagcaccaaatactcccaggggaactctttgagggatatgtttgattcggaaaagacaaaccacagagttaaagagttggccgttgaattcagcaaatctggactttatgacgtgcaagtcttccaaaagacaaaggggaaattgtttatagctccagtttcatattggaaagaagataaagctttgttttttcctcatttgataggaacggcaatggatggtacgaaacaacagaatatcgaggatatgttaaggggtaaaaccagtatagtgaggttatttagtacagcatctggcgataagttgagtagttcatacttccaaggaatcgtagacgataacaaaaaaactgactacttgactgaagctgatgcgcgtttaagtttaaatgacagtaacgtccaaatcatcgaggtcaatcttgtagaaaacgctgtgaaaagtgctctagtgaaaacgcttgctcgttgggccaatcgcgttccatcctggcgccagccattttatttcgaatgttctagaggccaatggccattttccgtcagggaagagctcttttgcaataatgtcttttctggatacgtctttcttgtggaccagcagttaaaaattaggtgggcagcttgcggggaggctactccatctgaaaaggaagcattgtggaagtttgccaaacgtctgtga

SEQ ID NO: 77797 - DNA, 237 bp, Saccharomyces pastorianus
atgttgtgccaacagatgattagaacgacagctaagagaagtagcaatatcatgaccagacctattatcatgaagaggtcagtacacttcaaagacggtgtgtatgaaaatatcccattcaaagtcaaaggaagaaagacaccttacgccttatctcatttcgggttcttcgctattggatttgctgttccatttgttgcctgctatgttcaattgaaaaagtcaggtgctttttaa

SEQ ID NO: 77798 - DNA, 2343 bp, Saccharomyces pastorianus
atggctcctaaatctagttcttccggttccaaaaagaaatcatcggcaagttctaatagtgctgatgcaaaagcatccaaatttaaattgcctgctgaatttattaccagaccacatccttctaaagatcatggcaaggaaacatgcacagcatatattcatcctaacgtattatcctcgcttgagataaatccgggatcattttgtactgtcggtaagataggcgaaaatggtattttagtaatagctagagcgggtgatgaagaagtacatcctgttaatgttatcaccctttccacaactatacgatctgttgggaaccttatccttggtgatcgtctagaattaaagaaagcccaggtgcaaccaccttatgccactaaggttaccgtggggtccttacaaggatataatattttggaatgtatggaggaaaaagtaattcaaaagctactggatgatagtggcgttataatgcctggaatgatttttcaaaacttaaaaacaaaagcaggtgatgaaagcattgatgtcgtaattacagatgcgagcgatgattcgcttcccgacgtcagccaactagatcttaacatggacgatatgtacggtggattagataacctgttttatctatctccaccttttatattcagaaaaggctccacacatataactttttcgaaagaaacccaggcaaatcgtaaatacaatcttccggagcccttatcctatgcagcagtgggcggcttagacaaggagattgaatcactgaaaagtgctattgaaatacctcttcatcaaccgacgctatttagtagctttggtgtttctccccctcgaggtatacttcttcacggacccccaggtactggtaaaactatgcttttgagagttgtagcaaatacgtccaacgcacacgtcctaaccattaatggcccctcaatcgtctccaaatatcttggtgaaacggaagcggcattaagagatatttttaatgaagcaaggaagtaccagccttccattattttcattgacgaaattgattcaatagcaccaaatagagcaaacgatgactccggtgaagttgagagtagagtcgtggctacattgcttaccctaatggatggcatgggcgctgcaggtaaagtggtggtaattgctgctacaaacaggcctaattctgtcgaccttgctctcaggagacctggcaggtttgaccaagaagtagaaattggtataccagacgttgatgccagatttgacattttaactaagcaattctcaagaatgtcctcggatcgtcacgtattagattctgaagcgatcaagtacattgcttctaaaacgcatggctatgttggtgctgatttaactgctctctgcagagaatcagttatgaagacgatacaacgaggactaggaacagacgccaatattgacaagttttccctaaaagttacattgaaagatgtggagagcgccatggttgatatcagacccagcgcaatgagagaaatcttcttagaaatgccaaaagtttattggtctgacattggcggccaagaagagcttaaaacaaagatgaaagaaatgatacagttgcctttggaggcttcggagacttttgccaggctgggaatttctgcaccaaaaggtgtattactttacgggccgccaggttgctccaagacattaaccgcaaaagctctcgctacagaatcgggtatcaacttcttagctgtgaaagggcctgaaatttttaacaagtatgtaggggaatccgaaagagctataagagaaattttccgcaaagcacgctctgcagctccaagtattatcttctttgatgaaatcgatgcattatctcctgatagagacgggagttccacctctgcagctaatcacgtgctcacatctttactcaatgagattgatggtgttgaagagttaaagggtgtagttattgtagcggcgacgaatagacctgatgaaatagatgctgctcttctaaggcctggtaggttagatagacacatttacgttggccctccagacgtaaacgcccgcttggaaatcttaaagaagtgcacaaagaaatttaatacagaagagtctggagtcgatcttcatgaattggcagaccgtacagaaggttattccggagctgaagttgtgctgctttgtcaagaagcgggcttggctgccataatggaagatttagatgtcgcaaaagtggaattacgtcattttgagaaagcttttaaaggaattgctaggggcattactccagaaatgctctcttattatgaagagtttgctctaagaagcggttcatcttcgtaa

SEQ ID NO: 77799 - DNA, 105 bp, Saccharomyces pastorianus
atgtttcttgccatttgtgatatgcccgcatttggaccgttgaatttaatactgttgttaaccatgagattgaaatcctccgtgatttgctccggaacttcataa

SEQ ID NO: 77800 - DNA, 1104 bp, Saccharomyces pastorianus
atgcacacaatgcatattccatccggtgatgttctgataccgaagccgaagcttattactgaagaaacagatccactgcatataataaagacgaggcaaaagacacatggtcggcccgtgaccattgcaggcccaatggttcggtattccaagttaccattccgtcagttgtgccgagaatataacgttgatatagtttactcccccatgattttggcaagagaatatgtccgtaatgagcatgcaagaatctcagacctttctacaaataatgaggacaccccgctaatcgtccaagtaggtgtaaataacgtggctgatttactaaaatttgtggaaatggttgccccatactgtgatggtattggtattaactgtggttgtcctataaaggaacaaatccgagagggcataggttgcgctctgatatacaattcagatttgttatgcagtatggtccatgctgtgaaagataagtatggcgacaaactaagaattgaaacgaaaataagaatacatgaggcattggacgagacggtggagttatgtagaaagctatgtgatgctggggtagattggattacgattcatggccgaacacgtagaactaggtcatcgcagccggctaacctggatgcgataaaatatatcatcgagaacatcagcgacaaaaatgtgcctgtaatagcgaatggggattgttttaagttatccgatttggaaagaatcaccaaatacactggtgcacatggtgtcatggctgtgcgtgggttgttaagcaatccagcgttatttgctggatatactacctgcccttggggctgcattgagaagttttgttattgggctctagagtttggtggcttgccttttcaattggctcagcaccatctgtactgtatgcttgaaaatatggagttgaagaaatctctgttaaaggaaatgatgaatcttaaaaattacattagtctgatcgactggtttaataaaacctttgagttcaagcgttacggcgaggatggatttggcatgggcgttgaaattccttataaagctaatagctgtgtgcagaggagcgcctcagtggttgagagacaagaatga

SEQ ID NO: 77801 - DNA, 792 bp, Saccharomyces pastorianus
atgaggaattttttcacgttattttttgcagctatattttcgctaggagcacttatattagccattgttgcatgcgcaggatcaacgaaaaattatagtcccataaataaaatttactgtgcagaattggatctgtcgcagatgaaggtatcgacggtgctcccttctttgagttctgctacgctatcttcgttgggcctgccctcatatataaatatagggctttggtcgtactgtacagtggactcctcgcataacatacaatcatgttcttcgcctcacggtatccagaattttaacctatcgtcattagtgtatgacaatatcaacaacaatgaggctctggagcttatggattccgtggccggtgttgttttgcccgaaaaactaaaaagtaaaatgacatactacaacaatttggtcaagtgtatgttcattaccattcttattggtattgtcttgacctttgtgaatctagtgttcaacgtattgcgctggatcatccacataaggccgctaacgtggtttggtgcctttttttcatttttcgcctttgccgccctattagtcagtataggttcgtgtttgggcacttactcatacatcaaatacatcctaaagcataactatagtgattacggtatttcaatgagcattggtaggaactaccagggtttgatgtggggggctgtcgttggagcattactgaatttcattctatggtgtagcgtgagatcgaggcccaccgtcatctatgcgaacgctccaattgaggaaaaaccattgatttga

SEQ ID NO: 77802 - DNA, 339 bp, Saccharomyces pastorianus
atgtatctcagtgcccagcttatgagaactgtcacagcctcccacttgaccctcagagccctctccactccccccctctttcaacatcgccagatagccgccgttgaatggtgcgggacaacccggcctggcctggccaggcaaaaaaggacgcagcacgcctcgagcgttatttccaaatcgggcgtactatcagccaagcccagctcggtatttttagcgcttctcgcaggaaaattggctgagaagtatatatacgcgagaatgttgctcttccatgtctcagtagtcaatgagtgtccagtggtgtttcattctggaccagttgtttggaagtag

SEQ ID NO: 77803 - DNA, 1182 bp, Saccharomyces pastorianus
atggcgaactcattagacagactgagagaacacttaaagaacggcgataaactggttctaaaaaataatgagggacagtctactgacgatattacgaaagcaaccatggtagaaactctatccagtgatggtagtacccaagatagttttccattgaatgaagaaacggaaattgagattgatcgttcattggtacagttacgaataattgttcattgttggatgaataaggactcaagtgccgcagactatctagcagactgtcagaataaacaattgactaatgtttcatttttacaaagaactgatttaataaattggttgtctggcaatacggaatcatcccaatatctgaaagcacccggtcagaaaggcgagacatccgataaagtagatatagaaaataaaactttggctggtgaattgtcgactgtaaaatcaaccacttcagcatcacatgaaaatgatagtgaagtttccgatccagttgtggtggaaacaatgaaacatgaacgtatattggtggaccacaactctgcattgcgtggtgctaagccgatcaacttcggttatctaataaaagatgcagaactaaaattagtacagtcgatcaaaggatctttacgaggatctaaattgcctcccggtcataaggacgcgcacggtcgtatttccaaaacaaatggttcatcaggtggccctcgcaaagatccaattattttgattccttcggctgcgtcatcaattttaactgttgcaaatataaaacagttcctgctggagtcaaaatacgtgaatcctcgtaacttaccgtcagtgccaaacggattagttaacatagagaaaaacttcgaacgtatatcaagaccaattagatttattatagtcgataacactaggatgtttactaagccagaatattgggacagagttgtcgctatcttcactactggtcatacgtggcagtttaataactatcaatggaattcgccacaggaattatttcaacgctgcaaaggctactatttccatttcgccggtgattctgtaccacaacacgtgcagcaatggaatgtagaaaaggtcgaacttgacaaaaataaaagatttaaggatgtggaagtcgtgcgttatttctggcatagtttagaaaaggaacttatttcaagaggataccgttga

SEQ ID NO: 77804 - DNA, 1095 bp, Saccharomyces pastorianus
atggtacaagaaatcgatttaggtttgacatgtgatatgcatgttcatgtaagagagggtgcgatgtgtgaactagtcacccccaagattagagatggtggggtttcaattgcttacatcatgccaaatttacaacctccaattaccacactagatagagtgattgaatacaaaaagacactgcagaaactagctcctaaaactaccttcttaatgagtttttatctttcaaaagacttaactccagatttaattcatgaaggtgcccagcaacatgccattcgtggagtaaaatgttatccagcgggagtaacaacaaattcggctgctggggtggatccaaatgatttcagcgcattttacccaattttcaaggctatgcaagaagagaacctggtattaaatttgcatggggaaaaaccttctgtccatgatggagacaaagaacctattcatgtattgaatgcagaggaagcctttttgccagccttgaaaaaattgcataatgatttcccaaacctgaaaataattctggaacactgcactagcgagtcggcaataaagacaatcgaggatataaataagaacgtgaagaaagccactgacgtaaaggttgctgccacattaacggctcatcacttatttttaacaattgatgattgggccggaaatccggtaaatttttgcaaacctgttgcgaaacttccaaatgacaaaagggccctagtcaaagctgctgtatcagggaaaccatattttttctttggatctgattcagcacctcatcctgtacaaaataaggccaagtacgagggtgtttgcgcaggagtttactcacaatcttttgcgatcccttatatcgcccaagtttttgaagagcaaaacgccttggagaacttaaagggctttgtttccgacttcggaatttccttttatgaggttaaagatagcgaagtggcttcttcagataaggcaatattattcaaaaaagaacaagttatccctcaggttatcagcgatggcaaagacataagcatcatcccatttaaagcaggtgataaactaagttggtcggtgagatgggaacctcgttaa

SEQ ID NO: 77805 - DNA, 471 bp, Saccharomyces pastorianus
atgagtatgagttcaactgtaattaaattcagggctggtgtttgtgaatacaacgaagattcacgtctatgtacgccaattccagttcagggtgaaatcgagatcaaaccaaatgaagaggaagaattgggattttgggatttcgagtggcgtccaacggaaaagccggtcgggagggaacttgattctatttctttgattttaattcctggagagactatgtgggttccaataaaatccagtaaaagtggcagaatatttgctttagttttttcatccaacgaaaggtacttcttttggctgcaagagaagaactcaggtaatttgcccttaaatgaattgagtgcgaaagataaagaaatttacaataagatgattggagtgctgaataatagtagtgaaagtgatgaggaagaaagcaatgacgaaaagcaaaaagctcaagatgtggatgttagtatgcaagattaa

SEQ ID NO: 77806 - DNA, 2127 bp, Saccharomyces pastorianus
atggaggattcggactccaacacagataaaaagttctttttcaaaaaaagaagaatcgattcctataattatagcgatgaggaagataataattcaagcatgaatagtgacatgacatacactaatgatgccttgaaaactagtagcggcaatgccccaacgatctcaaaattaacgaagacatatggtattggtgcgaagttactttcgagtatgggatatgttgcgggaaaaggccttgggaaggatggttctggtataactacaccaatagaaacccaaagccgacctatgcacaatgcaggtctaggaatgttttcaaataccaacaccagtaactatcacagtgaaaatgaggattacttgagctctgaggatgaggtggttgaaggtatagaacaagtcaaattcaataaaacctccacggaggttttaggcgaagcgttgttaaatgatagtggtgatatgactatagtgcgaacactgagagaattgaggttagcaggggtacaattaccagagagtatcctaaaagaattagaccctttaaatgcagtaccaaagccgaaaaaagatgctgttgtggagatattgcaagagctgctgggtattgaaaaaagtttggaagctattcgtcagcgcacctctccgttagaagtgcaagtcaaagaatattatggacaagagaggcttctttctgaattggaggttactttgagggacgaaagcaagcatgtttccctgtatgataagattggtgctattttaaaattgtccgacgacgagctcatagataggctaacgtcctgcttattgagaaaagaattactaatagaatttgatttggatcatttagaaaagccaaacgatatacttgatgagttaacgcaaattatagaactgctcgcatatagaatggatacaacttcgaaatttttgaacaggacacaaacaacaatctttaaagttatatatcccaaactcaaaaaattttgggaagggtttgatatgactaaatcaaaaatcgacagcgctatcaccctattactggatttccaacaagtgctaagttttatcgggtgtaaagagcatatcatggaggaattcgtctatccaaaactattacaggaattagataattgggaacttcacgatgaagtaggccatgtttcgccaagagtatgggtcttggattttatggttttaattgacgataagatcaaagacacaattgtggacaagattgaagcaaatttttttgcttattgtaaaaattggtaccatagggaatcattttgtatcactaattctgatattatatttatcaaagaacttatctgcgaacgaagatattacaaaattttatgtaaagagttcctttctaaattcctggacgagctgtgggaaagacataatgaccccatctacgagttagaggattggaaggaaaaacaggaatggaaagaaaaagattctggatttttctattttatgaaaaaactgagaagttatacccattattttcatccaaaacagtatgaattgatgatacggggaacctttaataatataaacaaaatactttatcaatggcatctttatagtacagtggaagacttacacaagtcaaagtggtggcttaattggctgatgaatacggtatttgagcactctttaccaacagaaatagaactatcggagattagaaaaagctataatatattcgctatgtctcataggtaccaccttgataaatctacattagatgaagatttcgatttgagacagggtttacgaaacttaatggaaacacaagtgaccgacgatattagtcaaagcgaacaagaacctacctatactgtacaaaatattccgcttggaaaagttagcagctctttcaaggatgtggtagaagactactgcctggaaaaagggtacttgatcagcaaaataccaaataggtacactcaactgccatatggaagagaccaagattgtatagttcctttatttgagatccgaaacgggaagaaaaaaattgaagttgctttgaaacatgatattctttgggtggaggattccagtgggacctttaagccaatttatttatgggcccttgacctctag

SEQ ID NO: 77807 - DNA, 2013 bp, Saccharomyces pastorianus
atggtagaaccggacatgcagaagaaggcaagtggtggcagtggcggttccgagatggatactttaaatgctaccagcaacagtagtaaacaaggagtttcaaataataaaaggaatccggtcagtaaaaagaaaccagggaataaggtctctgatggaagagattatgcacataattatcacggggaaggccgcagaaaaagtagcaaacaacagaggtcaagaacgccctataaggagactagtactaggatcaatgatcaagatatagatttatctatccaggaagaaattcttggtggtaatttcaaattacgaggcaggaaaactcaagtttccattaatcatttgttgaatttccagttacctgaagtcgaaagggaaaaaagtaggtcctcttcaagtaagaaatcgaataggagacgcgatgagcacgtacatttacacggtgacacatttgttaatgttaattaccgtcttttggtagatgatcgttttgactacccagagcaaaactgtaacccgaacgttcctgtcgatcaagaaaagattctaagagtcatagtgccaaagggtcagaattgttctatttgtctcagcgaggaaccggtggctcccagaatggttacttgtggccatattttctgtctaagttgtctcttgaactttttctccattgaagaaaccgtcaaaaataaagagactgggtactcaaagaagaagaaatataaagaatgcccgctttgtggaagtattattggccctaaaagggtcaagcctgttctgtatgaggacgactttgatgtaaccaggttaaatcaaaaacccgaacctggtgccacagtacatctacaactgatgtgtaaaccacatggttcactattacctttgccagtagccttacatttagaccctctaaaatgtggaaatttccctcccgcaaacttaggatcaataaagcattatgcgcatattatgaagtgtggcgtgtcttactctttggagctctatcaaaaggacattgttgctattcaggaacaatatgaaatcgacaaggccatttataatgatagtggaaaatttgttaagcagtcgattgaaaatattaatgatcaaatttcgacgttgctggctgcaaccactgatttgagcccactttccaacgatattaacaacggtttgaacaattttcattttgatgacgatctcttgaccaaatacgatgattcttccgcttactttttctaccagacgttggtggcatcgtccacgaaatacttcttatctccactggatgtaaaaatcttattgactattttccactattattccaagtttccagaaagcatcgagacgacagtcgaaaatatacattatgatacagtggtaacggagcaattgattcgccgctacaagtacatcggtcaccttccaatcggcactgagattgcccttttagacttggactggcgtaaaataccattccttcccaaggaaatttacgaacagtttgctcatgagctaaaacaacgtcgaagaaaattcacaatgaaaaagcaaaaggaagataaggaaaagaaactatatgaaaaaaggttggaacaagaacatgccgagttctacagaaaggaaaatggcaattctctcaagtttgaagactctgtacagatggctacccattatgaatccattgtaagctcttccatacctctcaactccttaggaatttctatgctgggtccaccgacaaattcctgctctactcctcaaaagcaagcgccctcccacacgaaaagaacaatttgggggacatcaattgcagtgacggaagacgaaaaagcatcaaaggagaacaaagaatttcgagatatgttattgcagcgaataaggcaggaagatagttcggatgtcacagattcgacggattctcctcctacaagtaatggtaagcgaggcaggaagaagaaaggtaaagtcatgctattcagcagcaatcatcaagccttaggttag

SEQ ID NO: 77808 - DNA, 345 bp, Saccharomyces pastorianus
atgacagcgaatgcaccacctccagaggcattccaattcacagcaataaatttaccattcgtttttagcaagttggagtcccatgcattgttggtcactttgagtttttcatactgcagttcctttttggccgcttggccaaagacgtgtctatatttagaagcacgaacaaattttccactcatcttgcgcccttctaagtggagtgtatcttttatccctttttcactgtactcttttgatatacgtgtacatgaatctactttattttcttcgagagttaaaataatatcaccgaaattctatttacggtcaaaagtgaaaaatcacgcacaacgacactaa

SEQ ID NO: 77809 - DNA, 1956 bp, Saccharomyces pastorianus
atgagtggaaaatttgttcgtgcttctaaatatagacacgtctttggccaagcggccaaaaaggaactgcagtatgaaaaactcaaagtgaccaacaatgcatgggactccaacttgctaaaaacgaatggtaaatttattgctgtgaattggaatgcctctggaggtggtgcattcgctgtcattccgatcgaggaagtgggcaaggctccagatcaagtgcctttgttcagaggctacactgcgcaggtcttggataccgattttgatccgtttaatgactacaggattgcttccggttccgatgattctaagattggtatttgggacataccggaaaactacaaatttcacgatcatgtagatgaagatggagagccaattgatatcaaaccagtaaagtttttgacaggacacgcaaggaaagttggacatgttctttatcatcccgtcgctgagaatgtattagcatcctcttcaggtgactatactgttaaattatggaatgtggaaactggaaaggacatgattactttgaaacatccagatatggtcacatccatgtcattttcgtatgatggtaattatcttgccacggtggctcgagataagaaactacgagtctggaatatcagagaagaaaaaattgttagcgaagggcctgcccatacgggtgcaaaaaaccaaagggtggtatggttaggaaactctgacagattggctactactggtttttcaaaattgagtgatcgtcaaatcggtatttgggatgccttcaacattgaaaagggagatttgggaggcttctacactgtcgaccaatcatcaggtattttgatgcccttttatgacgaagggaataagattctttacttggtggggaaaggtgatggtaatattcgatactacgaatttcaaaacgacgagctgtttgagttgtctgaattccaatccacagaagcacagagaggctttgctgtagcgcctaagcgaatggtgaacgtcaaagaaaacgaagtcttaaaaggtttcaagactgtcgttgatcagcgtatcgaaccggtatctttctttgttccaaggagatcagaagaattccaagaagatatctacccggatgcaccttccaataagccagctttaactgctgaagagtggttttctggtaagtctgttgaaggtccaattctcgttagtatgagatctatctacgacggttccgcaccaagctttcatgaggctaaaagacctcaacagccaacaactcaagaaacagctcttgaagagaaaaaggagcagcctaaagtggagaagccaatcagcgaatccgaaaaggaggtgaaacaagaagctccaaaatctccctcaccgctaaagtcggcctcctcatcttctacaatcaaccatgtattaaaggaagataattcgatcaacaagttgttgaagaaatcctccgatattgatcaagttaacaacgccgaagatccgtctagggatacctccggatgggaagaagccgatgatgagccagctcctatcaaaatcgaaaccccagccactccaacagaaactaaaaaggatcgcacacctaaggtcgaaccttcaaaagaattgaagccagagccagtgtctatcgcaacagatagaaaacaggagcaaagcttacctcaagaagagaagtcctctgagaaaacaaagtcccctgagcaggaaaaatccgcaacacctccttcttcaattacggctgctaagacagccattactgccagcagtaaggaagagccatccgcggcaaagacatcacctaagtcattgggtctaaaacagtctgtcgaaaaactatctacattggttctgcaattagaagatgtagttgataaattaatgaaagcaaatcttgacaaagatgagcgcctgttaaagttggaacaaaaaattggcgaactgtcaaaatga

SEQ ID NO: 77810 - DNA, 1362 bp, Saccharomyces pastorianus
atggaactgaatcaggttttagaaaaaaaggagcagattctgcaatacttaggcactctggtcgggcttcacgaaaaagcgttgtctgatgtaaattcggcttcccaggtgacaagcatccggaaggatatcactatttgcttaaacgatctatgcagaattaatgatctcttagtgtcccatgatggtctattgaaaagagaaattgggtccttacttcgagacaaacaagagctactcgaactgaacgaaagagagcagcttctttggaaagagcggaagtcgtggcatattgagcaagaaaccgatgctgcgccggcggactatgttatcgataaggacgccataattaccatttcatcgcaccaccggacatcactaaacaaatatatcgagtcagtgggggcagaaaatacaatactatcaaatacggatgattcggatgcaatgatcgaggaagtacagaacgctgaatcttctgcggatcaaatgatacgtaattacaaactgttacaattttctcataagcaagctaaatcagaaataataaggctggaaactttactaagagacttcaaaaaggacaataaattcattgaagaggagttaaaaaggcaatctggacggatacgttccgaaatgggtaatattgattttcatttgtccaagatagaggaatctaagcatcaattaatgaaaagaataggattcgagtcgcccctgacacaggaaaaatcactatcagaaaagatattcaatttaaggctgtccagcgcggatgaagattacaatgagagacaaactatcaacatgaaaaattttgttcatatgaaggatctcatagaactgaaaattgaagatctacaagagcaactaatgagaaataaaaatgagtcttctaccgtactaacgcaacgtgaattatggctagattgtcaaaaaaaagttggagatttggaaagcaaattaataaccaaacttcggagcagcagcaactccaaaatacctccaaatgaaatgtcagaaatgatcaattctacaatacagtacctaaataaccttcttgactcttctgatgaaaagctcacgacaactttaatatcaaacgaaagggacgtactttcgaaagcttgtgaagaactccatagcgaaagtaccactccacaagatgggtcaagcgcactaccttctaaaccaattgatatacacaaaagccataaaggttcgaacgcgagttcaaatttaaaacagccctcgactccctcattcttggttgctagcaaatcgccaccaaagattggcatttctgaaagtgtagtaaacgctaataaaaatgatgccatatcaaaaaaagttgaatga

SEQ ID NO: 77811 - DNA, 1572 bp, Saccharomyces pastorianus
atggccgccgttagagactacaagactgccttggaattcgccaagagcttaccaagactagatggtttgtctgtccaggagttgatggactccaagaccagaggtgggttgacttataacgactttttggttttgccaggtctggttgatttcccatcttctgaagttagcctacaaactaagttgacaaggaatatcactttgaacaccccattcgtttcctctccaatggacaccgtgacagaatcagaaatggccatcttcatggctttgttgggtggtatcggttttattcaccacaactgtaccccagaggaccaagctgacatggtcagaagagtcaagaactatgaaaatgggtttattaacaaccctatagtgatttccccaactaccactgtgggtgaagctaagagtatgaaggaaagatttggattttccggtttccccgttacagaagatggtaaaagaaacggaaaattgatgggtatcgtcacttctcgtgatattcagttcgttgaagacaactctttgctcgtccaagatgttatgactaaaaaccctgtcaccggtgcacaaggtattacattgtctgaaggtaatgaaattttaaagaagattaaaaagggtaagctattgattgttgacgacaatggtaacttagtttctatgctttccagaactgatttaatgaaaaatcagaactatccattggcttctaaatctgccaccaccaagcaactgttatgtggtgctgctatcggtactatcgatgctgataaggaaaggttgagactattagtcgaagcaggtttggatgttgttatcttagattcctctcaaggtaactctattttccaattgaacatgatcaaatggattaaagaaactttcccagatttggaaatcattgctggtaacgttgccaccagagaacaagctgctaacttgattgctgccggtgccgatggtttaagaattggtatgggttcaggctctatttgtatcactcaagaagttatggcctgtggtagaccacaaggtacagccgtctacaacgtgtgtgaatttgcgaaccaattcggtattccatgtatggctgatggtggtgttcaaaacattggtcatattaccaaagctttggctcttggttcttctactgttatgatgggtggtatgttagctggtactactgaatctcctggtgaatatttctatcaagatggtaaaagattgaaggcatatcgtggtatgggttccattgacgccatgcaaaagactggtactaaaggtaatgcatctacctcccgttacttttccgaatcagacagtgttttggtcgcacaaggtgtctccggtgctgtcgttgacaaaggttctatcaagaaatttattccatatttgtacaacggtttacaacattcttgtcaagacattggttacaagtccctaactttattaaaggaaaatgtccaaagcggtaaagttagatttgaatttagaaccgcttctgctcaactagaaggtggtgttcataacttacattcttacgaaaagcgtttacataactaa

SEQ ID NO: 77812 - DNA, 1662 bp, Saccharomyces pastorianus
atgtcgaaagacttgaattcttcacgcatcaaaatcattaaacctaatgactcttacataaaggttgaccggaaaaaagatttaacaaaatacgaattagaaaacggtaaagtaatttctactaaggaccgacctatcgcttctgtacctgccataacaggaaagataccaagtgatgaggaagtattcgactccaagacgggattacctaatcattcctttttaagagagcatttctttcatgagggtcgactttctaaggaacaggccataaaaatcttaaatatgtcaactgtagcattgagtaaagaacccaatctactaaaactcaaagcgccaattactatatgtggtgatattcacgggcagtattatgatttattgaaactgtttgaagttggcggtgaccccgccgaaatcgactatttattcttgggggattatgttgatagaggtgcattctcttttgagtgtctgatttatttgtactccttgaagttgaataatttagggagattttggatgctaagaggtaaccatgagtgtaagcacttgacctcttattttacttttaagaatgagatgttgcacaaatacgatatggaagtttacgatgcttgctgcagatcattcaatgtcttaccattagcagctttaatgaacggacaatatttttgtgtgcatggtggtatctctccagagttaaaatcagtagaggatgttaataaaattaatagatttcgagaaatcccatctcgtggtctcatgtgtgacctactatgggccgatcctgtcgaaaattatgatgatgcaagagatggtagcgaatttgatcagagcgaggatgaattcgtacctaacagtttgaggggttgctctttcgccttcacttttaaagcatcatgcaagtttttgaaggcaaatggtttgttatctattattagagcacacgaagcacaggatgctgggtacagaatgtataaaaacaataaagtaacaggctttccgagcttaataaccatgttcagtgcgccaaactacctggacacatatcataataaagctgctgtgttaaaatatgaagaaaacgtcatgaacatcaggcagtttcacatgtctccgcacccttactggttgcctgattttatggacgtcttcacctggtcactaccttttgttggcgaaaaagttactagcatgttagtgtctatattaaacatatgtagtgagcaggaacttgacccagaatcggaacccaaagctgcggaggagactgtaaaggcaagagcaaacgcaactaaggagaccggcaccccatctggtgaaaaggcgtcatcagcaatattagaagatgaaacccgaagaaagcctttgagaaataagatattagctattgctaaagtttcaagaatgttttcggtgctaagagaagagagcgaaaaagtggaatatttgaaaactatgaatgccggtgtcttacctcgtggtgctctagctcgtgggactgaaggtttgaatgaaacgctaagcacttttgaaaaggctagaaaggaagaccttattaatgaaaaattaccaccatctttatcggaggttgaacaagagaagattaaatactacgaaaaaatattaaagggagcggagaaaaagccacaactgtga

SEQ ID NO: 77813 - DNA, 396 bp, Saccharomyces pastorianus
atggacgcacaactggaatgggcaagcagcctcgtcccaaagagacagcttcaacaacaacaacaacaggagcagcaacagcaacaacaggatttccacaaggaccagttgatgactgtgggtatgcgaatcagacagcgggtcgaccagggttatgcatcgaggacgccgagcacctcggacgcttcactacatccgggtgtcattagagattactcgagcgttattgttccgcaatttacaaggtcgcccttgcccactgctaactcgctaccacctatgctgataaaccagagaacaatgtcgaccgaggcgtcctcgctcgagaaatgggacgtcgcggaacctgccgcggagcacgaaacaatggttaatggatccaagagaagactttaa

SEQ ID NO: 77814 - DNA, 228 bp, Saccharomyces pastorianus
atggcaatggccctggttgacggcagaataagcgctcaggaagtcgaggtacagcttaccctccgggtcccacacatgtgcgcccttagccttgtgaaaaacgacgggcaaggggtggtagttgtgggcggagtatttgttttcccattcaatggtttccttggaggagagggtagcttcggacattggtgttgtggttctgtgctgctgtggtgtcttgtggtgtag

SEQ ID NO: 77815 - DNA, 1275 bp, Saccharomyces pastorianus
atgtccgaagctaccctctcctccaaggaaaccattgaatgggaaaacaaatactccgcccacaactaccaccccttgcccgtcgtttttcacaaggctaagggcgcacatgtgtgggacccggagggtaagctgtacctcgacttcctgagcgcttattctgccgtcaaccagggccattgccatcctcacatcatcaaggctttgacggagcaagcacaaacactaacattgtcctccagagcgttccacaacgatgtttacgcgcaattcgccaagttcgtgaccgaattcttcgggttcgaaaccgttttgcccatgaacaccggtgcagaagccgtggaaactgctttgaagttggccagaagatgggggtacatgaagaagaacatccctcaagataaagccatcattctgggtgccgagggtaacttccacgggagaaccttcggtgccatcagtttgagtaccgactacgaggactccaagttgcatttcgggcctttcgtgcctaacgttgccagtggtcactccgtgcacaagatcagatacggccacgcagaagatttcgtccctatcttggaatctcctgaaggtaagaacgttgccgccatcattctagagccaattcaaggtgaagccggtatcgtcgtgccccccgcagactacttcccaaaggtctccgcattatgccgtaagcacaacgtcctattgatcgttgacgaaattcaaaccggtatcggtagaaccggtgagttgctttgctacgaccactacaaggcagaggccaagcctgatattgttttgttaggtaaggctctctcaggtggtgttcttcccgtctcatgtgttctgtcttctcacgacatcatgtcttgctttaccccaggatctcacggttctactttcggcggtaatcccttggcttcccgcgttgccatcgccgccctcgaggtcatccgcgacgagaagctgtgccaaagagccgcccaactgggtagctctttcatcgcccaattgaaagctctccaagccaaatctaacggtataatctctgaggtgcgtggtatgggactgcttaccgccatcgtaatcgacccatccaaggccaatggtaagaccgcttgggacttgtgtctattgatgaaggatcacggcctcttggctaagcccacccacgaccacatcatcagattggctcctcctttggtcatctccgaagaggacttgcaaaccggtgtcgaaaccattgccaagtgtatcgatctgttataa

SEQ ID NO: 77816 - DNA, 270 bp, Saccharomyces pastorianus
atggagacacctttggatttattgaaactcaatctcgatgagagggtgtacatcaagctgcgcggggccaggacgctggtgggcacactgcaagcgttcgactcacactgcaacatcgtgctgagtgatgcagtagagaccatataccaattaaacaacgaagagttgagtgagtccgaaagacgatgtgaaatggtgttcatcagaggagacacagtgactctaatcagcacgccctctgaagatgacgatggcgcagtggagatataa

SEQ ID NO: 77817 - DNA, 960 bp, Saccharomyces pastorianus
atgtggaagagatcgttccactcccaaggagggcccctgcgtgccaggacgaagtttaccaaaccaaagccaaaacaaccggtgcttcccaaagacaaaataagaccgcccactcaattgactcatcactccaacaacctgaggattaccgaaccaatcccaccaacaacctcaaacctgcgctgtcccgacgaccacccgctgtggcagttcttctccaacaagaaattcatcaggtccgccgacgacttgccgccttccagccatatcagaccctggagcatcccagagttgaggcacaagtcctttaacgacttgcattccctttggtacaactgcctcagggagcaaaatgtgcttgctcgcgaaaaccatctcttgaaaaacattgttggctccacgcatgacgaattcagtgagctctctaactctatcagaaccaccatgtggcaaataagacatgtacttaacgaaagagagctggcctatagcgcttcacgcgaatttttacaggatgagtcggagaggaaaaagttcttggatactttggccaacgattacttcttgaacaaggatatccctgatgacgaagtcgcctccatgctcacacgattccagttggccattttcggcatatcggaaaccatccaggataatacagtcgacattaacttcatcgacgggatcaagttcctggcaaacttaaaactacagcggttcaaggactccaacgacctcatatccgaaatatcacaagaaccgatcacagacgtgggcgagtcgttcatcttattcacttccgacttcgaacctcatgccgttcaagaggcttgtgtcgccatcaaagacctgagaaagtccccagataataaagtccctaaattagacgaactccccaccgtgagaaaatacttgaaacagctaattcatgcaagctccgtggagcaagcaactgcatga

SEQ ID NO: 77818 - DNA, 2130 bp, Saccharomyces pastorianus
atgttggaagagcaactatatttgttagcttgcatttttgcatctagggctgacacgcgcaatatcaaaaagttgtctactagactgggctcacaatccaattacttggagattctctgtgttttgtggccagaattagatgacccaaaaaaccttttgtttcttcgtgaattagaagaggaggtgcaaagtccggaaggggaagaaacaaccgacgaagatgtaatagtagaactattagaaagtgacagcagtttgattccattaattgaaagtgataccacaacgagatcgaacagatatcatgaactgcaagaattcataagcaaaaaactcaataacaagaccttggagaattttgaggagtggttgagagaaaggattttaatatgtaatgaaatgatacctgaaacacctttattatattctgtactatgggagactgccaagtcaaaagtgttatctacaaaatttataggatgggtagaaggagtattaaaacccctcgaccacctaaataaacgacttcatctcatatttaaaatcaacgaatgggaaaaaatgcctgatagcgagttatttaagataatatttgacggtgtagaggatatgcaagaatatattggtatagcagatgttactgaaattgaattagctcccactttgtcttatgggaagaaatgggaaacgttcattacggaattcttcaataaacagcagttctcactaaaatctgatactaattaccagttatttataaagctctattacagcctcgaaaaaggagtaaaagataacagtgaagcgtccagaaaattgcaaagtaatgtggttgatatattatttcacaacagtgagaatttatttaatttatccagtttaactcataagcttgatgaattatggagtatcttgagtggattccctgacgaaattacattagaagaacagaaaactattactgctctagagatgaaacaatttatggaattcttcatcaaatgttccacgaaattttcatttaaagaaatctttgccataacacaggaagaagaatcggctcagttggcccatttctcttcactatgccatgaagaatttaacaaagccaacgaaatctccagttttttgcaagccatgtatgaaacggtcttggacatcagcaaggatgataaaattttcacccgaattagtatggatgaaaagctatacagtatattggaaatcctcttacaaatgaatgagttcgcgtacattgaagccatcatagaaagattcgactacagtaacaatacccaaatatatgaacttctggtgaagttcttctggcatttcttcaataatgcttctaatggattacgtaaagagcctgaaatgaaaaaagcttcgcaaacgttacaaataattcagaagcatatgtcgcaacgggcaggcacaaatctaactaagctggaagtattgcttgagatatcagacaaattgtcgcattattccataaacctaaataagtcgcacaatggcgcaagggataccgctttcaaaccaagcaacattctagaatataaagattgccccctcgatataatatccaacttattagagctgaacccgcgattgtataaggatctgccaactacaaaaagcttgttattcgggatttacgatagcttatccattaatagagagggccaaacgggtaaagtggaagtggatttgatggtattacatattgactatgccttggtgaatttagattttggcacagcatacgaattgggcaagcaagcgtttgaaatttgtcaagaagcgggccaacatatgatgaaggcgttgggcgatgagcattggttaacattttatcaaatggggaagtttgtcgatccaaattgggtggataatgaaattcccacagagataattgttttgcagatgagcatcttgggccgcttactggaggtttgcccccttgaggaagtcgaaattgttacatcgcaatggagcacactagaattggagctaagcgcccgtgacctggtgacagacaagtacgcactggacggacagaacgacaataagagtaaggtaggcggcattgctagggagattttccacaacgtgactaatttctga

SEQ ID NO: 77819 - DNA, 768 bp, Saccharomyces pastorianus
atggctgtcggaaagaataagagactatccaagggtaagaaaggtcaaaagaagagagtcgttgacccatttaccagaaaggaatggttcgacattaaagctccatccacttttgaaaacagaaatgttggtaagactttagttaacaagtccactggtttgaagagtgcttcagatgctttgaaaggtagagttgtcgaagtttgcttggctgacttacagggttctgaagaccactctttcagaaaaatcaaattaagagttgacgaagtccaaggtaagaatttattgaccaacttccacggtatggacttcactactgataaattgagatccatggttagaaagtggcaaactttgatcgaagctaacgttactgttaagacttctgatgattacgttttgagaatctttgctatcgccttcaccagaaagcaagctaaccaagttaagagacactcttacgctcaatcttcccatatcagagctatcagaaaggttatttccgaaatcttgactaaggaagttcaaggatctaccttggcccaattgacctccaagttgattccagaagttatcaacaaggaaattgaaaacgccaccaaggacattttcccactacaaaacatccatgttagaaaggttaagttgttgaaacaaccaaagttcgatgtcggtgctttgatggctttgcacggtgaaggttctggtgaagaaaagggtaagaaggttaccggtttcaaggacgaagtcttggaaactgtgtaa

SEQ ID NO: 77820 - DNA, 2937 bp, Saccharomyces pastorianus
atggctaaaacattgaaagatttggacggttggcaagttatcattacagatgatcaggggagggttattgacgacaacaatagaagaagatcaagaaaaagaggaggagaaaacgtatttctgaaaagaatttctgatggattgagttttgggaagggtgagagcgtgatatttaatgataatgtgacggaaacatattctgtctacttgatccatgagatcagactcaatacacttaataatgttgtggagatttgggttttttcttacttgagatggtttgaactcaaaccaaaactgtactacgaacaattcaggccagatctaataaaggaagatcatcctttagaattttacaaagataaatttttcaacgaagtaaataagagcgagttatatttaactgctgagctatcagagatttggcttaaggatttcattgccgttggacagatactgccagagtcacaatggaatgatagtagtatcgataaaatagaggatagagatttcctagtacgttatgcatgcgaacctactgcggaaaagtttgtaccaattgatatttttcaaatcataagaagagtaaaggaaatggaacccaaacaatctgatgaatacttgaaaagagtatctgtaccagtgagtgggcagaagacaaatagacaggtaatacataagatgggagttgaaagatcttcaaaaagactagcaaagaaaccttcaatgaaaaaaattaaaatcgagccctctgcagatgatgacgtaaataatggaaatataccgtttcagcgaggaacgtcaacatctcatggttcaatttctccccaagaagagtctgtttcccctaacatctcatcggcgtccccttctgagctcacatcacctacagattcttcgaaaattttacaaaaaagatctatatcaaaggaactaattgtttcagaggaaataccaataaactcttcggaacaggaatccgattatgaatcaaacaatgaaccatctgtgctttcaagtaaaccggggtcaaagccagagaagacatctacagaactcgttgacggccgagagaattttgtatatgcaaataatccagaagtgagtggtgatggtgggcttgaagaggaaacagatgaagttagttcagaaagttctgatgaagcaataataccagtaaataaaagacgtggcgctcacggaagcgaattgggcagtaaaattagaaaaatccacattcaagaaacacaagaattttctcaaaattacactacagaaacagataaaaaaatgaacggaaatggaaaacctggaattcccaggggcaacaccaaaattcatagtatgaacgaaaatcctacaccagaaaaaggtaatgcaaagatgattgatttcgctactttgtcaaagttgaaaaaaaaatatcagataattttagaccggtttgcaccagataatcaagtaacagattcctcccaattgaacaaagtaacagacgaacagtcaagcttggacgttgcaggccttgaggataagtttagaaaagcatgctcttcatctggaagagaaaccattctgtcaaattttaacgctgatataaatttagaggaatcaattagagaatctttacaaaagagagaactactgaaatcacaagtggaggattttacaagaatattccttccgatttacgacagtttaatgtcttcccaaaataaactattttatattaccaatgcagatgattctaccaaattccggcttgtgaatgatgtaatggatgagttgatcacctcttcggcccgaaaggaactacctattttcgattacattcatattgatgccttggaactggcaggaatggatgcattatatgagaaaatatggttcgccatttctaaagaaaatctatgcggtgatatatcactagaagcgttaaacttctatattacaaatgtcccgaaagcaaaaaagagaaagacactaatattaatacaaaatccggacaatctattgagtgagaagattttacaatatttcgagaaatggatttcttcgaaaaattcaaaattgtctatcatttgcgttggcggacataatgtgacgattggagagcaaataaatataatgccctccctcaaagcacactttaccgaaatcaaacttaataaggtggacaagaatgaattgcaacaaatgatcatcacgcgactcaaatctttattgaaaccttttcatgtcaaagtaaatgataagaaggaaatgactatttacaataatattcgcgaaggacagaaccagaaaataccagataatgtgatagtaatcaatcataagatcaacaacaaaatcactcaacttattgcaaagaacgtagccaacgtaagtggtagtactgaaaaagcattcaaaatatgtgaagctgccgtagaaatttctaaaaaagacttcgtacggaaaggtggtctacaaaagggtaaattggtagtgtcacaggagatggtaccacgctatttctcagaagctattaacggattcaaggatgaaactatttcaaagaagattataggaatgtctctgttgatgagaacatttttatataccctggcgcaagaaaccgaaggcacgaatcgtcatacgcttgctctggagaccgtcctgattaagatggtgaagatgttgcgggacaacccagggtacaaggcgtcaaaagaaattaagaaggtcatatgcggtgcctgggagcccgcaataactatagagaaactaaagcaattttcttggataagtgtagtgaatgatttagtgggagaaaaattagttgttgtggtgctcgaggagcccagtgcaagcattatggtagaactaaaacttcctttagaaataaattacgccttttcgatggatgaagaattcaaaaatatggactgcatttga

SEQ ID NO: 77821 - DNA, 405 bp, Saccharomyces pastorianus
atgagtgatactacggaagtccctaggcaatcatctgagaacgaccaggataataacttggaaaaaaccaactcatcaaaaagtccggacgtgaccaacaatataccaagtcttgtcaaattagccgccgaatggcaaatcaacaatccacaggaaaccttccaaaaccatatcctggaaaatgatgtactcaagaaaattaatgaaatcactcatttgatccgggaatcgtacaaagacctctccagtcaagatgggatgatgtccaaacaacaacaggaaaagatggattgggatttgttttgtactgttcctgtaaacattattgagcaatatacaaaagacatggacgaaatatatgaaaaaatggaaaggctagcaaaagtaagtataggtcgaaactag

SEQ ID NO: 77822 - DNA, 1302 bp, Saccharomyces pastorianus
atgacaattaaaagcactctagctcgggaattagaaagcttgattttacccgctgattccatagtgaatgtagttgaccaattccaagaggagttgttatcacggcttcagacaaatacgatttctatgctcccgcagtgtttagtcccagataaacgatcgcgatggaaccctgaagacaaaattctgaccattgatttcggcgggacaagactgaaatttgcaattatctctctgccccaaatcgttatcgaatacaatgatgccttcgaacttacctacaacatcgttgattcgaatttctttaatcaaatcatctatacaatatgtaccaggctggctgcaaatggttatataaaaaaaaagaacgagtcatctgaggcgtctaaattttttgtttccgtgacattcagttttcctctaaatccagaaggggaggtagttgcaatgggaaaaggatttgtgatgactgacacccttcaaggatccacggtgaaacagctcatccaatcttcctttgaccggattatatcagaaaatatcgaagaatttttctgtaccatgaacgtgtgtcatgtaataaacgatgcaattgcagtttcactaacaagcaaatttatatgcgaaaacgattccatctcattaataataggaactggtacaaatgcatgttttgaggttccatacggatatttaccacctttcaagagagatgccctgagagaaacattaccgtcaagctataataaggagacattaaatttcaaacatgttctcattaattctgaaattggctttattggtaaaaatgtcattgcattgcaaccgtttgacattcatggagcaatctcatacgaaatgccactagagtgcgttacttctggtaaatggcttcccctatcattaaaaaatattctattacaatataacataatccccaaaaacttcccagtagagttcaatggggaactggtatgccagctggcagaagactctactaatgcttggttcgaaaacgaacattatgcattaatttgtcagatcgcacggctattaatcaagagagccgcattttatgttgctgcaattgtacaagctattgatatcatcacaggctgcaaaaattataactttattcatattggctacgttggatcctttctccacaattcaaatttttatcgagagcagataaaatattactccagcatacatattaagttgcaattcttaaatcacagtaatcttctaggcgctgcaatagccacctacttgaacaaatcagacaaccaagttcaataa

SEQ ID NO: 77823 - DNA, 1038 bp, Saccharomyces pastorianus
atggaaggcgtgtatttcaatattgacaatgggtttattgaaggtgtagtgagaggctacagaaatgggttgttatctaataaccaatacatcaacttaacacaatgtgacacgttggaagatctaaaattacaattatcatcaactgattatggtaattttctttcctctgtttcctcagagtctttgaccacgtcattgattcaagaatatgcttctagcaagttgtaccacgaattcaactacataagagaccaatccagtggatccacgagaaagttcatggactatatcacttatggttacatgatcgacaatgtagcattgatgattacaggtactattcatgatcgtgataagggtgaaattttacaacgttgtcatccgctaggttggtttgatactttgcccacgttaagtgttgctactgatcttgaatccctatacgaaaccgtattggtggataccccactggcaccttacttcaaaaactgttttgacacggcagaggagctagacgatatgaacattgaaattattagaaataagctgtacaaggcttatttagaagacttttacaattttgtcactgaagaaattccggaacctgctaaagaatgtatgcaaacattactagggtttgaagctgacagaagaagtatcaatattgcactcaactctttgcaaagttcagatattgacccagatttgaaaagtgacttgttacctaacataggtaagttgtaccctcttgcaacgtttcacttggcgcaagcccaagatttcgaaggagttagagctgctttagctaacgtctatgagtataggggatttttggagactggtaacttagaagatcacttttaccaattggaaatggaactatgtagagatgctttcacgcaacaatttgccatcagcactgtttgggcctggatgaaatccaaggaacaagaagttaggaatattacctggattgcagaatgtatcgcacaaaaccaaagagaaagaatcaacaattatatttccgtttattga

SEQ ID NO: 77824 - DNA, 1179 bp, Saccharomyces pastorianus
atgtctgatatgcttccattggctacgtatagcctgaatgttgaaccatactccccaaccccagctctgaacttcaaaattccggttaccattagaatcacaatggcggccatcgaccctgagccctttgacgatgacaaaaagccatctactttaagaataatcaaaaggaatcctgaactcactcgcggtgagtactacaaccaagataacaatgacggcctcgaagaggatgaaagtgaaagtgaacaagaagcagatgtaccaaaaaggagtgtcaaatcaaaaaaaggtaaggcagtcgagcaaagtgaatcagaagactctgaagatgaaaacgaaatcgacgatgaattcgaagaatgcgttcttttaaccttatctccaaaaggccaatatcaacaagctttggatattaccattgcaccagaggaagacgttcaattcgtcgttaccggttcatacactatctctctaaccggtaactacgtcaaacatccattcgacaattcttcagattcagacgaagatgaagaagactattacagtgacgaagaatcttccaatggagaagaagaagaagaagaagaagaagaggacgatgaggaactaagttccggtgatgacgatcttgatgatttagtagatgctagtgacatcgaaagtcgtcttgatgaattagtcgaaaaggacgaaaagaagaaaaacaacaagaaggacagtaaaaggaaacatgaagaagatgaggaagaaagtgctaaacctgccgagaaaaaacaaacgaccaagaaagacaagaaagcagagaaagttaaagactcggaagagagcaaaacaaagccaaagacgaagctactggaaggcggtattatcattgaagaccgcgtcacaggaaaaggcccacatgccaaaaagggtaccagagttggaatgagatatgttggtaagttgaagaacgggaaagtttttgacaagaatacaaagggtaagccttttgtttttaagttgggccaaggcgaagtaattaaaggatgggacatcggtgttgctggtatggcggtcggtggtgagcgtagaattgtcattcctgctccgtatgcctacggtaaacaagctttgcccggtattcctgctaactctgaattgacatttgatgttaaattggtctccatgaaatag

SEQ ID NO: 77825 - DNA, 2661 bp, Saccharomyces pastorianus
atggaaggaagatcagattctgtggcgacttcacagtccggaagtgaaatgagccatagtgaaactaggaatagaactgggatgaatgctaggaaaaggaaattcgcctgtgtggaatgtcgtcagcagaagtcgaaatgtgatgctcacgaaagagcaccggagccatgcactaagtgtgctaaaaagaatgtcccatgcattttaaaacgagatttcagaagaacttataaaagagcaaggaacgaagccattgaaaaaagattcaaggaactcaccagaactttgacaaatttaacttcggatgaaattttgaagaaaattgaagaggaacaggaaattgttttggataacagtaatttcacaaaagaaaaagtaaaacaactcaggaagagtgcttttgagacgacagaaatagaaccgagatcatacaaaacacttcgaggagaacctatttcttacagtaccaacagaaaacatacggattcttctcctttaacgctcttaagctcgtcgacaaacttcgaccctgttcactcaacaaacgttatgacagatgatcaacttaagtgcttgccaaaaagcctgggcgacgtatatttgtcaagcagcgatattgctgagctgtttcaagaatttgcgacaaaatatcatcaatttttacccgtcgttgacctttcgaaaggagcagagcgaatttatcacttatctccttgcttattctgggtcatcctgctcattggtttaaggcggaaatttggggctacagacttaatggctcgattatcagtgctagtaaagtcagttttatcagaaatcacaatatctccaataattcgatatactccatcagataaggacgaacccgttctaaatgtagcatctgtatattccgtgcaagcatttcttttatacacgttctggcctcccttaacctcttcattaagcgccgacacttcgtggaataccataggaacagcgatgttccaagcgcttcgggtaggactaaattgtgcaggtttttcaaaagagtatgcttcggcaaattcagaattagttaacgagcaaatacgaacttggatttgctgcaatgttgtatctcaaacagttgcatcatcatttggtttcccagcttatgtttcatttgattatttagtaatcagctctattagagttccaaattcaaaaagccaagtagatatacccaatgaactaagacagatggctcaaattgctagatttgagaaccaaatcgtaaacacaatgaactccaccccggcgagtgttactgggatggtaagtcaggaagagaagcagcccttgttacacgttcttaatcaacaactaagtcaattggagattagtcttgaagaaaataacctagatgatatccgaaaatttttattactagtggccaaggttcacttattaacctattacttcactgatgttacctcccaaagtgctggaaaatcaaatggtaatatttatgagggatcatattccattatggaactcgatacaagttttgaaacgaaacgtggattggtgaaagtttataatgccgccgtaaactttcttatacatgccaatagtatgtgggaacatgatcctaccattattaagtactttcctggtttgtttgtcttgaatatatggcaatctgcctgtattattagtaaactcatacattcatcacttcattcaatgctagatgttaactcaggcaaaaaagcttataacaacgcaatttcattgacgtttaatgcctcagttttaaaatatgatatggcgtacagatcatccggaataatgcgaagcatatggagtttatttgctaatatgtatgatgcctggaaaaacgaccaaaaggaaggtggaggtagactaaataatgatttcaatttaggcatcaccataaaatctaggatgtcagtaaacgttttttttgactgcttatatattctaaaagagaaatgtggtatggccaaattggagagagagaccaaggtttctacagcttacaatgttgatgaagaggaagaggaagatgaagatgaggagggagaagaagaagaagaagaagaagaactaagtagtaaagttccagaaaatatggatagccagcaactaaggacaaggaaattcaccaatgtaaggcatccagaaaagaaagcaagaaaaataattgaaacaattccgctagacccaaatccaataaatgcaggctctatcagcagtggaagctcattaacgaccccaaatagtcaagtagcgaacactatatcatatagaggaatcctcaataaaatgtcacctagggaacaactgaatcatgcaaatttagattccagtgtttctacagacatcaaggacactgaagctgtcaatgaacctctgccaatagggaggaatgctgaacatccggcaaatcaaccgcctctttcaataacacaaatgcaagaaaacacactacctgcgacacaagccaactcttctctattagaaacgtatcccattgttcaatcaaaccccgttgcaactacaatcaaagaatcacccaattccatcatggcaggttgggataactgggaatctgatatggtttggagggatgttgatattttaatgaatgaatttgcgttcaatcccaaggtttaa

SEQ ID NO: 77826 - DNA, 2097 bp, Saccharomyces pastorianus
atggtggataaaaataggacgttgcatgaattatcttccaaaaatttcagcagaacgccgaatggactgatctttaccaatgatttaaagacagtatattccatttttctaatttgtttggatttgaaagagaaaaaacatagtagtgacactaagtctttcttattaactgcattcactaaacatttccacttcacttttacatatcaggaagctattaaagcaatgggacaattggaactaaaagtggatatgaacacaacttgtattaacgtttcatataatattaaacctagcttggcgcgccaccttcttacattatttatgtcttctaagctactacatacaccgcaggacagaactcgtggcgagccaaaagagaaagttcttttccaaccaacacctaagggagttgctgttttacaaaagtatgttagagatattgggttgaaaacaatgcctgatattcttttgtcatcgtttaactccatgaaacttttcacttttgatagaagctctgtcacggattcaatcatccatagtgattatttgatccatattcttttcattaaaatgatgggtgctaagccaaatgtttggtctccaacaaacgcagatgacccattaccttgcctatcttcgttgttggaatacactaataatgatgatacatttacttttgagaaatctaagccagaacaaggatggcaagctcagattggaaacatcgatataaatgacttagaaagggtatcgccattagctcatcgattctttacaaatccagattctgagtcgcacacgcaatactacgtttcgaatgcaggtattaggttatttgaaaataagacgtttggcacttccaaaaaaatcgtgattaagtacacctttacaacaaaggctatatggcagtggataatggactgtactgatattatgcatgttaaagaagcggtctcgttggcagcgttatttttaaaaacggggttgattgtaccagttcttttacaaccatcacgcactgacaagaaaaagtttcaaattagcagatcctctttttttaccttgtccaagcgtggttgggatttggtttcttggacaggttgtaagagcaataatattagagcaccaaatggtagcaccatagacctagatttcacattaaggggtcatatgactgttcgtgatgaaaaaaagacattggatgatagtgaaggtttttttcaagacatgcttatctcttcgagtaatttaaataaactggactatgtgctaactgatccaggtatgagatacttattcagacgccatttagaaaaggaactttgtgtagaaaatttggatgtcttcattgagattaagaggtttttgaagaaaatgacaattctgaaaaaattgatagattctaagcattgtgataaaaaatctaataccagtacttcaaaaaacaatatcgtaaaaacgattgattcagctttaatgaaacaggccaatgagtgccttgaaatggcatatcacatttattcgtcctatatcatgataggatcaccatatcaattaaatatccagcataacttgcgtcagaatatttctgacatcatgttacaccctcattctccattatcggaacactttcctactaatctatacgatccatcacctgcatccgcggaatcagcagcttcatcaattagctcaacggaggctgacacgttaggtgaaccacctgaagtgagtctaaaaccttcaaaaaatctttcaaatgaaaactgttcatttaagaagcaaggattcaaacatcagttaaaggaatataaacctgccccgttaactctggcagaaacgcattcgcctaatgcatcggtagaaaattcacatacaattgttcgttatggcatggacaacacccaaaatgataccaaatcggttgattcatttccagcaactttgaaggtcctcaggaaattatatcccctcttcgagatcgttagcaatgaaatgtatagactgatgaataacgattcctttcaaaaatttacccagtcagacgtatacaaagatgctagcgctttaatagaaatccaagaaaagtgctaa

SEQ ID NO: 77827 - DNA, 1188 bp, Saccharomyces pastorianus
atggagcatgtagattccgattttgcacctataaggagatcgaaaaaggttgttgacagtgacaagattgtgaaagcaataagcgatgatttggagcaaaaaaattttactgtactgagaaagttgaaccttgttccaattaaaaaaagtgttagcagcccaaaggtgtgtaagccgagtccagttaaggagcgagtggaccatgttttctaccagaagttcaaatcaatggccttgcaagagctaggcaccaattatttgtcaataagctacgttccgagcttaagtaagtttctttcaaaaaatcttaggaatatgaaaaattgtatcgttttcttcgacaaagttgaacatatacaccaatatgctggtatcgaccgtgcagtttcagaaacactgtctttagtcgatataaatgtcgtaattatagaaatgaatgactacttaatgaaagagggtattcaatcaagcaaatcaaaagaatgtatcgagtcaatggggcaggcttcatatagcggacaactagatttcgaagctagagaaaaactttcaaatcacacgtctgacctaatgatgatggttatgaggaaaataaataatgacgagagtatcgatcatattgtctacttcaaattcgaacaattagataaattatctacttcaactataatagaaccttcgaagtttaccgaatttatcaatgttttatcggtacttgaaaaaagtaataacattgcatttaaggtcctcatttattcaaataacgttagcatttcgtctctcctatcgacatccctcaaaaagaaactcaacacaaaatatactgtgtttgagatgccgatattaacatgcgcccaagaacaagaatatttgaaaaaaatgataaagtttacctttgatttcggaaacaagttattacagtcttacaactcgcttgtcacatgccagttgaataataaagaatccaacttagcaatctttttcgaatttttgaaggtctttccgcacccttttacctatttgtttaacgcttacactgagattatagtccagagtagaacttttgatgaattgttggataagattagaaacagactgacaataaaaaattacccacatagtgcttataactttaagaaaaaccagcgtcttccacttaagttaactcgaaaagtacatgatagataa

SEQ ID NO: 77828 - DNA, 915 bp, Saccharomyces pastorianus
atgacaaaagatattagaacaggcgatttagtgttatgcaaagttggctcgtttccaccttggccagctgtagtatttccacagcgtttgctgcgaaacgatgtatatagaaagagaaaatccaattgtgttgctgtttgttttttcaacgatccaacttattattgggaacaacccagtagattaaaggagctagatcaagacagcattcataatttcatattagaacatagtaaaaatgcaaaccaaagggaattggtcaatgcttataaggaagcaaaaaattttgatgatttcaacgtatttttacaagaaaagtttgaagaagaaaacaggttaagtgatctaaaagcgtttgagaaaagtgaaggttctaaaatcgttgccggagaagatccctttgtaggtcgaacaaaagtagtgaataaaagaaaaaaaaattcaatatccatcaaagaagatccggaagataaccagaaatcaaatgaagaagaaagcaaaccgaacatcaaaccgtccaaaaaaaagagacccacagctaattcgggaggaaaatcaaacagtggcaataaaaagaaagttaaattagactattccagaagagtagaaatttcacagttatttcgccgcaggattcaaagaaatctaattcagagagaaacacctcctactgagcatgagaagaaggaaactcatgaactattaaatagaatatatgagaattctgacaccaaacggcccttttttgatttgaaggccctgcgcgaaagcaaattacacaagctactgaaagcaattgttaatgatcctgacttaagcgaatttcacccactttgtaaagaaattttactgtcctgggcagacctaatcacagaactgaagaaagaaaagttgcaagcgctacctacgccttga

SEQ ID NO: 77829 - DNA, 615 bp, Saccharomyces pastorianus
atgaaactcaatgaacaaataccaaaagacctgttacgcctgataaaaagttccaagtacgttcatgtggcgacatgctcgtcaaattgtataccatctgtttcgttgatgcattacatatttgtttcatccgcggaaactttccataaacatgagtatagtatagaaatagattgtaataactatattatattcacagtgttcgagaaatcagtaacctttcgtaatgtcatgagcaacccaaacgttgcattgctatttcacgattggatcacagctaaaaatttaactcttcgaaaaaaaagcgtccatagtaaagatgatttttcatttgttgagtcagagtccacaaaatttaacaactttttacgagatttgaaccaaagtgaattgaatcaagtgagcgctactatcaatggtattgctgatattgtgaaccctaatagtgaagaatctacttattataggcggttgttattaacagtcaatccagacgcagatatttttatactaggagaagatacagccataataaaggtaaatatacaaaaaataaaagtctctgacatggaaaataatacttctacatacggccaaacagtacaaccagtttaa

SEQ ID NO: 77830 - DNA, 960 bp, Saccharomyces pastorianus
atgctaaaatccgtacagggactgtggaaagatttttttggaatacgagatgatggcaggaaacgagaatacgggtcccttgatgaagtgagaaaacgatctgccttaaggagcagaagaaagcagatgcgtcctacgggtaaaagcgttctaaaaagacctagaaaggtgacagataggaaaactgaagaaaaaattcgtagtaacaggaggaaaacacccaaacgaaggttaacaaagatattccagacaatcagagatgttttttccaatgataatgaaaatatgagcaagatgcaaaatgtttgtggcgacatgactagaattttgaagaagagatcccagggaagaccttcttatatggatacagatacagccaaatctaggatcctaaggagtgatgcctttaagagaaagatatcggagttgaaatacaataagcaacggatcagtgaactaagaggtggtagttctgacgggtcgagtggaaaagatagaaatcaatcattatacttagatagagaaattcttctacagcggcaaattaagaaaagagatgagaaaataaaagccttggaaaacaagctacaatcattacaagaagcattgaattactcaaatgagaagtacaggattttggaggatttactagattcttcaaacattgatccatcatacaccaaatctaggagaaccatgtctaatctagctagagaaaacgatgagattaagcccttgaaaattgatctttccccgtctccaataagaagaacgaattcattattcacttccagacccatgaaaacatataatcgggatggaaatataccagagatgcagccgttacaggaaaacatatctcccgcctgtcccactccaccctatcgttcaagggaaactgaaaaagaggatgaaacactttcaccaatctcagtggacttttcaagttatttatcttaa

SEQ ID NO: 77831 - DNA, 381 bp, Saccharomyces pastorianus
atgtcgccacaaacattttgcatcttgctcatattttcattatcattggaaaaaacatctctgattgtctggaatatctttgttaaccttcgtttgggtgttttcctcctgttactacgaattttttcttcagttttcctatctgtcacctttctaggtctttttagaacgcttttacccgtaggacgcatctgctttcttctgctccttaaggcagatcgttttctcacttcatcaagggacccgtattctcgtttcctgccatcatctcgtattccaaaaaaatctttccacagtccctgtacggattttagcatattaccaatgtctattattgtacctttctcttcagagtatctacttgttcatgttcagcaataa

SEQ ID NO: 77832 - DNA, 1185 bp, Saccharomyces pastorianus
atggattccacagcacttaaggtagctctaggctgtattgcaattcgtttggctgtgaacagcctttttccctctctacaacaacaactggaccagtctgtagaattctcaactcccgtaacttcatttaggtcactacaggaaggtatatacctactgcggaacaacatccaagtatataatcatggggttgttcaccatcctccaattttgattttttttctttccctctttaattccgacaggttaatttccctcatatacgctttaattgatggattaattgcgtatcagctgacagaggtaacaaaggctttcaaaaacttgaaactgaaagtttggctacctggacttctttatgccgtgaatcctttgacccttttatcgtgcattagtcggtcatcaatcatattcacaaattttgctatttcatcgtcattgtattgcatattagctgaagtaaacgttcttttgtcctctgttatgatttctatatctggatatttgtcagtataccctattctcctcttaattccgctattaggtatgctgaaaagttggaggcaaagaatattatctgccattgtttccatactatctttattaattctgctattattcagctacagtatattaggcagccaaagttggtcatttttgacacaggtttatgaatctattataacctttgagaaggtttttccaaatctgggtttgtggtggtacttcttcattgaaatgtttgacaccttcataccgttcttcaaggctgtattcaacatttttattgcagtattcattacaccatttactttgcgctatcataagcagccattctacgcattcattttatgcattgggtggattgtccttacaaagccatatccctcactaggtgacgctggttttttcttcagcttcctacctttcttcacgccactatttggatatttaagataccccatcatatcagcattactgtttttacacgcaattgttttggcgccaattttctatcatctttgggttgttttaggttcagggaatagtaattttttctatgctatttccctagtttatgctctggctatagcatctatattagttgacttgaactgggcgatgctgagaattgaatacgataacggtatcccaaatttcaaattgaaggtaacacaaatttaa

SEQ ID NO: 77833 - DNA, 1692 bp, Saccharomyces pastorianus
atgagattaagaaccgccattgccacactgtgcctcacggcttttacatctgcaacttcaaacaatagctacatcgccaccgaccaaacacaaaatgcctttaatgacactcacttttgtaaggtcgacaggaatgatcacgttagtcccagttgtaacgtaacattcaatgaattaaatgccataaatgagaacattagagatgatctttcggcgttattaaaatctgatttcttcaaatactttcggctggatttatacaagcaatgttcattttgggacgccaacgatggtctgtgcttaaaccgcgcttgctctgttgatgtcgtagaggactgggatacactgcctgagtactggcagcctgagatcttgggtagtttcaataatgatacaatgaaggaagcggatgatagcgatgacgaatgtaagttcttagatcaactatgtcaaaccagtaaaaaacctgtagatatcgaagacaccatcaactactgtgatgtaaatgactttaacggtaaaaacgccgttctgattgatttaacagcaaatccagaacgatttacaggttatggtggtaagcaagctggtcaaatttggtctactatctaccaagacaactgttttacaattggcgaaactggtgaatcgttggccaaagatgcattttatagacttgtatccggtttccatgcctctatcggtactcacttatcaaaggaatatttgaacacaaaaactggtaaatgggagcccaatctggatttgtttatggcaagaatcgggaactttcctgatagagtgacaaacatgtatttcaattatgctgttgtagctaaggctctttggaaaattcaaccatacttaccagaattttcattctgtgatctagtcaataaagaaatcaaaaacaaaatggataacgttatttcccagctggacacaaaaatttttaacgaagacttagtttttgccaacgacctaagtttgactttgaaggacgaattcagatctcgcttcaagaatgtcacgaagattatggattgtgtgcaatgtgatagatgtagattgtggggcaaaattcaaacaaccggttacgcaactgccttgaaaattttgtttgaaatcaacgacgctgatgaattcaccaaacaacatattgttggtaagttaaccaaatatgagttgattgcactattacaaactttcggtagattatctgaatctattgaatctgttaacatgttcgaaaaaatgtacgggaaaaggttaaacggttctgaaaacaggttaagctcattcttccaaaataacttcttcaacattttgaaggaggcaggcaagtcgattcgttacaccatagagaacatcaattccactaaagaaggaaagaaaaagactaacaattctcaatcacatgtatttgatgatttaaaaatgcccaaagcagaaatagttccaaggccctctaacggtacagtaaataaatggaagaaagcttggaatactgaagttaacaacgttttagaagcattcagatttatttatagaagctatttggatttacccaggaacatctgggaattatctttgatgaaggtatacaaattttggaataaattcatcggtgttgctgattacgttagtgaggagacacgagagcctatttcctataagctagatatacaataa

SEQ ID NO: 77834 - DNA, 213 bp, Saccharomyces pastorianus
atgtccaaatacgcttggtataccagagttacagatacattacatcgtttaacggtactgacgttggttggtggtacgttatacatgtcgggtggcttagcttacactttatacatgaacggtaagaagtacgaacaacaagtgacccaacaaaaggcacttgaagaagacaaccaacaactgcaaagtcctactgcacctcctaccgagtaa

SEQ ID NO: 77835 - DNA, 1542 bp, Saccharomyces pastorianus
atgaagcaattcaagttggttaatgcggtttccgcatcatttgtgcttattggcttagtgttggccaattcagattcagtgttcgacaagtggacgcaggaagacctggccgattatttacgtgataataagaagagcttggaaaagtacgctacagactccattgaggacttgaaaaaggaggcatcgcaggtatgggacaaacacgcgcagcccaaaccatggtggcaggtgtggtctagtgacagcagtagcgtgagcaacagtaactccggatggtttggttatactggttcttcggatcacccagtttctgactggctctttgacacctggtccacagacagtctacgtaacttcttgaagaaaaatggcgtggatgttgacgacgctaaggcttccaaggactcgctggtgaagactgctaaggagaacttcaacaagatttccaaatctttgaagtcgtcgggatactatccttctagctcttactttgatagctggtcaaccaaagatttgcaaaactggttgaatgacaatggtatcgactacgacaaggcagttcaaagcaaggacgagctagttcagaaagtcaaggaaaacatctaccgaacttcagaaaaggcagaacagcagcgtctgggtttgctagaaagcttggatttggctcaccaacaaatattagacacatcgggacaaataaaagacactgtatttgacaagtggtctagtgatcagttaaccaattggttggagagccacaaggtcaatattgacaagaacatggccaagaaacacgactatttggttagaatggccaaagaaaattctgccaatttgaaagatgatatctactggtacctggactatatgaaaagagaatcttctccatttttgaccaagaccccagaatacgttggttccgtttgggactcttctaaaaatttcctcacaaatttgtactccaagttcagaggtaagactgacaatgtgatcaatgatacttttttggttggcctagactcttggccaaaggacaaattgaaaatgtttttagatgctcgtggtattaagtactcaatgctgtctactgaacatcaattgagagaattagtcaaaaaatccagaaacgaaaaactcaagatcctgccaaaagactaccaaaaatactttgacaacagtaactggtctttggatgacataaagagttggtttgctgacaaaaaggacgacttccaagattctcagacttactccacaattatgcaggattttgacaaggtttccaaaaacacaaatgatgctaaggaccaaatcgctaagacctggtcaaatacctttcagagctggtctcaagaagacctattgcagtacctaaaatcattcggtgttccggttaaacagacttctacgaaggacgacttaatcaacttggccaagcagaatacgcaatggttgttcggcactgttaaggagcctgcttacaagaggtacctacataacgttaaaaactggtcgaaaagcatattagggttcaactaa

SEQ ID NO: 77836 - DNA, 1746 bp, Saccharomyces pastorianus
atgaactcgttagcttcaaacacaccgctaaatggtactccagtaagcgaggcacccgccacaagctccgagcctgtgaacatgttcgagacaatggtggctaaccctattaaagtgtctcgattacagtctaatggagttctgacgggacctgcagccaatactaagtccatccactattcgctggccaattttaatgtgttccagtcgctacccaaggaaacggccagaggtgtagacgatttgacgaggatggagatggcgttactgagtgggataccggaggagattaagtggtctttaaaaaaatatcttacgtatagtaacaaggcgccatatatgatcagcttacggacattgccggacctgttgccacttttcaagactttcatattgcctttggagcgcatcgtggaaggtcttaacaaatcgtctatatgtgattcaaaggcgatggattctctacaaatgggtctaaatgccttgctgatcctaaggaatctggctcaagatactgattcggtgcagatactagtcaaggatcgagaaatcaaatctttcattcttttcattttgaagaagtttcagtgcgtcgctacaggcgataacaagtggcaattgtacgagggaaatgcaactttttttaacgagttgacccattatactctggacttgatggaggccatttcgtcctatattgctcctgcaatgaaggatgatcattatttccaaacgctggtgtccattttgaactacactaaggacagatacatggttatttctatattgaggtctctttcaagattactggttaggtccaaagctaacgaggaaagtgcagcggacaatttggaccataagactctttcgttgatcgtttcctttttactggtagaatgcgatagtgagctgattattgcttcgttggatttcctctatcaatacattttgcccggttctcaaagaatcactgagttattcaagagtaaggagtgctctttgatactggaagccacgctgcctaatttattatcatataatatcgccacaccagattaccatcttttgcaaaagcacaaaattaggttaattaaaaggttgaagcctcccgctccaaaggagcctcccaatttatctgaggatctgtttcaacaacttttcaaacttaacgagcccttgaggtcaaccgcttggttgagatgttgctttgagcctgtacaagaagcagaatttacacaaatatcgctttggagatcctacgaatccaaatttggtcagcctgttcgcgaatccggacgcaaattgttacctgccgtggaattcatcaagaatgtctcgaatgctttcaataacgccgctgctatcgtaatcactgacccggtaaccggcaagaaaaggtttgttatcaagggcattcaaccaagatttaaagctttgggtattgcagacggggaaagagaatcccaggtacccatttcggcattaaaatccaaatttttgaatgactctaaggaaattacacctgcaagacaaaacagcataccagaggtcaaattccctcaagaactctcagatgtttctaaagtggcctgtacgtttttgtgccttttatccaacgacacggatgatggtgctggttccgcattttgtcaacgcatcaggccactggttttacataaattggctgatattccacctttaacattagcattgtctgaatacatggaaaacacgtcggggttatga

SEQ ID NO: 77837 - DNA, 1476 bp, Saccharomyces pastorianus
atgaaactctcaactaaactttgttggtgtggtattaaaggaagacttaggccgcaaaagcaacaacaattacacaatacaaacttgcaaatgactgaactaaaaaaacaaaagaccgctgaacaaaaaaccagacctcaaaatgtcggtattaaaggtatccaaatttacatcccaactcaatgtgtcaaccaatctgagctagagaaatttgatggcgtttctcaaggtaaatacacaattggtctgggccaaaccaacatgtcttttgtcaatgacagagaagatatctactcgatgtccctaactgttttgtctaagttgatcaagagttacaacatcgacaccaacaaaattggtagattagaagtcggtactgaaactctgattgacaagtccaagtctgtcaagtctgtcttgatgcaattgtttggtgaaaacactgacgtcgaaggtattgacacgcttaatgcctgttacggtggtaccaacgcgttgttcaactctttgaactggattgaatctaacgcatgggatggtagagacgccattgtagtttgcggtgatattgccatctacgataagggtgccgcaagaccaaccggtggtgccggtactgttgctatgtggatcggtcctgatgctccaattgtatttgactctgtaagagcttcttacatggaacacgcctacgatttttacaagccagatttcaccagcgaatatccttacgtcgatggtcatttttcattaacttgttacgtcaaggctcttgatcaagtttacaagagttattccaagaaggctatttctaaagggttggttagcgatcccgctggttcggatgctttgaacgttttgaaatatttcgactacaacgttttccatgttccaacctgtaaattggtcacaaaatcatacggtagattactatataacgatttcagagccaatcctcaattgttcccagaagttgacgccgaattagctactcgcgattatgacgaatctttaaccgataagaacattgaaaaaacttttgttaatgttgctaagccattccacaaagagagagttgcccaatctttgattgttccaacaaacacaggtaacatgtacaccgcatctgtttatgccgcctttgcatctctattaaactatgttggatctgacgacttacaaggcaagcgtgttggtttattttcttacggttccggtttagctgcatctctatattcttgcaaaattgttggtgacgtccaacatattatcaaggaattagatattactaacaaattagccaagagaatcaccgaaactccaaaggattacgaagctgccatcgaattgagagaaaatgcccatttgaagaagaacttcaaacctcaaggttccattgagcatttgcaaagtggtgtttactacttgaccaacatcgatgacaaatttagaagatcttacgatgttaaaaaataa

SEQ ID NO: 77838 - DNA, 939 bp, Saccharomyces pastorianus
atgtcaaaagaagacatagaaggaactaacattctagacgaacctgtccacgggatctatattcctgccgcgctattcgttgttggtgttgcgatcaccacgtatatgtctggtgaattgaaaatcctgtggagtttacccatcctcttcataatcatcttcgtcagaacatacaccgcctacaaaagaagaagatcactgtacccagacaggtggactgctttagaattggaagaccaaaccattatttccaagaatactgctctgtaccgtttcaagttgaagacaaggttggaaagcttggacatccccgctggtcatcatattgccgtacgcgttccaattgacggcaaagaagaggtgaggtattacaatccgattagctctaagttggaaagcgggtatttagatttagtggtaaaagcttacgctgatggtaaagtctctaaatattttgccggcttaaatcccggtgacaccgtggattttaaggggccaataggtactttgaactacgaaccaaactcctccaagcacttaggcattgtagccggtggttccggtatcacaccagttctgcagatcttgaatgaagtcataaccgttcctgaagatttaacgaaagtctccctgctatatgccaatgagactgaaaatgacattctattgaaggacgaactggatgagatggccgaaaaatacccacatttccaggtccattacgtggtacactatccatccgacagatggaccggagatgtcggctacatcaccaaggaccagatgaacaggtatctgccggaatattcggaggataacagactcttgatctgtggacctgatggaatgaacaacttggcccttcaatacgctaaagaactgggctggaaggtcaattcaacgagaagttctggcgacgatcaagtcttcgtcttttaa

SEQ ID NO: 77839 - DNA, 1764 bp, Saccharomyces pastorianus
atgagttccgtcaataaagatactattcatgttgctgaaagaagtcttcataaagaacaccttaccgaaggtggtaacatggccttccacaaccatttgaatgattttgctcatattgaagatcctctggaaagaagaagattggctttggagtccatcgataacgaaggtttcggttggcaacaagttaagaccatctccattgctggtgttggtttcttgacagattcttatgatatttttgccattaatttgggtatcactatgatgtcctacgtttactggcacggtagtatgccaggtccaagtcaaaccttgttgaaggtttccacttctgttggtactgttattggtcaatttggttttggtactttagctgatattgttggtcgtaagagaatttatggtatggaacttattatcatgattgtctgtaccattctgcaaaccactgttgctcattctcctgctattaacttcgttgctgttttaacattctaccgtatcgtcatgggtattggtatcggtggtgactacccactatcttctattattacttctgaatttgccactaccaaatggagaggtgccatcatgggtgctgtctttgctaaccaagcttggggtcaaatctccggtggtatcatcgctcttatcttggttgctgcttacaagggcgaactagaatacgcaaactctggtgctgaatgtgatgctagatgtcaaaaggcttgtgaccaaatgtggagaatccttattgggttgggtaccgttccagggttggcatgtttgtatttcagattaactattccagaatctcctagatatcaattggatgttaacgctaagttggaacttgctgctgccgcacaagaacaagatggcgaaaagaaaattcacgacaccagtgatgaagacatggcaattaacggtttggaaagagcttctactgccgtcgaatctcttgacaatcatcctccaaaggcttcgttcaaagatttctgcagacattttggtcaatggaagtacggtaagattttgctaggtactgctggttcatggtttaccttagatgttgctttctacgggttgagtttaaacagtgctgttattctgcaaaccatcggttatgccggttccaaaaacgtttacaagaaactgtatgatactgctgtcggtaatctgattttgatttgtgctggttcattacctggttactgggtatccgtcttcaccgtcgatataatcggtagaaaaccaattcaattagccggtttcatcatcttgaccgctttgttctgtgtcatcggtttcgcataccataaacttggtgaccatggtctgttggctctttacgtcatttgtcaattcttccaaaacttcggtccaaacacaaccacctttattgttcctggtgagtgtttcccaactcgttacagatctactgctcatggtatttctgctgcatctggtaaggtcggtgccattattgcacaaaccgctttgggtactctaatcgaccataactgtgctagagacggtaagccaaccaactgttggttacctcacgtcatggaaattttcgccttattcatgttgttgggtatcttcacaaccttgttgatcccagaaactaagagaaagactctagaagaaattaacgagcaataccacgatgaaatcgatcctgctaccctaaacttcagaaacaagaataatgacattgaatcttccagcccatctcaacttcaacatgaagcataa

SEQ ID NO: 77840 - DNA, 381 bp, Saccharomyces pastorianus
atgccaagaaatgacagcaatcagtattacgcacgttggtgctgttataggcgccctatacgtgcagcatttgctcgtaagggccctttcaactcatctagcggctatgaagaaaatgttgcccggctgaaaaacacccgttcctctcactgccacaccgcccgatgccaatttaatagttccacgtggacgtgttatttccagcacgtggggcggaaattagcgacggcaattgattatggttcgccgcagtccatcgaaatcagtgagatcggtgcagttatgcaccaaatgtcgtgtgaaaggctttccttatccctcttctcccgttttgcctgcttattagctagattaaaaacgtgcgtattactcattaattaa

SEQ ID NO: 77841 - DNA, 933 bp, Saccharomyces pastorianus
atgtcgtcaaataataggaagaaactgcttctgatgggccggtccggctccggtaaatcgtcaatgaggtcgatcatctttagtaactactccgcttttgacactagaagattgggtgccaccattgatgtagagcactcccatttgagatttcttgggaatatgactctaaatctgtgggactgtggtgggcaggacgtgtttatggagaattatttcaccaagcaaaaagaccacattttccagatggtgcaggtgttaattcacgtttttgatgtagagtcaactgaagttctcaaggatattgaaatatttgcaaaagctttgaagcaattaaggaagtattctcccgacgccaaaatttttgttcttctgcataagatggatcttgttcagttggataagagagaggagctgttccaaatcatgatgaaaaacctgagtgaaacgtcttcggaatttgggtttcccaatctgataggttttcctacttcgatttgggatgagagtttatacaaggcatggtcgcagattgtatgctcgctaatacccaatatgtccaaccatcaaagtaatttgaagaagtttaaggagattatgaacgcccttgaaattattcttttcgaaagaacaactttcttagtgatatgctccagtaatggcgaaaatagtaatgaaaatcatgatagttcggataataataatgtcttgctagacccgaagcgattcgaaaagatatccaatataatgaaaaacttcaagcagagttgcacgaaattgaagagcggattcaagactttaatattgaacaacaacatctacgtcagcgagttatcgtccaatatggtgtgttttatagtgttgaaagatatgaatattccacaagaattagtattggaaaacatcaaaaaagccaaagagtttttccaatga

SEQ ID NO: 77842 - DNA, 1542 bp, Saccharomyces pastorianus
atgctatcgaagaatttgtatagtaacaggaggttgctcacctcgacgaatacgctagtcagattcgcttccaccagatccacaggagtggaaaactccggagcaggtcctacatcttttaagaccatgaaagtcattgaccctcagcacagcgacaaaccaaacgtgctgatactgggttcggggtggggtgctatttcgtttttaaagcacattgacaccaagaagtacaacgtttccatcatctctcctagaagctatttcttatttacgcctttgttaccttctgcaccagttgggacagtagacgaaaagtcaattattgagcccatcgttaattttgctctcaagaaaaaggggaacgttacctactatgaggcagaagccacctctatcaatcccgacaggaataccgttaccataaaatcattatctgccgttagccagctataccaacctgaaaaccatctagggctgcatcaagcagaacctgctgaaattaagtacgattatttaatcagtgctgtaggtgcggaacctaacacatttggtattcctggggtcactgattacggtcatttcctgaaggaaattcccaactctttggaaataagaagaacttttgccgccaatctagaaaaggctaacttattgccaaagggtgatcccgaaagaagaagactactgtccattgtcgtggttggtggtgggcctactggtgtagaggccgctggtgaactacaggattatgttcaccaggacctgagaaagtttctccctgcattggccgaagaagtccaaattcacttggtcgaagctctgcccatcgttttgaatatgtttgagaaaaagctttcatcatacgcgcaatcacatttagaaaacacttcgatcaaagtacatctgagaacggctgtcgccaaagttgaagaaaagcaattgttggcaaagacgaaacacgaagacggtaaaataaccgaagaaactattccatacggtactttgatttgggccacgggtaacaaggcaagaccggtaatcacagaccttttcaagaaaattcctgagcaaaactcgtccaagagaggattggcagtgaatgactttttgcaagtgaaaggcagcaacaacattttcgccattggtgacaatgcatttgctgggttgccaccaaccgcccaagtagcgcaccaagaggccgaatatttggccaagaattttgataaaatggctcaaataccaaatttccaaaagaatctatcttcaagaaaggataaaattgatctcttgttcgaggagaacaactttaaacctttcaaatacaacgatttaggtgccttagcatacctgggatccgaaagggccattgcaaccatacgttccggtaagagaacattttacaccggtggtggcttaatgaccttctacttatggagaattttgtacttgtccatgattctatctgcaaggtcgagattaaaggtctttttcgactggattaaattagcatttttcaaaagagacttttttaaaggattatag

SEQ ID NO: 77843 - DNA, 1074 bp, Saccharomyces pastorianus
atgagcccaagtccatcagtgtcgccaagaaggacgctcaataacaaatcatcttacatcaataacagcggtgggctggtcctgcctcctacgcagtttaatttgaatcagcagccagtcctgagcttccaacaaaaagcgactttcgattccaaccagcagtttttctattatccagagtcacccacaaaaaccctgagaccaaggtttaacagtgtttcgcaggttaataaaggagttaatgaagaccattataccgggggcggtagcagtaataataacaggccatctagatatacaaataccatgggcgctgcaaacaccaatgtaaattcccatccgcatcatcagtcggtgtcgcatttaaattctaaatctcttaaattcaatcaaacgaaggaagtgagcagcataaatgaaattatttttccttccagaacgtgtacaaagaaacggtattttaccaagccaattgatttgtatggtacaagaagtagcattagtgtggcacctaagttgacgaattctcccacgaaatcaaaagcaaacttcaacatcaagaagtgcatcttacctaggtccgtcgttaccacatataaattaccatctccagtgcacgaaacgatagacgatatatccaaaaaaatcataatcctgctaatttcgttgaagtttgagaaaaactatcacttcttgcaacctattcaattgtccacaaatagtaagacacggatctcaaaatcactagacgaattatgcggagtgcagctgacatcaacgttacggcaacaaaagcagctgcaaggtaacagcaagcccgtaaagaatctccctaattccaacgcgaagcagagagccggggccagtgtttccacaaatgccaacgaaagctttgaattgagttttgatggaaaggcaatggatagatctgatatatttcgaatggtagattcttttagcatcgccatttcagatgaagatgaggaagatgaggaggaggatagctttcagcagagaagtgcgaacaacagaatcctccctgcggagatactaagtaatgaacctttgaaatga

SEQ ID NO: 77844 - DNA, 3405 bp, Saccharomyces pastorianus
atgtcaaattccaattcaaaaaaacctgttgcgaattacgcataccgtcaacagcaagattataatgggatgaacgccatggtgggaaatccaatgatgtatcatcctgttgatttcgtaaacggtgccggccaatatggtccttctcaacacccagcatattacaccaactcaccattacctaatattccaccaacaccttttgatactgcatacggtgccagtcttttgccatctcacctattgatgggatctccatttgtttcctcgcctaacatgcaaagtggctataattctgcaagatcatctaatctcaaaagaaaggcttattcgaggcccgtttctaatcataacggttacaacggaaacagtaacagtaaccaaaacaatactaataacggaatggcaacaccctcgaactattatagagtggggagaaattctttctcgaggaacaacaacagtacgaggaatgttactcacaacaacaataaggggtgcgacacccggaacaacagtggaagaagaacattcacaaggaataacattttcgacgacataaatccagaaatgcttttacaaagacccttttgtattaattacaaggttctaccgactggtgatgatgcttatagaactaggtcgctgcttattgaaaatgtggatcattctattgatttacactctatagtcaaaaattttgtcaaatccaatactctggaaagtgcctacttaattgaaggagggaagagcgatgattcaaaagatgtagagactaaaaatctatccattctaataagctttctaaccaaaggcgactgtttgaacttttacaataacattttacaaaggttatctgaattcaaaacatttttgaaatctgaagcactaaatctgaaatttgtttgtctaaactatgatcccaaatgcctccctacctttattgagagtgaagcgttaacagaaaacgctgaagaagccgacattaccaatggttcaacaatgatcagtgcttcgctgcatcataatatagcgaacaaagatgctacaaggtcgattataattgaattcaaaagccccgtggagaaaagcgatttattcaaaaagaaattacaatttttggacaggtcaaaaaacaaaagatacattttggaatctatcgatttagtgaacacagatgtaccttccaatcaatttcctgaaaattacgccgttttaacctttttgaatatctctatggctattgaagttctcgattatttgaaaaaatactccaaaaacttaggcatttctaaatgtttttacgtatccctagccccgttggtagttagctcagccagatcttcggttgctaatatttacgagggtaaaacgagcacacatcgtttatcggtgccttctgttactgctgggaacaataacgatagcaacaacaacggaaacaataataaaagtaatatgagtggtatcaccacactcaataataatagtagtattggtgtttccgtatacggtcactctaatatgagtttaaccagtctgtcatcatctgcatctttaaatgaagagattgatatgcttgcgacgaaacttcaaggggtagaacttgatgggacttatttagaaatcaactatcgcgactatcaaacaccaactattgaagaacactctactcacttgagcaatgtcaaaatttcaaagacaacagaaaactctaggcaattttctcaagatatcccatcacctttgccattaaatgaacatatgtttatgaatgattctaatcagtccaatggagcgataatacctcaacagttaatagccacaccttctccggtatcccccaatttgcaaatgaatcaaagggtgttgccgaatccaataactcaaagtttggagcaaaatttcaacgtttcggccaaagtggcatcatccatgggttcagacataggcaatagaacaatttatataggaaacattaatccaagatcaaaggcggaggatatctgtaatgtcgtgcgtggaggaatccttcagagcattaagtacataccggagaagaagatatgctttgttactttcatcgaagctccatccgctgtacagttctatgcaaattcatttattgatccaatagtgttacatgggaatatgttgagagttggatgggggcattattctggtccattaccgaaatcaatctcgttggctgttacgatcggggcaagtaggaatgtctacgtaagcctaccagagtttgcatttaaggaaaagtttattcacgaccctcagtacaaaaaattgcatgaaacactatctttaccagatgcggaacaactaagagaggactttagtacctatggtgatattgagcagattaactatttgagtgatagccattgctgttggataaatttcatgaatatatcttctgcgattagtcttgttgaagaaatgaataaggaatccacagtacaaaatgaatccggtgaagtgacgcttaaaagggcgactgaggaaaaattcggtggccgttataagggccttctgataaactacggcaaagatcgttgtggcaatataaacaaaaatttgatagcaggtaaaaattcaagattctataagaaagttaaaagaccgagctataatatacgtttgagtaagttggaagaaaagaggaggcagaatgaaatcgatgaaaaggaaaaggcttttgataaacccttgaacttggaatccctaggaattagtctggacgcacataaggacaacggcggtggtgaaacaggaactgcaaataatactgggcacgaaaatgaaagtgaactagaggctgaaaatgaaaacggtaatgagactggaagtttcggtggactgggtctcgctgtggcgagctctgacgtcaaacgtgcgacatcggatgaaactgattatgaagatatatttaacaagtcatcgggatcttccgactcgtcatcagacgtcgaggtcattatgcactccccgagcgatcctgaatacgctttaaaatcacaaactctaagaagctcgagtcagaccgtcattaatagtaagagaccagtaaagatagaagacgaggaagaagccgtaggaatgtcacagctcaattataggtcgtcattaagacaagctcctccaagagctccctcaactttgtcatataatcactcgaagaacaacgaaacgccaatgcaagatattctcacaaatggcgaaacagcaaataacagaaagaagaagagaggatcttttccaaggcatagaacgataccaggatctgacgtcatggcccaataccttgcacaagtgcaacattcgacatttatgtatgcagccaatattttgggtgcctctgcggaagacaacacgcatcctgacgagtaa

SEQ ID NO: 77845 - DNA, 303 bp, Saccharomyces pastorianus
atggcgaaacagcaaataacagaaagaagaagagaggatcttttccaaggcatagaacgataccaggatctgacgtcatggcccaataccttgcacaagtgcaacattcgacatttatgtatgcagccaatattttgggtgcctctgcggaagacaacacgcatcctgacgagtaatatagctgtgctgagcctgaagtataatgcatatccatcggactatttagacaaagcccaaggaagcctaaggcggcctgccaaggtgtttctccctttttttctccgatttctttgtataaactaa

SEQ ID NO: 77846 - DNA, 1629 bp, Saccharomyces pastorianus
atgggcaatcagtcattagttgtgcttacggaaagtaagggtgagtatgagaatgagacagaactacctgttaaaaaatcgtcacgagataataatatcggagaatctttaacagcaacagcttttacgcagtctgaagatgaaatggtagatagcaatcagaaatggcagaacccaaactattttaaatatgcatggcaagaatatctttttatattcacatgcatgataagtcagcttctaaatcaagcaggcactacacagactctttcgatcatgaatattctttcggacagttttggctcagaaggaaactcaaagtcatggctgatggcatcttttccgctagtttcaggctcatttattttgattagtggcagactaggtgacatatacggattaaaaaaaatgttgttagtaggatatgttctggttattatatggtctttgatttgtgggattaccaagtattctggtagcgatactttttttattattagtagagccttccaagggctagggattgcatttgttttacctaatgtgctgggaataattggtaatatatatgtaggtggtacttttcgtaaaaacatcgtgattagttttgttggtgcgatggcccctattggagcaactttaggttgtctttttgcaggactgatcggtaccgaggacccaaaacaatggccatgggcattctacgcgtatagcatagccgctttcattaattttgtgctctccatatatgccattccgagtactataccaacaaatattcatcatttttctatggattggattggttctgttttgggcgtgataggtctcattttattaaattttgtgtggaaccaagctcctatatcgggttggaaccaggcttacatcatcgtaattttaatcatttctgtgatttttcttgtcgttttcatcatttatgagattcgatttgccaagactccactattgccgcgcgcagttataaaggatcgtcatatgattcaaattatgctggctttattctttggatggggctcttttggcatcttcacgttttattatttccaatttcaattaaatataaggcagtacacggcattatgggctggtggaacttactttatgtttttaatttggggtattattgccgccttactggtaggatttactatcaagaatgtgtctccatcagtgtttttgttcttttctatggtagcattcaatgtgggctcaataatggcaagcgttacaccggttcacgagacatactttcgtactcagttaggaacgatgataattttaagttttgggatggatctttcatttcctgcttcttccattatctttagtgataatttaccgatggagtaccaaggcatggctgggtcattggtgaatactgttgtcaattactccatgtccttgtgtctcggtatgggtgccacagtagagacacaggtcaattcagacggaaagcatcttttgaaaggctatagaggtgctcagtaccttgggataggattggcaagtttagcatgcatgattagcgggctttacatggtcgaaagcttcataaaagaccgcagggcaagagctgctgcagaatacgattgcactgtggcttag

SEQ ID NO: 77847 - DNA, 1608 bp, Saccharomyces pastorianus
atgggcatgttttttaatttaaggtcaaatataaagaagaaagccatggacaatggactaagcctgcccatttcaaggaacggtagctcgaacaacatcaaggacaaacgctcagagcataactccaactcattaaagggcaaatacaggtaccagccgcgctccacaccgtctaaattccagcttacggtgagtatcacatctcttattattatcgccgttctgtcgttatatctctttatatcatttctctccggaatgggcattggtgtatccacgcaaaatggtaggtcgttgttgggttcctcaaaatcctccgaaaattacaagactatcgacctagaagatgaagaatattacgactatgattttgaggatatcgatcctgaagtgatttcaaaatttgatgatggtgtgcaacattatctaatatcacaatttggttcagaagtgttgactcccaaggatgatgaaaaataccaaagggaactcaacatgctttttgattccactgttgaggagtacgacctgtcgaattttgaaggtgctccgaatggattggaaacacgtgatcacattcttttatgcattccactaagaaacgctgcggatgtattgccattaatgttcaagcatttaatgaacctaacctatccacacgagctgattgatctggcctttttagtcagtgattgctcagaaggtgacactacgttggatgctttaatagcgtattctaggcaattacaaaatggcacgttgtctcagatttttcaagagattgacgctgtcattgattcgcaaacaaaaggcaccgataaattatatcttaaatatatggacgaaggttatatcaaccgtgtccaccaggcattttcaccaccattccatgaaaattatgacaagccatttagatcagtacaaattttccaaaaggattttggccaagtaattggacaaggttttagtgacagacatgccgttaaggttcaaggtataagacgaaaactaatggggagggcaagaaattggttaactgccaatgctttgaaaccttaccactcatgggtttattggagagatgctgatgtagagctgtgccctggttcagtcattcaagatttgatgagcaaaaactacgatgttatcgtccctaacgtttggagaccactacctacatttttgggaactgaacaaccatatgatttgaattcttggatggaatctcaggaggcactagcattggcaaagactcttgacgaagatgatgttattgtagaaggttatgcagaatatcctacgtggagggttcacttagcctatatcagagatgcagaaggtgatccaaatgaagcggtagacttggacggtgtagggggagtttctatcttggcgaaggccaaaatatttagaaacggtgtacagtttcctgcatttacttttgaaaatcatgcagaaacagaagcatttggtaaaatggcaaagaaaatggggtacagggttggtggtttaccgcattatactatttggcatatttatgaaccgagcgatgacgatttgaaggaaattgcgtcaagggaaagagagaagagaagacaatcagagtaa

SEQ ID NO: 77848 - DNA, 1533 bp, Saccharomyces pastorianus
atgacttccaaaacgtcagaaagtggtaccggtacccaaagtaccatagttcagctgaggaacctaccggatttgacggaaattagtcacttggaaatagatgctcccgtagttgaaattctaaagaaaacagtacttttccagttgaattcgttgaacatctgcatttcaaactttgcattggatgagctggtcaacctcgtgaccgtccaaatggacggcatgtttcggaacctgcacaatttaacacttttacaaagaaggtcgcaagcttctcaagcagatttgaaattgttgcttcgagagtttaacctggatgcgccctccctttatcagcagtttcaggcctcagaattcatcaaatcgaagcattccacggaatatgaaaaattgatgagctggtcgtctctcgctgctttaccgcataacgaagaagatgaagaggacgaattgaataatatcgaggagcaacagaacgagatcaacgttttgctgcctccctctaacccactggaaaaacagataccgagttggctgcccaactttccgcctgaccatacctataagtttacacctgagttcaaccatccaattactgatctaaaaaccatcaagaaagaaatagtaaaagaaagccaagagtctgaaaaggcactattgaacttgaacaaaagtctctcccacatatcatcagcgtcaaataccccgcaaccgccgggtttagacgatgaggacgctattgagcaacaattggagatttggggcaacgcgctggaagaaaggaaaccaaccataactgaaaagtccttcaatgaaaacaatatcgagcagtatgcgaagtatagagtggaattggcgagagaacgtgtcacgaaatttgaagtgaatcagttgaaaagaacaaaaaatccattcttgaaaatttctgaaactctctaccttccagagagtcctcaccagtctcacaaaaccatacaaaaaaacatagaattgcaatttcgtaagtctatgacactattcatgcacaatttacctaaggtccagaagttgaagaaggaaaaaatacgaatggccaaggaagaaagagcaaaatcgctaaaacgtcggcaagaagagcttatttcacaacgaacaaagagggaacaagatgaaggccatgatcttgagcttctactaaataacgagcacgcaagggacgctgcagacgacacgaccacccctaatgcattaaacaactctaccatagttatcaacacaaacgccgaggatgaggacgatgacataaacttatttggcatcttagggagcagtgaagatgagaatgaaatgtcgagtatgcctgcggagaacctggtcgcggaatcggaaccgccaacaatgacagcgcaagatactacaaatactacacctgtagcacataacacaaccaatatcgatgctactacaagccactctcctcattcgacgcctaatgaaaacgccccgacatctcctcctgcagatatagccacagatcacgatataactatgtaa

SEQ ID NO: 77849 - DNA, 738 bp, Saccharomyces pastorianus
atggcgaaaactttggcacaaggaaggaaacctggaagcggcagaaagcccggaaaagggaagacgttgagagagggaagaaagcctggcagtggtaggaggaggaggcaaggtactgggggtaaagagaccgacgggtctcagcaagatcaggagtcgcgtcttattagttccagggatatggaagctgtggacgcactgagagagttgacgcacagcccgtcgtctcactcagctcataactcatcagcagcaccaccgccgcatgcagcagcggcgtcaacttcattgcctccatctctggattatacccatcagtcattcatggatcaacaacaacaacagcagcagcaacaactactacagcaacagagagtggacgtcgttccgcccaagccgtttatcacccacaagatcctgttatcttcaacgggaaactctggcggccatgtgaattcaaattacaacgccgaccacagcattaatcataattcaaaccacaaccttaacagcaacgtgaacgtgaacatgaactttactataaatgggagcaatcaagacccatcatcttctttcctgatggggccctacaactacttacagcggcctttcattgtgaaaccatatcttgatctgtccacaagcacagcagcatcaaatcagccacggacgcaaccatcgccggcagcacatatcactaagaattccgattctacagagaaaaacgcaaccatatga

SEQ ID NO: 77850 - DNA, 2763 bp, Saccharomyces pastorianus
atgacttttacattctccacttcatcaaggaaaaatgggagacctcctttaaaatcagtttctacggaagataacattcatctattgaggaagcggcgtcaacagcagctgtcaagtaattctacagataattcgctgcatccaagtagtgggcagactccacgtgcaagtgacagccaggacgatgacatacgcagcgcttcaacaaccaatttagaccgtttacgacaagaacgagaggaaaattcactggaaatggactgcacacagtcaagattatctcatagagcaaatatgctagtggatgtcctaccatcttttgagatgtataatgccttgcacagacacatacctcaaggaaacgttgatcccgatagacatgatttccctccttcttatcaagaagttcgcactcaaagaatgactatattgcccagcaatgataattccgtggaaaggtcacaattgacagcagtgccaggatccgaaaacgcatgtaataatacgactgcccattctcttaccaacctacatcctctacaaacacaacatcttacaataaacagtacaagaagtggtggacagtcgctccattcttcatcagacaccaatatcagtcaaataccgttcgaagatgatctaaacgactcggataacatttttatagacaagttatacaccttacccaagttatccactcctatcgaaattgatataagaataacgaaaactgcatcaatacctcatgagcgtcctgaggaacagtcaatattgaaggaatacacctcgggtgatattattcatggttattgtttaattgaaaatcggtcctctcaacccctgaaatttgaaatgttttatgtcactttggaagcgtacatatctgtaattgaccgtcagaaagggaaaagaacgttaaagagatttttaagaatggtcgatttgagcgcatcttggtcttatacaaacataaccccaagtacgggtattaatattgtccccggtgaaagggattttgacgatgccatcatttgtctttcaaacagcagagaattgaagccgaacacaaagtataagaaattcttcatgttcaagcttcctacacagttattggacgtgacttgcaaacaagagcaattctcacactgccttctgcctcccagctttggtatcgacaagtataaaaataattgtaaatactctggcataaaagtaaatagtgtccttggctgtgggcatttaggtacaaaaggttcacccattctgacacttgacatggcagatgataatttatcaataaattatacaattgatgccaaaattgtcggtaaagataaaagaacatctaagctgaatattatgaaagaaaaagaatacaacctgagagttatgcccttcccttttgctggtgtcactaatcaacaaaacgagaaaacatgtttgagacaactcaaaaatttggaaagcttgattgaagatagatttgaagctttgaacaagattttcaagaaactggaattaaatgaggccatttcgaatgtagatattcatgacacagatataagcgggactttggacggtaatgaagatttggattccgatgagatattaagacgtaagctagatcaactgcacatcaataacaggattgatgataccgccagccaatcaccatcctatgactccaaaaatatggctccaaaggaaaacctagtcgagactgagttacgctataagtttaaaaataagaataaatcaaattcaagtttattttctcattttttgagttcatcagaaacggggtcatcttcaactggtccacatgtatataattccggattgattgtattatcagttaaaaaaccgcaatctgcattaccttattggtcaccatcattgttgagaaaaaccaacaaatttgaagcaaagagtgaacaagagaaggaaaactggcaaaggttaatgggcatgcttccagaaggagtgaaaaccccactgaccaagttagatgtacatttgacttgtatccaatctaataatagtgcaggacataagccgccagaaataagctctgtaacgacagaatttgtggtcatcacagcaaagtctgataattcgattcctatcaaattctgcactgaactgttgatgaatgagaatagattaaacaaactaaagacaaaatttttgacgtatcagaaaaaagttcatgaatatcgtaaaaaatttgaagaaaaccatgcgaagctaaacgagctttataatagaaatagagatcatttcactccaaaagagcttttgttcacaaatttcatatctgatcaaataaacaatgatattgacagtttagctggattaaaagttaacattattgatttacatgatatcttcaaaaagcaaatacatacttttgaagaagaaaacgaggatattatttcgaagaaaggaagttccaatcctccttccgcgtcatccagtaataataatttcttacaagcaacatttagcaatggtgcatccaccgctactaagtttactcagcaaattgtgcatgaatgggaaaaagttaagccattacagtataagagggatgttacagttaatttgaagctcaaccccaacattaaagaaacgttagtgcccaattttgaaacgtgtttgtgttgtagattttattgtgttcgagtaaacatcaaatttgataaccacttgggttctatgaaagttgatattccggttgatgtgaaaaagttacaaatttag

SEQ ID NO: 77851 - DNA, 924 bp, Saccharomyces pastorianus
atgttgatttcttcacggatcgttcgaagctcgctggtaaatgtcccgctaagattatctaggtgttttacgcaagctcacagagcatgcaaagaagaagaagttaatagtcctttatcatccacagctgaacagccagagcagaagtatacgcattttggttcgaagactgtattgaagtctaccaagcagaagttagttggtgatgtcttttcttccgtggccaatcggtatgacttgatgaatgatgttatgtcattaggaattcatagattgtggaaggaccattttatcaataaactagatgcgggaaaaaggccaaactctacgactcctttgaacttcatagatgtggctgggggatccggtgatattgctttcggattactagaccatgctgagtcgaaatttggtgacactgagtctacaatggatattgtagatatcaaccctgacatgcttaaagaaggtgagaagagagccatggaacaaggaaaatatttcaaggatcctcgtgtgagatttttggtttctaatggtgagaaactagaggagattgattctgattccaaggacatctacacagtctccttcggtatcagaaatttcaccgatattcaaaagggtttaaacactgcttatagagttttgaaaccgggcggtattttttattgtctagaattttccaaaattgagaatcccctaatggactttgcttaccaacagtgggctaaggtcctacctgtaatgggctcgatgattgctaatgactacgactcttaccagtatttggtggagtctatcgaaagatttcctgaccaagaaacgttcaaatccatgattgagaaggcaggattcaaatctgctggctacgaaagtttaacttttggtatatgtgccatccattggggcattaaagtttaa

SEQ ID NO: 77852 - DNA, 318 bp, Saccharomyces pastorianus
atgtccaagagtaatacttataggatgctcgtcttactagaagacgacaccaagataaataaagaagatgaaaaatttttgaaaggtaagccgggaaaaatgcatgaatttgttgacgagttggtacttccatttaatgttgacgaactggacgaattaaatacctggtttgataagttcgatgccgaaatatgtataccgaacgaaggtcatatcaaatacgaaattagtagcgatggtttaattgtacttatgctagataaggaaattgaagaggttgtcgaaaaagtaaagaaattcgtcgacgagaataactga

SEQ ID NO: 77853 - DNA, 1161 bp, Saccharomyces pastorianus
atgctctttgttttgcttattgaatatggaaaatgtttgaaaaattttcaagcgctggtcatttggaacgaaagtaactgtcatcttgaaatctatggtaaaggagaaataaaacattattccccaggaattgagaggaaagtagggcagttactaatggaaaaggacgcattggaggttagactgaagtctatcagacattcgctggacaagaataccaaacttttaccgggaaaatataggaatactctaggagagcgacttattaccaaatggaggtacaagaagaaatcccataatggcagttcaatgttgcctgaaaaatgtaagagccacgtgcaattgtatgatgatttggtacaagaaagctctaaacattttgttggtttccgattacacgatcttcgggtcttgttgaaaagaatatgctccattcaaaactacacaaggcatgtgctcattgaatgggacgttcgatgggtcaatccactgactctagcatccaagggctgggagccgtaccaaagtgcatcccagtcgcaagtgccatttaagtgctgttgttgccatgccattatgacaattcctttattaaaaaatggcgatgatgtcgccgattacaacatgaaattgaatgaaaaaatctggaattgcgatataattggaaatcatcttcaaaagtgtccgtggagggaaaatcaggttgatttaaacaaagagtattatttaagctcacaaaaccttataagggaaattgaaagaattcatacagaaattgacagaattgtttccggatcaaatgaatttagccttaaaagaaactcttcccgtatatttcattacctgtctgagaaagaaatacaaaaactggcattttttttcgattgtaaagactattctctcgtaggtctgttgcttctcggctacacgaaattccagaaggatgatctggttcaatgcacggcttgctttcatcgagcatccctgaagaagttagaatatacagaatttaacggacacgctctatggtgtcggtattacaacaaagagttgttgcccacaatgttgctggagttaatcggcaaggaggacaaactaataacgaaattgggcgtgggagaaagactaaataaattagaggctgttctacaaactttataa

SEQ ID NO: 77854 - DNA, 681 bp, Saccharomyces pastorianus
atgcctattatgttggaagactaccaaaagaactttctagagttggccatcgaatgccaggctctaagatttggttcattcaagttgaaatcaggtagagaatcgccatatttctttaatttgggattgttcaatactggtaaattgctttccaatttggctactgcgtatgcaattgccatcatacaatctgatttgaaatttgatgtgattttcggtcctgcctacaaaggtatcccacttgctgctattgtttgtgtgaaattggcggagattggtggctctaaatttcaaaacattcagtacgcttttaacagaaaggaagccaaagatcatggtgaaggtggtatcattgtcggctctgccctagaaaacaagagaatattaatcatcgacgacgtcatgactgctggtactgccattaacgaggcctttgagatcatcagtaacgccaagggtcaggtagttggctccataattgctcttgatagacaggaagttgtgagtactgacgataaagaaggactcagcgccactcaaactgttagcaaaaaatacggtatcccagtcttgagcattgtctccttaattcacataattacctatttggaaggcagaataacagcagaagagaaaagcaagatcgaacaataccttcaaacctacggtgcctccgcttaa

SEQ ID NO: 77855 - DNA, 822 bp, Saccharomyces pastorianus
atgcctagattagaagagattgacgatttcaatgatatcgacgaccttgatatggaattggccgagttagatccatctttgaggacgccgatcgctcccaagataacgcctaaggttgtaaggagccaggaccaagagaaccctgcatttttacctggcacgaataacaacagtaatagcaacaacaatagtagcaacgaaaaagagcagttgagttttattaacccaaaaactggtaaggttgaacgttcggaggctatttcgaagaaagatttagaagaagtcaaaagattccaagtactctatccatgttactttgacataaacagatcacataaggaagggagaagggttcctaaggagttggctgttgaaaatcctttggctaaaactatggcagatgctgtccgtgaattgggaatattatgcatttttgaaggtgaaaaatgtcacccacaagattttggtaatcctggtagaattcgtgtacttttcaaagaaaatggacaattaattggcgcagccactaaattcaaaggtggaaagaggcaattaatgaaagctgttggggagtatatgaaaagacatccaactactattgaatctttaagggagattccatatggccctgatttcgacaatattgaatttaaaaagattccacgtgtaaagggattcaaaatgaatgagattgttccgctgcatagtccgttcttgatgggccacccaatgacaaaatctgtctacgaaactcctaagattacagcggcagaaaagtcgttcaagccaccaaaaaataagtacaaagtagttagaagatga

SEQ ID NO: 77856 - DNA, 4965 bp, Saccharomyces pastorianus
atggctacaccttcatttggcaattcctctccacaattgaccttcactcatgttgctaattttatgaacgatgctgctgctgatgtatccgctgtggatgccaagcaattggcccaaataagacagtttttgaaggctaacaagacaaatcttatcgagagtctgaacacaataaggcagaatgtaacttcttccggcgatcataacaagttacgctctacaattgcaaacttattgcaaataaacgtcgataatgatccattttttgctcaatctgaggacctttctcatgctgtagaattctttatgtctgagagatcatctagacttcatatagtatactcacttctcgttaaccctgacatcgacctcgagacatattcatttattgacaacgatagattcaatgtagtgggaaaattgatttctataatatcatctgtaatccagaactacgacattattacagcttcatctttagcacatgattataataacgatcaagacatgttcacaattgtctcattggtgcagttaaaaaaattttctgatttgaagtttatcttgcagatattacaaattttgaatttaatgatcctcaacacaaaagtaccagtagatatcgtcaatcaatggtttctacagtatcaaaatcaatttgttgaattttgcagaaatataaattcaacagacaagagtatagatacctcgtcactacaattgtacaagtttcagaatttccaagacctcagttacctctcagaaacgcttatttccaggatttcatctttatttactatcacaactatattgatacttggactgaacacttcaatcgcgcaatttgatattcagtcacctttgtacatggatacagaaactttcgacactgtcaatagcgctctagagaatgatgtagcaaccaatatcgtcaacgaggaccccattttccatccaatgattcattactcctggtcatttatactttattataggcgagcattacaatcgtcggaatcatttgacgattcagacataacgaaatttgctctgtttgctgaatcacatgatgttcttcaaaaattgaatactctctcagaaattctatcctttgatcctgtttacaccacagtaataacagtatttttggagttttctttaaattttattcctataactgcatctacttcccgggttttcgccaagataatttcaaaggcaccagagcagttcattgagaatttcttaactaatgacacttttgagaaaaaattgagcatcataaaggctaaattgcccctattgaacgaatcactgatcccgctaattaatttagccttaattgataccgagtttgccaattttgaattaaaagatatatgttcatttgctgttaccaaaagtagtttgaacgatttggattatgacttaattgctgatacaataacaaactcttcttcatcctccgatattatagtgcctgatttgatagagttgaagtctgatttactagtggcgccacccttagaaaacgaaaactctaattgcctcttgtcaataccaaaatcaacaaagggaaaaattcttactatcaaacaacaacaacaacaacaacaacagaatggacaacagccgccaactacttccaatttgattattttcctttacaaattcaatggttggtctttggtgggtagaatattgcaaaatctattacattcatatatggaaaagggtacacaactggatgacttacaacatgaattgatgatatccataataaagttagtcactaacgttgtcgatccgaaaacctcgattgagaaatctagtgaaattctgtcatatttatcaaattctctggatacttcagccagcaccataaatggagcgtcgattatccaagtaattttcgagatttttgaaatatcactacaaagaaaagattatacctcaattgtacaatgttgtgaatttatgactatgctgacaccgaattaccttcatcttgtttcttcttacttgaacaaatcggatttgttagacaaatatggtaagactggtctttccaatatgatactcggttcggttgaattatctacgggggattacacattcactatccaattgcttaagctaacaaaagtctttattcgagaatctctctcattgaaaaatatccatatttccaagagaagtaaaattgatattattaataagttgattctacatgcaattcatatctttgagagttattacaactggaagtacaacaacttcttacaaaaattcgaaattgccttccatttgacattaattttttatgatgtacttcatgacgttttcaccataaatccacatcaaaaggatcagttaatcatttcctcgtcagcaaacaaattgttgcagttatttttgactcccatggattccattgatttggctccaaatactttgacgaatattctgatttcaccattgaataccacaacaaaaattttaggcgacaaaattttgggtaatttatatagcaaggtaatgaataactccttcaagctgtgcacgcttttgatctctattcgaggtagcaatcgtgatttaaagccaagcaacctggaaaaattgcttttcataaattcatcaaaattggttgacgtttataccctaccaagttatgttcatttcaaagtgcagatcatagagttgttaagctatttagtagaggctccttggaatgacgactatccatttctgttatctttccttggtgaagcaaagtcaatggcatttttgaaagaagtcctgtcggacctgagctctcccgtgcaagattggaaccttctccgaagtttgtacattttttttactaccctattagaaagtaaacaagatgggttatctatcctcttcttaacaggtcaatttgcctccaataaaaaaattaatgacgaatcctccatagacaaaaagagttctatattaactgttttgcaaaagaattctttactattagattcaacgcctgaagaagtaagttgcaagttattagaaacgataacatatgttttaaacacttggacaaattctaaaatattcataaaagatcctaaatttgtgaatttcttattggctaagttgaaggactcaaaaaaattatttcagaaaaaggaaaatttgactcgtgacgaaactgtttctttgattaagaaatacaaattgatctcaaggattgtagaaatatttgcgttgtgtatttacaactccactgattcaaactcggaaattttaaattttttgaatcaggaagacttgtttgaattagttcatcatttcttccaaattgatgggttcaataaaacttttcatgatgaattaaacttaaaatttaaagagaaatggcccagtttagagcttcagtcgttccaaaaaattccattatccagaataaacgaaaatgagaatttcggttatgatattccgttattagatatagttttaaaagctgaccgtagttggaacgaaccaagtaagagtcagacaaattttaaggaggaaataacagacgcttcattaaatttgcagtatgtcaattacgaaatttctaccgcaaaagcatggggcgcactaatcaccacgtttgtaaagaggagcactgttccgttaaatgatggttttgtcgacttggtagagcatttcctcaagttaaatattgattttggttcagataaacaaatgtttacccaaatatatctggaaagaattgagttgtcgttttacattttatattcgttcaagttgtcgggaaaattgttgaaggaagaaaagataattgaattgatgaacaagatttttacaattttcaaatctggtgagattgactttattaaaaatattggtaagtcactaaaaaataacttttatagacctcttttgagatctgtcttagttcttctcgagttagtctcgtcaggagatcgtttcatcgaattaatatctgatcaactactggaattttttgaattagtgtttagtaagggtgtttatttgatactgtctgagatattatgtcagattaataaatgctccacgaggggtttaagcaccgatcacaccacccaaattgtcaacttggaggataatactcaggatttattgttattattatcactcttcaagaagatcaccaatttgaatccctctaaaaacttcaatgttattctagcatcatccctaaacgaagttggaactttgaaagttatactgaacctatattcaagcgtgcatttgataaggattaacgatgaaccaattcttgggcaaattactctgacctttatctccgaattgtgttctattgagccaattgctgcaaaactcatcaacagtggattgtatagcgttctattggaaagtccactatctgttgcaatacagcaaggtgatataaaacctgaattttcgcctagattgcacaagatttggagcaatggtttgttatccattgttctactactattaagtcagttcggtatcaaggttttacctgagacatgcctatttgtttcatattttggaaaacaaataaaatctacaatatataactggggtgacaacaagttagcagtgtcaagttcgttgataaaggaaacgaatcaattggttttattgcaaaaaatgctaaacttgctaaattaccaagaattgtttatccagcctaaaaactctgatgatcaacaagaagctgtagaattggttattggtctagattctgaacatgataaaaaaaggttaagcgctgcattaagcaagtttctaacacatccaaaatacttgaattcaagaataatacctacaactttagaagagcaacagcagttggaggatgaatcaagcagattggagttcgtcaagggtatcagcagagacattaaagcattacaagattcactatttaaggacgtttaa

SEQ ID NO: 77857 - DNA, 1407 bp, Saccharomyces pastorianus
atggaagcttcacatttgcaaatctactggcatgattcacaacccgtttactcgctcacattccaaaagaacagtgcgaacgacaagcttttcaccgctggtggtgataacaaggttaggatatggaagttgaacagagatgaaaacggacaaaatgggggggtgcgtaagattgaaagccttgactttcttggctcgctgacgcatcacgaacaggccataaatgtaatccgattcaactcgaagggtgacgtactggcgtctgcgggcgatgacggccaagtgctgctatggaagcaagaagatccaaatacacagcaagaatctgtggtcagaccattcggaatggatgcggagactagtgaagcagacgagaacaaggagaaatgggttgtgtggaaacggctgcgtggtggtagcggtgctactgcggcggcagagatttacgatctagcgtggtcacctgataacaggaacatagtggtggcatgtatggacaattcgatacgactgttcgatgttggagctgggacgctggtatgcggccagtcggatcatggtcactacgtccaaggtgttgcatgggacccattaaatcagtttattctctcacagtctgcggaccggtctctgcatgtatatggagtcattctttcatctgcaggagtggttacagggctgaaacttagaagtaagattgccaaggcagaactgccttgtccaggtgatgtcctgaggacaaattacctttttcacaacgagacgctaccttcattctttaggcgatgcagcatatcgcctcgtggtggtttggtggtagttcccagtggtgtgtataaggtggctggtgatgaagtcgcgaactgcgtatacgtgtatactagatctggaatactgaacagcgctggtggcgttaaaaaccggcctgcgattagaatcccatctttgaagaaaccagcgctgatggcggctttctcgcccgtattttacgaaacgagccagaagagtgtgcttaagctgccctataagctagtatttgccatagcaacgactaacgaagtactcgtgtacgacacagatgtattggagccgttatgcgttgtgggaaatatacattactcacccataactgatttagcatggtctgaggatggctcgaccctactaatctcatcaacagacggattctgttcgtatgtatcgatcgacacagaaacgcaattcggttcaaggatagagccgccagcgatgcatgcagagccactagacactgacgagagcgcggtagcggctaagaaccagcgcgaggcaggtgggatcgtgaacatgctgccggtgaagaagatcccctgcaatagtagcgatagtaaaaagaggcgcatacatcctacgccagtcgatttgtga

SEQ ID NO: 77858 - DNA, 318 bp, Saccharomyces pastorianus
atgtaccgcattaaatatattaaaaatcacaaatcgactggcgtaggatgtatgcgcctctttttactatcgctactattgcaggggatcttcttcaccggcagcatgttcacgatcccacctgcctcgcgctggttcttagccgctaccgcgctctcgtcagtgtctagtggctctgcatgcatcgctggcggctctatccttgaaccgaattgcgtttctgtgtcgatcgatacatacgaacagaatccgtctgttgatgagattagtagggtcgagccatcctcagaccatgctaaatcagttatgggtgagtaa

SEQ ID NO: 77859 - DNA, 354 bp, Saccharomyces pastorianus
atggatggatcgactatagtgtttatactgacgatggtgtgcttgtttgtttacaccgtgaaacacaggggcgccaagcaagtaccctcgcgaaccgtacaggatgccaaaccggcgccctcggtcgccaccaacgacccttctccggagccagtaccatcggctccggaggaacgcgttgctcggttaaacagacatggtagtgatcgaaagagagccgttaatagtgacatggttgaaatcgtgatgacgatggcgccacatgtgcctcaggaaaaagtcgtgcaagatctcaggaacacagggtccattgagcacacaatggaaaatatcttcgctggcaaactagattag

SEQ ID NO: 77860 - DNA, 3297 bp, Saccharomyces pastorianus
atggctctcatcgtggcatctttgtttttgccctaccaaccacaattcgagcttgacacctctctccctgagaactcgcaggtggactcatctctcgtgaacatacaggctatggccaatgaccaacagcaacaacgtgcgctttctaacaacatctcacaggaatcattggtcgcgccagcaccagaacaaggtgtccccccagcaatctcaaggagtgccaccaggtcacccagtgctttcaaccgcgcctcgtctacgacaaatactgccactttagatgatcttgtctcttcggacatattcatggaaaacttgactgcgaatgcaactacctcacatacgccaacaagcaagactatgcttaaaccccggaaaaatggttccgtggaacgattcttctccccttcttccaatattcccacggatcgcatcgcatcgccaatccagcatgagcatgactccggttcgagaattgcttcgccaatccaacagcaacagcaggaccccacgaccaacttattaaagaacgtcaacaagtcattgttagtgcactcactgttgaacaacacctcacaaactagcctagaaggacccaacaaccacattgttaccccgaaatcgagggcgggcaacaggcctacttcggcggctacttctttagttaataggaccaaacaaggttcggcctcctctggatcttctgggtcttctgcgccaccttccattaaaaggattacgccccacttgactgcgtccgctgcaaaacagcgccccttattggctaaacagccttctaatctgaaatattcggagttagcagatatttcgtcgagtgagacgtcttcgcagcataatgagtcggacccggatgatctaactactgcccctgacgaggaatatgtttctgatttggaaatggatgacgcgaagcaggactacaaggttccaaagttcggcggctattccaataaatctaaacttaagaaatatgcgctgttaaggtcatctcaggagctgtttagccgtcttccatggtcgatcgttccctctatcaaaggtaatggcgccatgaagaacgccataaacactgcagtcttggagaatatcattccgcaccgtcatgttaagtgggtcggtaccgtcggaatcccaacggatgagattccggaaaatatccttgcgaacatctctgactctttaaaagacaagtacgactcctatcctgtccttacggacgacgacaccttcaaagccgcatacaaaaactactgtaaacaaatcttgtggcctacgctgcattaccagattccagacaatccgaactcgaaggcttttgaagatcactcttggaagttctatagaaacttaaaccaaaggtttgcggacgcgatcgttaaaatctataagaaaggtgacaccatctggattcatgattaccatttaatgctggttccgcagatggtgagagacgtcttgccttttgccaaaataggatttaccttacatgtctcgttccccagtagtgaagtgtttaggtgtctggctcagcgtgagaagatcttagaaggcttgaccggtgcagactttgtcggcttccagacgagggagtatgcaagacatttcttacagacgtctaaccgtctgctaatggcggacgtggtacatgatgaagagctaaagtataacggcagagtcgtttctgtgaggttcaccccagttggtatcgacgcctttgatttgcaatcgcaattgaaggatggaagtgtcatgcaatggcgtcaattgattcgtgaaagatggcaagggaaaaaactaattgtgtgtcgtgatcaattcgatagaattagaggtattcacaagaaattgttggcttatgaaaaattcttggtcgaaaatccggaatacgtggaaaaatcgactttaattcaaatctgtattggaagcagtaaggatgtagaactggagcgccagatcatgattgtcgtggatagaatcaactcgctatccaccaatattagtatttctcaacctgtggtgtttttgcatcaagatctagatttttctcagtatttagctttgagttcagaggcagatttgttcgtagtcagctctctaagggaaggtatgaacttgacatgtcacgaatttatcgtttgttctgaggacaaaaatgctcccctactgttgtcagaatttactggtagtgcatctttattgaatgatggcgctataataattaacccatgggataccaagaacttctcacaagccattctcaaggggttggagatgccattcgataagagaaggccacagtggaagaaattgatgaaagacattatcaacaacgactctacaaactggatcaagacttctttacaagatattcatatttcgtggcaattcaatcaagaaggttccaagatcttcaaattgaatacaaaaacactgatggaagattaccagtcatctaaaaagcgtatgtttgttttcaacattgctgaaccaccttcatcgagaatgatttccatactgaatgacatgacttctaagggcaatatcgtttacatcatgaactcatttccaaagcccattctggaaaatctttacagtcgtgtgcaaaacattgggttgattgccgagaatggtgcatacgttagtctgaacggtgtatggtacaacattgttgatcaagtcgattggcgtaacgatgtagccaaaattctcgaggacaaagtggaaagattacctggctcgtactacaagataaatgagtccatgatcaagttccacactgaaaatgcggaagatcaagatcgtgtagctagtgttatcggtgatgccatcacacatatcaatactgtttttgaccacagaggtattcatgcctacgtttacaaaaacgttgtttccgtacaacaagtgggactttccttatcggcagctcaatttcttttcagattctataattctgcttcggatccactggatacgagttccggccaaatcacaaatattcagacaccatctcaacaaaatccttcagatcaagaacaacaacctccagcctctcccactgtgtcgatgaaccatattgatttcgcatgtgtctctggttcatcgtctcctgtgcttgaaccattgttcaaattggtcaatgatgaagcaagtgaagggcaagtaaaagccggacacgccattgtttatggtgatgctacttctacttatgccaaagaacatgtaaatgggttaaacgaacttttcacgatcatttcaagaatcattgaagattaa

SEQ ID NO: 77861 - DNA, 2643 bp, Saccharomyces pastorianus
atgggaattttcagcaagaatggccctaaaaaaatgggaagggcaaagacgtttactgggtgttggacgtgcagaggaagaaaagttaagtgtgatcttcggcatccccactgccaacgatgtgaaaagtctaatttgccttgtggcggttatgatatcaaactccggtggtctaagcctatgcaatttgacccgtacggtgtcccaatcccacaaaattctcctgcaactactacgaacttatcaggtagtgtcgatgaaccacaataccaacgacggaacatcgattttgtgcgctatgatgaagaatacgtgtatcatgaagatatggatgatgagctaacaatgctgcatactcccccaattgagaaaataagcgataacaagacgtggatcataaagaaatttggggtgtttaaaggaacagataagatcgacaagcagtacgctccaaggaagaagcgcaataggaaaagagttgccaaaagcttggagagctcagcttctatttcgttatcttctttaccatcttcttcaactatttcctttccaattagacatattgaagacaagttgagaaataaagggcatgtaaagacaggtattctctctgctaatgatggtgttccaccaacaccaaatcttttagattatgactggaacaatctgaatataacaggttacgaatggatctcgagtgaactcagagatgatgcattattgtcagcggtgaccttacagggacatcacttaggacacacacagccacaagaaatctcattagaggaaaactctaatgtcgtgagtggggaagagcatgtgaatgccaaagaacatggatgtgccgttgaggctgataatcaaggttcatcaactttacctaataaagcagccagtgccaatgataaactttaccagcaaaacttgaagttactcttccagaaaaactcttcgaacagtgaggaaccagaccctcaagcattgatcgacgatgtgttcgtcaatattgaaccaagatctctgcccgcatctgatctgaataaaataactctagctcctccaaatgaagaatcacgcatgcctaagtgcatgttagaactcacatcctattccagtgacctaccacctgaattggtagatattatacccaaaacagaccttaccgtacatggtttagcgagatttcttttaaatcattattttaataatgttgcagataaaatgacagtggtcgtgctcgaaaagaacccatggaaaacattatacttccccagagccttgatggcattaggcgatttagcgggtttgggacaatcctccaactcgaggaatgcgttgttgaatgctcttcttgctgtctcttgcttccacttgcaaagcaagtacccaaggaactacaaactacaaaaatactttctgggcctaggtatcgaattgagaaatcaagcctcgaactttctaagattatgtttgaacacaaaatcaagcatacctgagaaatataaagacgtactaactgcgatcttatctatgaactctattgatgttgtatgggggacgatggcagattgccaggatcacttggctctttgtgaagacttcgttgagtcaagaatgaaactaagacctaatatttctgaaaaggcaaaaaccttacacaggattttctcgtttctgaagttaattcaagatagcactgcgttggataaagtcagggcaaaggaaattgttattttaccaagtgaagaagatgataattacaaaccattagatacatctaacgctacaaccagtagcagtgagccaagagttgacgttgtgcaggaaggtttatttagagaggcactcaatgaaaatgacggcaaaatacatattgaattcgttaaggagcctatcacaaacgtatccgctgactctactccatcttcgaccactcctccaatttttaccaacatagcaacagaaagttactataataaatctgatatatctaagctagtatcgaagactgatgaaaacataattggtacagattcactctatggattgcctaattcattaatattactattttcagactgtgttaggatagtgagacataatgaatattataatttaacttacctacctgtaccccgaaaatttaatgaactctcgttaaatttcgaaaaaagattattgaaatggaaatcagaatggaacttccatcaagaaaattcggagggaaaaagcttcataaactcaacggctgaagcactatatcaccatacaatgagcttttatttcagtttaattatttattattttacaatggcaagaagtttaaattgccaatttctacaaaactatgttgccaaagtattagatcacttaaatgcaatggaagaattggtggatcaaaaaaaagtgaaaattgtccctttaatttggcaaggtttcatggcaggatgtgcttgcacagatgaaaacagacagcaagagtttagaagatgggcagccaaattagctgaaagtggagtgggctcctattggggagccaggcaagtaatgttggaagtttggaggcgacggaaagaggatgagccgggcgataattggtattctatttataaagattgggaaatgaatctgatgctatcataa

SEQ ID NO: 77862 - DNA, 504 bp, Saccharomyces pastorianus
atgtctaggaagctgaaaaaaacgaatctgtttaacaaggatgtaagttccttgctttacgcttacggcgatgtgccgcagccactacaagctactgtgcagtgtttggatgaattggtatctggatatttggtggatgtttgtactaacgcattccatacagcccagaattctcagcgcaataagctccgattggaagatttcaagtttgccctccgtaaagacccgataaagcttgggagagcagaagaactgatagctactaataagttgattacggaagctaagaagcagttcaatgagacagacaatcaaaattcattaaagaggtacagagaagaggatgaagagggtgacgagatggaagaggatgaggatgagcagcaggtgacggatgatgatgaggaagcagcgggccgtaatagcgctaaacaatcaacagattcgaaggcaacaaagattaggaagcaggggcctaaaaacctcaagaaaacaaaaaaatga

SEQ ID NO: 77863 - DNA, 1356 bp, Saccharomyces pastorianus
atgactgatgatgaaaagagggagatattgaaagaatttgatcctttcagccaattggaacaggcaaatggcaacccagataaagatgtgaagtttaaaaaggatgatcctaatagggcagcggcagaagaaactaatagggacatatccgcgcaggacaaaggagatgaggagccattttatgactttcaaatattcattaagcagcttcagactcctggtgcagatcctctggttaaatatacgaaatcattcttacgtaacttcttggcgcaaagacttctatggacggtcagcgaagaaataaaactcatcagtgactttaagaccttcatttacgataaattcactctttacgagcctttccgaagtcttgacaattccaagatgagaaatgccaaggaaggtatggaaaagttaataatggggaaactatattctcgctgtttttcaccaagtctttatgaaattctgcagaaaccattagacgatgagcatatgaaagatttaaccaacgatgacacattactagaaaagattaggcattatagattcataagccccattatgttagatattcctgatactatgccgaatgccaggctgaataagtttgtccatttggccagtaaagagttgggcaaaataaataggtttaagtcaccaagggacaagatggtttgcgttttgaatgcaagcaaggttatatttggtttactaaaacataccaagttggaacaaaatggcgctgacagctttatacctgtgctaatatactgtattttgaaaggacaagtacgatatctagtttcgaatgtgaactacatcgaaagattcagatcaccagacttcattcggggcgaagaggaatattacttgagcagtcttcaggctgctcttaacttcattatgaacttgactgaacgttctttaactatcgaagatcacgaagattttgaagaggcataccaaagaaattttaaacaactagcagaagaaaaagaggaagaagagaagaaaaaacaactagagattccggatgagttacagccaaacggcactttactgaaacccttagacgaagttaccaatattgtaatttctaaattcaatgaactgttttctccaattggagagcccacacaagaagaggcattgaaatctgaacagagcaataaagaagaagacgtttcttcgttaattaagaaaattgaagagaacgaacgaaaggacacgttgaacacattacagaatatgtttccagatatggacccaagcctgatagaggatgtttgtattgctaaaaaatcgcgtattgggccctgtgttgatgctctactttctctgtcagaataa

SEQ ID NO: 77864 - DNA, 1578 bp, Saccharomyces pastorianus
atgtgcgggattcttttgcattattgtccaaacaataactacctgaatgatgagttaatcgaatttccagaaggaactgaatttggagatacaacatgtaccaatgaatcgtcgattttcaacaaaatcattccgtacatagccgcaagaggtccaaactactcctctcttcgagctgtcaaagcttatcgaataagttggttttcttctgttttatctttgaggcagcctttcacgaaacagagtattaacgtggatgacagatatttcctacaattcaatggtgagttatacaataaagagatatcgcagggtgataatgatagtctttatattgcttctatgttgcagaatttgaaagagggtatgggcgttattgatgttataaaatcactggaaggcgagtatgcttatactatatatgacgtgaactcatccaaactctatttcggcagagatccaattggcaggcgaagtttgtcttattcggtcactccagacaacgaattgtacgtcgctagtgtaacggggtctgctgggtcctttcaagattgtataggtagagttatttatgaatatgatacacgaactaagttgttaaattccaatcagaggtcacatcttccatacgaagtgacatcagagatagatctgaatttcacatcattgtcagaggtgtctaaaaatttatatgctatgctacgtgattctgtaaaaaaaagggtagagtccatacatcccaggcatattgaaaactctcctattgcggtactattctcaggaggaattgattgttcagtaatagtagcgttgatctgcgaggtgttgcaagaaaatgattataaatgtggaaaaccagttatagagcttctaaatgtatccttcgaaaaccccaggactggtctttttcccagtgatacacctgatagaaaactgtccattaacagtgcaaagactttacaaaacttatatcctaatgttgatatcaaactggttgaagttgacgttccttatgatgagtatttaaaatggaagccatttgttatcaatttaatgtatcctaaacagactgaaatggacttgtctatagccattgcttttttttttgcgtcgagaggtagaggtttcttaacttctctgaatggggaaagaacgccatatcagcgccatgggatagtgttattcagcggactgggagcagacgaactctacggtggatatcacaagtttgccaacaaaccaccccatgaacttgtggaggaacttacaaggcaaataaacaacatttatgatcgcaacctgaatcgtgatgataaagtgatagctcataatggcgtggaggtgagatacccatttttagatgaatatgttataaagttatctacagcagaaattcccattaatttcaaggttaacaaattaatccttcgaaaagttgcctcgcagtatttgaagttggatggaatatcatcagaaccaaaaagggccattcaattcggtgctaaaagcgctaaaatgacaaaggatggtaataagcatggaacagatttattaaaagaaaataggaattgttcataa

SEQ ID NO: 77865 - DNA, 633 bp, Saccharomyces pastorianus
atgaacaatactgatcctacttcatttgaaagtatattggctggtgtggccaaattgagaaaggaaaagagtggtgcagatactaccggatctcaatcgttagaaatagatgcatcaaaactccagcagcaggaaccgcaaacatcaagacgcataaattcaaaccaggtcataaacgccttcaatcagcaaaaaccggaagaatggaccgactcaaaggctacagatgactataatcgaaagagacccttcaggagtactcgaccgggaaaaactgtactagtgaacactacccaaaaagaaaatccactcctgaaccacttaaagagcaccaattggagatatgtatcttcaacaggaattaatatgatatactacgactatctagttcgtggaagaagtgtactgttcttaactttgacttatcacaaattatatgtcgattatatctctaggagaatgcagcccttatctagaaacgaaaataatatactgatattcatagtagacgataacaactctgaagatacccttaatgacattacaaaactatgtatgttcaacggatttactctacttttagcatttaattttgaacaagctgcaaaatatattgaatatttgaatttatga

SEQ ID NO: 77866 - DNA, 402 bp, Saccharomyces pastorianus
atgtcgaccatgaatttcttattgtctacaatcttacctgggatgtataatgatgcagatgctggaaccagtagtttttgcccttcatttcctgcttgggagactgttttaatatcatcaatacattctgtgaacttgcccttagccatggttaatgcttgcaaggactgtgtgaaatgctgcaattcttggtcgaattgctgttttacagcattcagctgctcgggatttagtttagttaaatcgactaagtttcgaacatgtagtaacttaaaagttagtaaagtgtctgtacggtggcaacaacgaaggtgctattcatttacatacttttttgagaggacatggcttgatttttacagtgctctttcttgtttgggtcacagcaagattttcatctaa

SEQ ID NO: 77867 - DNA, 2700 bp, Saccharomyces pastorianus
atggcaaaaaagaaatctaagagcagatccaagagttccagaagagttttggatgctttgcaacttgctgagagagaaattaatggcgaattcgataactccagcgacaatgacaaaagacatgatgctcgtcgtaatggtacagttgtcaacttgttaaaaaggtcaaaaggtgacactaacagtgatgaagatgatatcgattctgagtcgtttgaagatgaggagttgaactctgatgaagcgttgggctctgatgatgactatgacattttgaattccaaattctcacaaactattcgtgacaagaaggagaatgcaaactaccaagaagaagaggatgaaggtgggtatacttccattgatgaagaagatttgatgccactgtctcaagtgtgggacatggatgagaaaaccgcacagagtaacggcaatgatgacgaagacgcttctccacaattaaaattgcaagatacagatataagttccgaatcaagcagttccgaagaaagcgaatcggaatctgaagatgatgaagaggaagaggatcccttcgacgaaatatctgaagatgaagaagacatcgaattgaatacaattacctcaaaactgattgatgaaaccaaaagtaaagctccaaagagactagatacgtatggctcaggtgaggccaatgagtatgttttgccctctgcaaatgcagctagtggagcttctgggaaattgagtttgacggatatgatgaacgttattgatgacaggcaagttattgaaaacgctaacttgcttaagggtaagtcgtcgacgtatgaagtcccgctaccacaacgtatccaacaaagacacgatcgtaaggcagcatacgagatctctaagcaagaagtgagtaagtggaatgatatcgtccaacagaacagaagggctgatcatttaatcttcccgctgaacaaacccaccgaacataaccacgcctcggctttcactagaactcaagatgttcctcaaacagaattacagcagaaggtagatcaagttcttcaagagagtaatttagcgaacccagaaaaagactcaaagtttgaagagttgagcactgctaaaatgacacccgaggagatgagaaagaggactaccgaaatgagattgatgagagaattgatgtttagagaagaaagaaaagctaggaggttgaagaaaataaaatctaagacatatcgtaagatcaagaaaaaggaattgatgaaaaatagagagctagctgctgtttccagcgacgaagacaacgaagatcatgatatcgctagggctaaagaaagaatgactctaaaacacaagacaaattccaagtgggctaaagatatgatcaaacatggtatgacaaatgacgctgaaaccagagaagaaatggaagagatgctaagacaaggtgaacgtttaaaggcaaaaatgttggatagaaattctgatgatgaagaggatggtcgtgtgcaaacattaagtgatgttgaaaatgaggagaaagagaatatagactcagaagcattgaagagtaaattgggtaaaactggcgtaatgaatatggcctttatgaagaatggtgaagctagagaaagagaggcgaacaaagaaaccttacgtcaattaagggccgttgaaaatggtgatgatattaagctcttcgaaagtgacgaggaagagacgaatggagagaatattcaaataaataagggcagaagaatatataccccaggttccttggaatccaacaaagacatgaatgaactaaatgaccacactagaaaagagaataaagttgacgaatcaagaagtttggaaaaccgactaagggccaagaatagtgggcaatcgaaaaatgcaagaactaatgcagaaggcgcaataattgtggaggaggaaagtgatggtgaacctcttcaagacggtcagaataatcaacaggatgaagaagcaaaagatgttaatccttggttagctaatgaaagtgatgaagaacacactgtcaagaaacaatcttccaaagttaacgttattgacaaagacagttctaaaaatgttaaggccatgaacaaaatggagaaagctgagctaaagcaaaagaaaaagaagaaaggtaagtcaaacgatgatgaagatctcttgttgacggcggatgattctacacggctaaagatagtcgatccatatggtggttctgatgacgaacaaggggataatgtattcatgttcaagcagcaagacgtcattgcggaagcctttgctggcgacgacgtggtagcagaatttcaggaggaaaagaaacgtgtcattgatgatgaagatgataaagaagttgataccactttacctggttggggtgaatgggccggtgcaggttctaaaccaaaaaataagaagcgtaaattcatcaaaaaggttaagggtgttgttaataaagacaaaagaagagataagaatctacaaaatgtgatcataaatgaaaaagttaataagaaaaacttgaaataccaatcttcagcggtaccattcccattcgaaaatagagaacaatatgaaagatctttacgtatgccgataggtcaagaatggacatccagagcatctcatcaagagcttatcaaaccgagaatcatgactaagccaggccaagttattgatcctttgaaggcaccatttaagtaa

SEQ ID NO: 77868 - DNA, 3609 bp, Saccharomyces pastorianus
atggctttcaaatcattcatatactctaaaggttatcatcgttccgccgctcaaaagaaaactgcaacatcttttttcgatagctcctaccagtatctaaggcaaaaccaaggtttggtaaatttggatcccgtacttcatgcatctcatctacatcctcatccggtcgtagtagcgaatgtaaactataacaacgtagatgatattttgcatccgcacgacctggattctagcataaacaacactaacaaccccctcacccacgaagaactactttataaccaaaacgtttcccttcgatcgctgaagcagcagcaaagtacaaactatgttaataacaacaacaacaatcaacataggtattattctaccggccccacattaccaacaaaccaatatgaccccttaaactttagtaataggaacttccaagatctatcattaaaaacatcacaaccatcagtacaacagccacaaaatgagtacagccttctaaaagacgaaaacgctccagtttggaaggaggacacagaaccatgcctgaataaatctacatacttgcaaactcatattgatgaaattaatcgttgttacgaacaaaaaaattataacaaaatcaactctttatatcaatcattgaaaagaaatgatatcgttccgccactggaaatatttacgaaggttttggactctctttgcaaaaggccgctagataacaatgatttagacaacaaaatgtacgaactcttgacgtgctaccaagatatgatcaacaatagattaaaacctcctgatgagatttataatattgtactattgtctcttttcaagggctcaattttggcctatcagttcgaaaatccaaacggtagtgatttttacaaaattgccattgaattattcaatacgaccaccaacgatccaaagcaaaaaagtgtggttaagtttcgcaatttttccaaagatgttctcgactataaccttttagcgatgaacatctatccgggccatatcaccctgtcaaaagcccaacaagttattaaatcttcacctgcctttatcaaagattctttttacttcatagcatgcttctcatacgctaaattaacaaatgataagtttgccattaaagaactttatgaagatttcagactatctttatcatctggcagtccagaccaaggcttatttgatgaccagtttgaaatttacagcgtgattctttctagttttattgaaactggcgaagttgaactggctaccaatcttttggacgatttagtttccaaaattcaaagctcaaatggtctcgcttccaatatttctttattgctatcgagtttcttaatttcgatgagtaaggtagatccttcaaaagcttatgaaatatggtttaaattccataatttaaattggatacctgagttctcttacgaattttatttggttttcatggcaaacagtttccaagattggaatttgactaagaaaatatatgactatatttttcctatggaaagaaatttgtctccattaaaaaaacaaaaattatcagattacttactgcatccaatcggtgttgactccattacgacctctttgttagattattctttacaattgaaagataatgaagttattatgaaaattctagaagagtccattgtcaaaaatttttcttttgatattggcatttatccatttgttttcaattatttaagagaaattcagtgcggcgaggactaccttatgagatttattgaatcacacgctgagtttatcaagaagagcaactcaattaacaaatttcaattcttaaatatgatagttgataatttccaatcacaatcattattaaacaaaatatcccacgcaaagtttttcaaaaacttcgtagaagatttcaatttagaaaactgtgaattggtcagctataatgggctaatatcatgcattaataacttcattaaaattccaaagacaataaaggatttcccatacattctggagattcatgcaattttggtaacaaaattatttgattttgacacttacccaattttgcaaaatggcaacaacgaggttcttttgaagtttagagatcaaattgaacatcagtttaaaatgttagctcaaaacttctgcagattaaacctagatcctaatttgttagcaggtgtcgtatctcaagctatgaaaatggttaacctagatgacaccgctaatggacaagatttattgaactttttcaatcatccaggtgattgggacaaatcttatcctttgtcactaggttctttcatcaggaactcacccagaggtggtataagagaatttacgaaattgaacaaagaaggttattgctttgattatgacacttataaagaattgataattaaacgagctattaacaaacaaattattgacaagtgcttagaggtatgccctgattcaattgaactaaaaaatatcgtaaatttgatgatttcaaagattcctggtaggaacctaacccaattgataatcaataatccaaaatttagcaaagtttttgtgccaaatttaagaaatgattctatgttaaaattaatcgaaaactgcgaatctttatcgaatttcataagaatctgtgatttcccagaaaagttcaaaagtattgctattcaagccgaaaacaaaaatgctattgagctgatttatgaaagactgtttgacggcggtaagtacgcagatattttgagatataataatattgttccggtgttaaatttggaacttttattaaaatcttgtatcaggtctggtgaattcaagaagtatgaaagtctctctaaaaagtttaatgacaaaataagcgaatcatcaaaaattgatattcagctagaatatttaattaataagaatgatttaaaaggggcattcacgctgtttgaaaagactccaagggagctgagaaccccccataagactatggacctttatacatttgccttatttttggatagtttcaataggaacatcacgtattatgaaagtccggaaaatacattacaattcgccaatattttatccagccaaacaagcttcataaatttactatcgacgtacaacttaattgcccattcagatcacctcatgaacttcaacgtcggtggaatggcagcaaaagttaaaaaagaaatcctgaatcaaatgctaaacaatttgtatgattccatcagactattgtctcccagcattgaaaatgacaaatcaatgaaggaaaaattgagagaaaaagtaaagaactactgcagattcaaagcttatttgaagtcacctgaattggacatggatgaactgaagaccttggtttcagtcgagtcttttttaaatcctttcactccttcaatgttgttcaataacttgatcgaaactatttatataaacgaacacgcttcctcgttagtccttcagaatgggttgatctattcactccaacagaaaggtctcaataagatactgagctatctagaagaaagcttcatcactagtggaaatgatgccaatattgaaaaggtcagggaattcaggtcccttttaaggaagagcaagcctcttcaagcatga

SEQ ID NO: 77869 - DNA, 387 bp, Saccharomyces pastorianus
atgcttgttttttcttttctgtttgttgtagtctctataaatttaaatgcacttatctttttatgcaaaaaaagctgggcgagttatttgtttctatatttgtataatttttttttttgtgaagatgaatataaactgacaaaaaattgtgtcagagttgaagctatagctccttttatgatgtgtcttggttctttgggtgcgatattagggaaacaacgcacagcaaattttcttctgctttcttataacgttataaacaatcctgttgtcttggtttattatgtggaaaacttttcacggatcaattttataaagcatacaactaaagagaaaagtgtagtatggacgaacgagagacaacttaatccatggatttgtaattga

SEQ ID NO: 77870 - DNA, 369 bp, Saccharomyces pastorianus
atgccgcacgcttggcaaagctgtatatttgactcttttagtagatttgtagagcttttcctggcatacaataagcaaagactttatttccgctcgagtccgcttttaaccgccgaattcctccggctaaccaatgaaatgcaagagcgcacaaaaagtggggcagctccgaatgcgcgcgttctcattggccaggcactcggggccgagactcggtgtgccttacaattcccccatgacaaagcaaaaactgtcagtttccctcgaatcatacacacgtcaattacaaatccatggattaagttgtctctcgttcgtccatactacacttttctctttagttgtatgctttataaaattgatccgtga

SEQ ID NO: 77871 - DNA, 2007 bp, Saccharomyces pastorianus
atggagcggcctggcttggtattgcaggaccttccacccgaaatcctgataaacatcttttctcacttagacgaaaaggacttgttcacgttgcaagaactttctacgcatttccggaacttaattcacgatgaagaactttggaagaacctgtttaagtctagagttcacacgactcatttccccacattttctcagtcttcgaaatttagtgtagagtatattgaaaggacacggggtcttcatcattggcagcataacaaggctataagaaccaaatacacaataattccgacgagaaactgggatcagcccagtatagaacgcatagtgtttgattatccacgagttgcagcttataatgatggtaccattacaattttacagttacaaaatcacaaaaggcagaagaaatttaagaaattgatttatattccatgtacaacaccacaaggttgttctaccatggacttcaatattaatgctgcagtgtttggtaggtttgacggcagagtgtttggaaaactgctaagtaacaaatcgtacttaacgcccgtgatggaatttacgggaaggcatagtgcaggcgttactgccatttgtaattcagaatcctgggacacgtcaagagaggactggtctgttagtggctctgaaaacggtgaaattatatggtggtgcgaaaataagcttgttaagatgtggaaggtttctaatagggtaatttggaaactggctttttttaaagattggaccttaattatggatgatgaaaagctgtacattatccatcaaatgcaggaattgcacagtattgatattcctaaggatctggacgaacagcctatgagggtacggtttttcaagatggatttcggttccatgactttggtacttgctgacctgaataacgtttatacaatatcggtcaatcccaatggtaacttcggcaatttgagaaagttggagatgcctgaacaaatatgcgcagttgaaatagatgaaaaaacttctcaaagggaacaaaactggcaatttgctggtgatgacggctgctatatcagtcttttgacgacacagaacactttatacattatcaatataagagatctttcttcgtcaggcttaaaagttcaatgtaagataagttttgatgagcaggtatacgtatcgcaggtgacaaatttaatagttgtggtagcattgccaaatgttcttcaaatattgaacgcgatgacaggcgagttaataaagacagtgttgaaaaccgagaagtttcccgaatttttgaaggtatcgcaggataaaatcattatgggaagcggtaacgttttgaattatttaaagtttgtttcaagtgattcaaagaaacatcaccattccactaaaggtaaaaacacagtaagcaataagtggaatgaaactttgaacacggagctgcaatattatgatgaagatgaagaccttagaagaaaaagacagtcagaaatatcaagattgatcgatgcgtatggtggagaccttgaactttcaggcgacaccgatgaagaaaacgacattcagttgagaattgcactcttagaatcacaggaggcgcaagcacggaatcaagctgaagcgggggagcctgtcggagatgatgaagatgagcagttaagaagggcgctggaggaatctcaactgatatatgagacgcaaacgaatagctctgcgaatcatggtaatagtacgaatgatgagatagatgaagatgatgaagagtttctcagagccatcagacaatcaagagtggaggacgaaaggagaagacatcttagaaatcatactacaggtcgacgaaatgggcccttgagcgacgataattttgctacatatggtgcagcagagtcatccgaacgaacctcaactgagaacactatcggtagttctgttggcgttgatgctagtaataatgttgatgaagacttacaattggccattgcgttgtcattgagtgaaatcaattga

SEQ ID NO: 77872 - DNA, 939 bp, Saccharomyces pastorianus
atgtcgatagtagagacatgcatatcgtttgtttcgacaaatccgttttatccattttgtactggattgcttctgaattgtgtggttacaccgctttacttttggaaaacgcaaaatggtagaatcgtggtcgtttcattgctgcaattcgtagtactttatgccacagcgtttatttcgattggaactgataaatctctttacagaaataaatgggtcgcgctaccgctatccaagaagacccgcatttctcgtaatactagtctgtactgcttcaagttaaagtacccatttgaaagattgcatattcccatgggataccacctggcagtaagggttacaataaatggtgagcgattagtgaggtactatacgccagtaaatgttcctaatacggagggtcacttggaattagtagtcaagacgtataaacatggtgtcgtttctaagtattttgataaattaaaaattggccagtatgttgaatttaaagggccgttaggtgagctggaatatgatcaggacaccgcaacagagttgggtataatcgcaggggggtctggtataacccctgtattgcaagtgctgcaagaaatcataccctctccagaagacctaacacacatttctttgatatacgcaaacgaaacagaggatgacattctcatgaaatcacaactagaccacatggctaaggagtacccgcattttaaagttcattatgtaattcataagccaaacggtaaatggaacggtgatgttgggtacgtaactctagaggaaatgaaaagatacctgcctaaacaagcggaggaccatcgtttattgatttgcggaccacctaaaatgaatgaaatggttttgaattatgcaaaggagttggggtggagtaatgggtttcacaaaggtaatggaaccgataaagtttttgttttttaa

SEQ ID NO: 77873 - DNA, 1581 bp, Saccharomyces pastorianus
atgtctactatcccatttagaaagaactatgtgttcaaaaactgggccggaatttattctgcaaaaccagaacgttacttccaaccaagttcaattgatgaggttgtcgagttagtaaagagtgccaggctagctgaaaaaagcttagttactgttggttcgggccattctcctagtaacatgtgcgttactgatgaatggcttgttaacttagacagattggacaaagtacaaaagtttgttgaatatcctgagttacattatgccgatgtcacagttgatgccggtatgaggctttaccaattgaatgaatttttgggtgcgaaaggttactctatccaaaatttaggctctatctcagaacaaagtgttgctggcataatctctactggtagtcatggttcctcaccttatcacggtttgatttcttctcaatacgtaaacttgactattgttaatggtaagggcgaattgaagttcttggatgccgaaaacgatccagaagtctttaaagctgctttactttcagttggaaaaatcggtatcattgtctctgctactatcagggttgttcccggcttcaatattaaatccactcaagaagtgattacttttgaaaaccttttgaagcaatgggataccctatggacttcatctgaatttatcagagtttggtggtacccttatactagaaaatgtgttctatggaggggtaacaaaattacagatgcccaaaatggtccagccaagtcatggtggggtaccaagctgggtagatttttctacgaaactctattatggatctctaccaaaatctatgcgccattaaccccatttgtggaaaagttcgttttcaacaggcaatacgggaaattggagaagagctctactggtgatgttaatgttaccgattctatcagcggatttaatatggactgtttgttttcacaatttgttgatgaatgggggtgccctatggataatggattggaagtcttacgttcattggatcattctattgcgcaggctgccataaacaaagaattttatgtccacgtgcctatggaagtccgttgctcaaatactacattaccttctgaacccttggatactagcaagagaacaaacaccagtcccggtcccgtttatggcaatgtgtgccgcccattcctggataacacaccatcccattgcagatttgctccgttggaaaatgttaccaacagtcagttgacgttgtacataaatgctaccatttataggccgtttggctgtaatactccaattcataaatggtttaccctttttgaaaatactatgatggtagcgggaggtaagccacattgggctaaaaacttcctaggctcaaccactctagctgctggaccagtgaaaaaggatactgattacgatgactttgaaatgagggggatggcattgaaggttgaagaatggtatggtgaggatttgaaaaagttccggaaaataagaaaggagcaagatcccgataatgtattcttggcaaacaaacagtgggctatcataaatggtattatagatcctagtgagttgtccgactag

SEQ ID NO: 77874 - DNA, 309 bp, Saccharomyces pastorianus
atgtttttgttttgttttgttttgttttgtagtttagtttttcccttggctcgaggcgttttcgcgtggcataacccggccggaaactacagtgatactatcgtctggcatatatatatatatatatatgtaaactatacttatattaatagtttccgatcgtcttattactcacttactatcaatgaaagcactatttcattacttaaaaaatactttctattgcagaatctgaaacaatcagttataatggaaaaagtatgcaattgtgttttcttaaagaaggatacagatatttatatatgttag

SEQ ID NO: 77875 - DNA, 1257 bp, Saccharomyces pastorianus
atggactatttacatgtatataacaacaaccaggcgcacgttcccagaacacctccaggcaggcagtacctatcgcccgttctgcccccaatcatattggcgttagatcaacaacattcgctgacatttgggtactccagccccaggtgcttgccaacacccatattgccttctatgagcacaaatacgcccgtccattggtcacaacaggttgtcactatccctgtcgctgtacgaaatcatgccgcaatgatgcctattatcacacctatgacctccccaagacctcagtttgaagcaacggctccctcaccccctttggccccggtcgccataaagctgccagatttgaaactaccaccgtcgcctgtgcccagcacagtagaggacagagtttcacatcctatcctgcccaaaattgtgatcgggaatggcggcggtcgtgatgttgagcgagatagtaccgaggaattaattaggaagattccaaactacattgattgtgcaaaaacaaaggcgcaattgagcaaagttaggtccggtaaacaactaattgcatgcgcacaggaatatcaccatccagtaaacaaggacgagatcgaaaatatcaacaacattctaaacttcagggactttattttcaagcatccaaaatcctccttcgagttcctatgtaccctgtcgtttgagcagttcgttagagtatattccttcattagtttcatctacaggacaaagaaaatcaataagaacaagtacaaactcgtttgtgagatgaatgttcacgagcaactcagcaataagcgtatacaaagaacaaggactcctgaaaagtacaaaatacatttgatctgcgagtcaaaactcatactgaccttcaaccactgtacgaagacagtaaaatttgagtctatcaatggcgggcactgccatccgatttcagccaaccacattatcaagccctccctcttccttacccactgcattaataaatgccaccagaccgtgtcagaccctaccgatttgaaattggcattgagagacgccttagaagcccttgatcatgaaaggataggattgtctttcttaaagaggagacatttcaagcgctcacaccaagcatcatcactctcgaatgccagcgccacattgaagaaacaagaagatcataacacatttggtgtacatacaggaataattcatacggcaaatttcttcatgtttaatgcatctagcgatatattccagaggaactaa

SEQ ID NO: 77876 - DNA, 1950 bp, Saccharomyces pastorianus
atggtttcagcgcaagtggctaccgagctaggacagcctataccactggacactcaacatgcggtatctgtatgtttcccgacatggaaatctgtaatttcgtatgtggagaaagaccccaaagttttagggtgtttaaagtctggctaccccaggttttggatccacccctcgattcaaaagctgcgtgatattttaatagaaaagtatgctaaagaaaacgaaacgtgcttttgcttcccctcttatagagttgccaaacggtgcagagagtatgtaagaaggaagtgcgcgcatcgcaatggcaaagtaaggatattacagttagccacggcgaaacctatcaacgaggagcagaagacgtggaaaagagagtgtaagattgcggtagtgtttgtagatggggcatacgagaatatattaaaacagtattggcaatacaccggagagatcatctcaagcagactagctgaatatgttttgcatgaacttttcatggtagaaaagaaatccagccctgcagaggaaaaggaatacatagagatgcggtatggcaggaatctgaattttgcatttgccgatcgagccaaggaattgattaagaagaggatcgctacaaaggttatagataaagatgagcacgatgaggaggaaaactaccatttcttagcaggtaaccaagatgaacaggacttccaggacacgtttctggattcatccctcaatgaggctaaccacggagaagatcatgacggcgggattagcggtgaagtagacagtcaagaagaaccgcataatggccttgtttccactatacccccggagcccatcgaaatgagcacgatagaggaagagcaatccgtagaggaagatgccgggaggtgtgcattaagggtttgccctgagagagacgtttttttgtttccgagcggcatggcgtcgatattcactgcgcatagattgctgttgcaatgggactcactgcgtttgaatagatccagaaatggaagcgacgtcacctcgtcacctccgaataagaagaccgtgatttttgggttcccttatgcggatacattacatgtcttgcaagagtttaatgaaacgtatttcttgggagaaggagatgagtcttcaatgaaagaactaacaaaaattttacattccggggagcaaattcttgccgtttttatagagaccccatcaaacccactattaaaaatgggaaatttactggaactgaaaaggctttcggaattatttgggtttttcatcatcattgatgaaactgtgggtggaatagttaatattgacggtctaccgtttgctgatatcgtttgcagttcattgacgaagacatttagtggggactctaacgtcattggtggctctatggttttaaatccacaaagccgggtatacgagtttgcctcccgttttatgcaattagaagacgaatatgaagatttattatggtgcgaagacgcaatttacctggaaagaaattccagagatttcattgctagaaccatcaggatcaactacagcaccgaatacctcttagataaaatactgaagccacacgtaggcgaaaataaactattcaagaaaatctactaccctaatctaacctcaaaagaaacactaaccaactatgacatggtgaggtgtaagaaagaaggtggatacggcgggctcttttcactaacgttccatgacgaagatcatgctgcggccttttatgacaatctaaagctgaacaagggtccttccttgggcacaaatttcacactcgcattcccctatacgctcatgacatactaccacgaactcgacatggctgaaaaatttggggttgagagaaatcttctcagaatcagcgtaggcctcgaaagtcagtcaatattgggcaagatcttccaagaggcaattgataaaacggtagaaatatga

SEQ ID NO: 77877 - DNA, 180 bp, Saccharomyces pastorianus
atgttgaaaagattccctacccctatccttaaagtatactggcctttctttgtggctggcgccgcagtgtattatggtatgagtaaagctgccgacctttcttctaacacgaaggaatttatcaatgatccaagaaatcccagattcgcaaaaggtggaaagtttgtggaagttgattga

SEQ ID NO: 77878 - DNA, 3756 bp, Saccharomyces pastorianus
atgtcatcggaagaattcaaaggacttccgatcaaacgagatatatcctccactatctatgctgatagacctccagcattatctgctcctccgtgcgttggtgctactgggaatgataagatacaagtactaccgatccccaagaaatctaggactatcaaaaccgataagccaagacctttcctatgccacatctgtacaagggggttcgtgagacaagagcatttaaaacgacatcaaagagcacatacgaacgagaaaccctttctctgtgtcttttgcggaaggtgttttgcaagaagggatctggttttgcggcatcaacataaactacactcagcactggtttctaaagaatctataaactctaaggataaaactgaaatagatgctatcaatgataagaatataattcagattcaaggcaataagcaaacaattttaccaacgcctagcaatccgctagcaaagacggcagcacagttgaaaaaagccgccaaagagaaaaaaaatggtaagcaaggcaaattagacctgagtccttcatacagggcaaataatcatagtacagacgtttcaccgtcagtggggaactcatcaacacctgctgtaatcgaagagacagactcgtcttcccattttccgcttccagatacaaatattccgaccaaatcaaagaggcatgcatcattttcggcatctagcgcattcacatatagttcagataactttcaaaaactacatcaacaagcaaaatcggattttgatgaactacaggaaagtatccctcaccaagtgggattttctacaccccaattaacggcacaacaacttatagaaaatgctattgaatctggtgttgtggacttggaaactttggatttaccgccatttttatcgttagatggcttaccacccgcgagctcaagtgctgctgtagcagcatccgagcagatagatatctgtccctcctctgcgacagacactatctctggcgctaacagtactccaaaccaagcagcaacagctcctccttttcaattaccaatagcaagggaaagcagttccttgtttttggcaaataccccttatttatctgactttttaacaatgggatcttcctatggtggttctggagggtttgccaaatctatcactgctgatcccagtttggactatttcaactacaaaaaccattcgcatccagattcaaggcataacaacagctccagcggtatcaattatagcaataataaaaacaacaatgaatcaattgaaaaatctcaaaacaacagtaacgtaatcaatgaaactattgaccacactgacatccatgcccatcacgcggatgctcatgatgactccttcatagaaagtgaagagtggctctctaagtttattatagactctcagattgataatgatcttaaacttaatataaaccattttaacgatattgggtttaacaatttgcaccctcaaaatcctacgacccattctgaaccaagaaatatgcataatgaaaacagagatatgcaccgatctgcaagcaaatttcaatctgtatcggaaaacatctctccaagggaacaaatgtctttgtttaaaactaaacagaacaaggccatttcaaaatttctgtctgacgagaaaattccttcaactgcgtcaccatcttcctctgcttcgccagttcagtttgataaaaaaaatgttgacatcaatgaatttttactggacgagtccgtgtccaacttattcacgactaggcaaattgatttattcaagaaaaatgtgaacttatattcaccactatttcaaaatcaaaaagacgcagtctcatctacaagcctgacgccatcgttgactacacaaactgcaacgacacaatcggggccagggtggacagattcctcccaaaagctgactttctttacagaacagttgagaaatttaattattaaagaaaacaatctaaagtctaatctctttcccactgttgatgaactgaatcattatgtcgatttatatcaagtggaatttcataaatatttcccctttattcatttatactcaattataccatccagtgaaaactatcctttagtaatatccatcagtatgattggtgctctttacggatttcattccacacatgcactactattgtcgaaaatagcaaggacgagagttagaatgttcctagaaaatactcgaagcaatcatgataagacaccaatttggctaatgcaatctttagtcttattaacgtttaccagcattttctccaatgatatgaatgcctttagaaccgtgaatacccagataatgattttggttcagttgattaaaatttcaaagttgaattacccattagaaaacttcattaagccaccgatcgaaagtgaccatgttttagaatatcaagataaccccgctgttttgaaccagttcaaggctcaatacaatacccgtgaacaaataaacagaaatttcaaatattttatcttagcacaatcaagaataagaatatgccacatagtcctgctgatttctaacctctttaaatccttagtggatttcgattgttgttttcattccatagatttgaagtgtggtgttccttgttacaacgaggtactgttcttttgcgaaaattcaagaacttggaatgagaacttgacgagattcaatatcgttttggattccaagttttccctaattgaagtatctaatggtgaatcaaactacgagaagtgcttgatgtatttgtcaaacggtaatccttatctttataaaaacgctaaaatctcattcaagactttgctatctttactgatctctattcatgaaaagataaacatcgaaagagatgcgttgaaagatagttacgaaagcgatttccatgcgaagaatgttcagtggcggatgcattcaagacccttggtcgccacaatgctaaaacattgggaactactttacatcaaaaatggtgggatattggctctcagtgacgaaaacctgccaataataaatactaatccgtcgtttagattgataattcccttgtacttctttgcaaagctaaggaagtgccttgatattgctccaacactaagatgcatttggaaccaagactggaactcaatgaatagctctttagaaaaagtgtgctacgagtgggaatcactacgagaggccacagagtacgctgtatccgttatcactttctggattgatactgtctctgtaatgaagggtaaatcgacacagactccaatcttcaccattacttgtatttttgtttcgatattggtcatagcggggtacatgaggagattggaagactttgctcaaaacaaaaacagtgattgtatgattggtagtttaaaaagcactgacaggatcttgtggttaaaagcattcaaaactttgaagaggatcgaatcacatttatctgaaagagagtataaattacaaacatttgctgagtttttaagggttccagataatggcagtcttgatattgagagtttggactcatccttaatagagaatactttgaattcacatgatgttaccaatcaagcgctggacataatcacgagaacaagattgtcatcaagaacattgtattgcggtgctagaattcttggcgatacaccagtctggcccgtatctctgttgtttgctcatgccttacaatctagggctatttacaatatcaaccacaggaaatctgtaaacagtgtatag

SEQ ID NO: 77879 - DNA, 606 bp, Saccharomyces pastorianus
atgtcagccaatgtacaagaagctgcaaatgcagctatagagccggccagtttcgttaaagtcccaatgcctgagccaccaagtagtttgcaacaattgatcaatgattggcaattaatcaagcatagagaaggtgggtattttaaggaaacagataggtctccctacaccatggaagtagaaaaaccagtaaatggaggctcaggtaatactgaaatggtaacaagaaatcaatctacgttgatctattatctactaacccccgacagcccaattgggaaatttcataagaatattaacaggatcatacatatcttacaaagaggcaagggtcaatacgttctagtatatcctgatggtcaagtgaagtcatttaaagttggttttgactataagaatggagaagtctcgcaatgggttgtccccggaggtgtgtttaaggcaagtttccttctgccaaacgaagaatttgacaacggtttcttgattagtgaagtagtggtaccaggttttgactttgaggaccataccttcttgaagggtgaagatgaactgaaacaccttgtgggacctgaaaaggcagctgagttagcttttttagcttga

SEQ ID NO: 77880 - DNA, 2835 bp, Saccharomyces pastorianus
atggacacgcagattgcaataactggcgttgccgtcgggaaagaaatcaataatgataattcaaagaccgaccaaaaagtttctttgccgaaggcggatgtcccatgcatagataaggccacacaaactattatagaaggatgctccaaagatgaccctaggctctcgtatcctacaaaactagagactactgaaaaggggaagaccaaaagaaactcatttgcttgtgtatgctgccattccttgaagcaaaaatgtgagccttctgatgttaacgatatttataggaaaccttgtcgaaggtgtctgaaacacaagaagctgtgcaagtttgatctttcaaaaaggacaaggaagagaaagcctagatcaaggtcacccacatcttttgaatcgccgatggtgaatgtctctactaaaagcaaaggcccaacagattctgaagaatctagcttgaaggatggtacatcttacctcgccagtttcccttctaacccaaacgctaaacaatttccaaactctcggacagtcttacctggacttcaacaaagtttatccgatctttggtcaactttaagccaaccaccctcatatggagcaagagaggccgaaaccacatctaccggagagataaccaccaataatcatacaaaatccaatggcagtgtgcccacaaatccagcagttttagcatctaacgatgagcatactaatattagtgatgcgccagttatatacagtacctacaactcccccgtaccgatttcatctgcgcctaccagcattaacagcgaagcactgtccaaacatagacctaaaattgtgggtgatgaggaaacacagaacgtcaaagtgaaaagacaaaagaaatcatactctagacatatgacacggtcgttcaggaagcagctacaatcactgattatttctcaaaaaggtaaaattagagatatttcgatgaagcttgacacttggtcaaagcagtggaatgaccttgttgaaaagagcatgtttttgccaaccattgcagatcctgtgtcagtaagaatcatatctcatgaagaagcgacgcttcgcttacatctttataaaaccgagatttcatatttgtcaaaattaccattcataaaggtcgaagagaatgttagtgtcgatgaattaagaaagaagaaacctattttattctccgtcattatgtcatgtgtttcaattgtactaacacccaaacaaaccaccagaggaactattatgaagcttgatagttttgtactaaacttaattacaaatcagattttcaaggctaataataaatctatcgaaatcatcgaatcactgtctacattatgtctatggtataatttttttgaatggtcaagtaaaacgagataccatatatttaattacatctgttgctgtttaactagagatttggggcctacctatgtcaatcgatcctttggtatgtttagtgacgaggatccaaagagattcaagtcacctttggaactttacagtaatggcgccagtttaactttattggtatacatttccgcactcaatatttcaatttttctacgtcaatcaatacaagctcgttggagtcacgtcacggaaaaggcctgcgaggatttagttaaagagacgaaaaaatcgcgacattatgacaacgataaactattacttgattcagctgatgatcccatcttagttcaatttgctaaaatgaaccacgtcttggaaaatattcacacacacctacatgagagagatctgaatgatgacgagtttgatgatcctatttttactaaaaagtatcttaataaactaatggaaaaataccacaagcaattgcaagagattttcactaaacttgacagaaacaggccaagagtgattgcattttattactctgtagaagcttatttataccagtataaacttgcagtattcatcggggaaatgtcgcataccataaacgaaaaagtcgaattgcccagagaaataatggatgattttgttaaatgctatcattgctgtaaatctgcccttgaggaattttccaagttggagccaattttaattacctcattacctttatttcatacttccaggatcatatataccgttggtatgctcttattaaagctgcgctattccgtagtcgctattccttcgtttcacgatttaatgccccttacagatgatgctattgccttggtaataggggtaaacaatcttttagaaaaaacatcagagttgtatcccttcaacaactttctttacaaatttaggtatgttattgcgttattttgtcaaacctacgcaaacaaagttattgatgttgctgatcgctacaatgcagaaagggagaaactaaaggaaaagcaggtcatagacgaagtaagcaatggccacgatggtacgaagccaataaatgcatatgtaaccgagtcacaaaagatgccaacagaagaagatccaattatcgacaataatacaaaccaaaacataaccgctgtacctgatgaaatgctgccagtatactcaagagttcgtgacgatactgtcgcaatgaacctgaatattaacagtacttcatatatgaatgaatccccacatgaacaccgagagagtatgacaggcacaactctattaccaccaccatttatttctaatggtgtgactaactctgctgactcaactaatataaaaccatcacctagttcatcggtagacaacttgaacgattatttgacggatataaactccttagcatggggcgttaattcattaaatgacgagttttggacagaccttttcatgaatgatatttga

SEQ ID NO: 77881 - DNA, 1824 bp, Saccharomyces pastorianus
atggagctgatactaaacagcctcatttctgatgatttaacagaggaacaaaaacggttaagtcttgatttcctacaggatatcctacaatctaacacgaaagactatgaaagttatttttcatctagggctgttcctggtagcataaccgaagacatagcagaaattgatgctgaattatctgcccttgatagaaagataaggaaaacactactagataataagtctcagattatcggaaatattcttgaaaacgatgatagggctcaattggatgatatagccaagtctttggagcaattatgggaattggatactaatattaataaggcagccgatcgaaacgttacaaatgacgatataaacaatgaaagcgtttctattgatgactttttggaagacgataaagaagacaacgacacaggtcgcatcatgacgactgagagtaacaatatggcaagaaagaagaaggaggatgagtttcacaaggcattaagtaggttaagaaacagaatttcaactaaagaagatgacaaggacgacattagatctgacacattagtcactgtactagaaaatttggatagcattacggatttgatggaactaccatttttggcccgcacatgtatcagaacaggtcattaccaggaggccgtcatgctatacacacacactacttccctgaggtcaagattccctggttcaaccattgtggatgaagtttgcgaaaaagttttaaacgaaattagtactaccatgttatccgggctggtaaaattactgtctactaatgtatcagtaaactcactaaagaaaatactacagtacttgaattcaattccaccatttgatggaaagactaataaatcattattaagtgtgtttttagccatgagatacaaattcattaccgatgaaatagcatcatatcctttggacgttgtgtcttctaatgaatctttaattgaaatgatggttaagaggaaaattgaagtcctcagggaacatgtctacatgtccttgaatgtctttctgaaaagcttcttgtatgatacaaatgacttagagattcctttcccagaggaactagaaagtactgtgctaaggataaatgggactaacgaagagaaagaaattgaagaaaaggagaaagaaacaaagaaggaagaatatcaaaaacaagatagcgtagcgaacaatgaagaagatgtgacagaaaataaatcgatagaagatgtacaagaggaagtacaaggcaaagtggaaggcgaagatgatggagcagaaaggaaaacagaaaatgagatagaaaatgaaacagtaaacaaaacagaagacaaggctgaaaaagaaaaagaggaagaagtaaataccaaagataacaaggcagaaaaagaggaagaagaaattaataaggttgaggtgaccccagaagagccaagcaaaagcatagataacaaggcagaaaaagaagaagaagaaattaataaggttgaagtgaccccagaggagccaagcaaaaagattcggacttcaaaaagggaaaacaaaatacctacaaatgcagtcatgttgcaattcgttgataagtgcataacatacgtattaaaagacctcactcgtgggttaaatagcatcaagctgagtgactccgtttgcctgcagttggtgtactgttcattccgtctttgcgacctgaatcgaaactaccaccacctcttcctaaaaaaaatcaatgacactagcttgtttacgaccgagcagctcgcccgggcaattgacaagagagcagaactggcctctaaatatatatactcctag

SEQ ID NO: 77882 - DNA, 1659 bp, Saccharomyces pastorianus
atgagtaccgactttgatagaatttacttgaaccaatctaaatttagcggtagattccgtattgctgattctgggttagggtggaaaattagtaccagtggtggctctgcagcaaatcaggcaagaaaaccatttttattaccagccacagaattatctaccgtccaatggagtaggggctgcaggggttacgacttgaagataaataccaaaaatcaaggtgttatccaactagatggattttctcaggatgactataacttaatcaagaatgatttccatcgccgttttaatattcaggtagagcaaagagaacattccttacgtggttggaactggggtaagacagaccttgccaggaatgaaatggtttttgctttaaatggtaaaccaacttttgaaattccttatgctagaataaataatacaaatttgacctctaaaaatgaagtaggaatagaatttaatattcaagatgaagagtaccaaccagccggtgacgaattggtagagatgaggttctatattcctggtgttattcaaacaaacgtcgatgaaaacatgaccaaaaaggaagagtcaagcaacgaggtcgtaccaaagaaagaagatggtgctgaaggagaagatgtacaaatggcagtagaggaaaagagtatggcagaagcattctatgaagaactaaaggaaaaggcagacatcggggaagtcgctggtgatgcaatagtttccttccaagacgtcttttttaccacgccaagaggtcgttatgatatcgatatttacaagaactccattagactcaggggtaagacctatgaatacaaattgcaacatcgtcaaatacaaagaattgtttcgttaccaaaggcagatgatatccatcacttattgattttggcaattgaacctcctttacgtcaaggacagaccacctacccctttcttgtcttacaatttcagaaagatgaggaaacggaagtgcaattgaatctagaagatgaagattatgaggaaaattataaggataaattgaaaaaacaatatgatgctaaaactcatatagttttaagtcatgtattaaaaggtctgactgactgtagagtcattgttcctggagaatataaatccaaatatgatcagtgtgcagtttcatgttctttcaaagcaaacgagggttatttgtatccattagataacgcgttcttctttttaactaagccaactttgtacataccattcagtgatgttagcatggtaaacatttcaagagcaggacaaacttctacgtcatcgaggacgtttgatttggaagtggtactgcgttcaaatagaggttctaccacttttgccaacatcagtaaggaagagcagcaattattggaacaattcctaaagtctaaaaacctaagggtgaagaatgaagatagagaggtacaagaaaggttgcaaaccgctttaggttcagacagtgacgaagaggatattaatatgggttccgctggtgaagatgatgaatcagtagatgaggattttcaggtcagctctgataatgacgcagacgaagttgcagaagagtttgattcagatgcggctttaagtgatgctgaggggggcagcgacgaagaaaggccttcgaagaagcctaaggtagaatag

SEQ ID NO: 77883 - DNA, 1395 bp, Saccharomyces pastorianus
atggctttgactcagtttgaaaatgatttggaaatattaagagatatgtacccagaactggaaatgaaatcggtaaaagtagaggaggaaggtgaattccctcaaagaattaacggaaagttactgttcaagatatcactattggccgatgtaaatattgagttcggcgagcaacatatgttactttcaaacttatctaatgaatgcgtggagttcaccatatatagctgtcattatccggacattcgacggtgtgttgttatggatatcaaatccttatggatatcaacagatgaaaagaagatgttaattgacaaagtgctgagacttgttgaagaaactgtagatatgagtattgagttcgcggattcgtttacctccatccttatcctcatctttgggtttcttatagatgatacagctatattactattccctaatggaataagaaagtgcctgacacaggatcagtatgacttgtttaagcagataggtgaggaagccaccctccaaaaagtgagcagatctaactaccattgttgtatttgtatggaaatggaaaagggtgttagaatgatcaaattgccatgtgaaaatgcgaatgtagaacactatctttgcagaggatgcgccaaatcttatttcactgcaatgattcaggaaaaccgaatatccagtgtaagatgtccacaatgcgaatacaaagaattaaaactagaagatttcaagagctataaaaaaatgctgaaggcattgtttacacctttgattccagtgtccttcttaaaagaggttatcgatacagagctatgtgaaagatacgaaaaaatgttctacaaccaggcggctacaagactctcaaaatattgtccgtatgcttgtgtgacttgtcgaagatgtgatagttggtgcacaaaggaagacctcgatgatgcgatgattcagtgtcaaaaatgtcattttgtattttgctttgactgcttgcatgcctggcatggttacaacaataaatgtggcaagaaagtttcgttatcgaccgatattattgaggaatatctagatgataccgttacttcatatgagagaaagcggaaactggaggcaaaatatgggagaagagtattagaacttgaagtcaatgattaccttgctgaaaaaatgttagatttagcgattaaaaaagagggttcgaatttgcagcgatgtccaaagtgtaaggtagttgtagaaagaagtgaaggttgcaataaaatgaaatgcgaagtatgcgggatgctgttctgttttatatgcggggtattactttatcctgaggacccttatgaacattttagagaagcatattcaggctgttatggacgattatttgaaggtatgcctggcacagaaacttga

SEQ ID NO: 77884 - DNA, 1110 bp, Saccharomyces pastorianus
atgttattccctaaacgtctgattgtgtggggtgttctattgattttaagtttatcacaatttgtcctctacctgccagccacaacatgtacgaactctaagggacttaggttatgcgctccacagtttactataactgtgattggaggatccagtactgcaaatgagtttattgcaagtgtaagagaatttctgcgattgatttcgtacctgacaattgacatgggttggtcgaatgaattcactgatccaagtgtgtatgaggatgaaaatttggtggacacatttcagcctgataaggtttttgagctcaattattttggattttgtaaacggagtaataaaagcaaagtttattgtacctctaatgagaattatggcatggacgtacttgaagtacttgtcagagacgtcgggattcaattaggtaacatttccactacacgatcgaatgaaaccaaaaaattcggagactctctcgtattgacctaccgtttggcattgacatctattcgtgattttttgaaacacgacaagcacacaggaaatgccctatcaaaggccttgattggcagtcctgatccaaatgtaaaaggcgcgtcaccaacaaaaaactatctgaaaggtgtcaacctggcatttatactgatgatgttcaacggcatggttttttactttgcagtgttggaaataatagtcggattcctcagtatctgcgtagtgtcagcctttgggggagcacttagtgttgggaaacgacaccgcttatttcctatacttttgaagtcatcaagttcaatattagttgttattgctacattgacaatattatgtaccatcgtatatttgattgcactgaaaacattagaacctgaagaggtaacagacgtaggatctgacaacgctgctgtacacactacaggctgggaactgttaaaagtaaacgtgggaagtgggttcattatggggctcgccaggtatgccatccagtgggtcctattggtactcgcatttcttgcagcaaatcattacaaagctaagcccaaaaagtctgataagtatacagaagacacatctaactccccttctccagacttgatggagaagtaa

SEQ ID NO: 77885 - DNA, 2760 bp, Saccharomyces pastorianus
atggcaaaaacgttgaaggatttacagggttgggagataataacaactgatgagcagggaaatataatcgatggaggtcagaagagattacgccgaagaggtgcaaaaactgaacattacttaaagagaagttctgatggaattaaactaggtcgtggtgatagtgtagtcatgcacaacgaagctgctgggacttactccgtttatatgatccaggagttgagacttaatacattaaataatgttgtcgaactctgggctctcacctatttacgatggtttgaagtcaatcctttagctcattataggcagtttaatcctgacgctaacattttgaatcgtcctttaaattattacaataaactgttttctgaaactgcaaataaaaatgaactgtatctcactgcagaattagccgaattgcagctatttaactttatcagggttgccaacgtaatggatggaagcaaatgggaagtattgaaaggaaatgttgatccagaaagagactttacagttcgttatatttgtgagccgactggggagaaatttgtggacattaatattgaggatgtcaaagcttacataaagaaagtggagccaagggaagcccaagaatatttgaaagatttaacacttccatcaaagaagaaagagatcaaaagaggtcctcaaaagaaagataaggctactcaaatggcacaaatttcagacgcagaaacacgagctacagatataacggataatgaggacggtaatgaagatgaatcatctaattacgaaagtccgtcagatatcgacgttagcgaggatatggacagcggtgaaatatccgcagatgagcttgaggaagaagaagaagaagaagacgaagacgaagaagaagacgaagacgaagaagagaaagaagctaggcatacaaattcaccaaggaaaagaggccgtacgataaaactaggtaaagatgatattgacgcttctgtacaacctccccccaaaaaaagaggtcgtaaacctaaagatcctagtaaaccgcgtcagatgctattgatatcttcatgccgtgcaaataatactcctgtgattaggaaatttacaaaaaagaatgttgctagggcgaaaaagaaatataccccgttttcgaaaagatttaaatctatagctgcaataccagatttaacttcattacctgaattttacggaaattcttcggaattgatggcatcaaggtttgaaaacaaattaaaaacaacccaaaagcatcagattgtagaaacaattttttctaaagtcaaaaaacagttgaactcttcgtatgtcaaagaagaaatattgaagtctgcaaatttccaagattatttaccggctagggagaatgaattcgcctcaatttatttaagtgcatatagtgccattgagtccgactccgctactactatatacgtggctggtacgcctggtgtagggaaaactttaaccgtaagggaagtcgtaaaggaactactatcgtcttctgcacaacgagaaataccagactttctttatgtggaaataaatggattgaaaatggtaaaacccacagactgttacgaaactttatggaacaaagtgtcaggagaaaggttaacatgggcagcttcaatggagtcactagagttttactttaaaagagttccaaaaaataagaagaagaccattgtagtcttgttggacgaactcgatgccatggtaacgaaatctcaagatattatgtacaattttttcaattggactacttacgaaaatgccaaacttattgtcattgcagtagccaatacaatggacttaccagaacgtcagctaggcaataagattacttcaagaattgggtttaccagaattatgttcactgggtatacgcacgaagagctaaaaaatatcattgatttaagactgaaggggttgaacgactcatttttctatgttgatacaaaaactggcaatgctattttgattgatgcggctggaaacgacactacagttaagcaaacgttgcctgaagacgtgaggaaagttcgcttaagaatgagtgctgatgccattgaaatagcttcgagaaaagtagcaagtgttagtggtgatgcaagaagagcattgaaggtttgtaaaagagcagctgaaattgctgaaaaacactatatggctaagcatggttatggatatgatggaaagacggttattgaagatgaaaatgaggagcaaatatacgatgatgaagacaaggatcttattgaaagtaacaaagccaaagacgataatgatgacgatgatgataatgatggggtacaaacagttcacatcacgcacgttatgaaagccttaaacgaaactttaaattctcatgtaattacgtttatgacgcgactttcatttacagcaaaactgtttatttatgcattattaaacttgatgaaaaagaacggatctcaagagcaagaactgggcgatattgtcgatgaaatcaagctacttattgaagtaaatggcagtaataagtttgtcatggagatagccaaaacattgttccaacagggaagtgataatatttctgaacaattgagaattatatcatgggatttcgttctcaatcagttacttgacgcgggaatattgtttaaacaaactatgaagaacgatagaatatgttgtgtcaagctaaatatatcagtagaagaagccaaaagagccatgaatgaggatgagacattgagaaatttatag

SEQ ID NO: 77886 - DNA, 738 bp, Saccharomyces pastorianus
atggctacaccaagcacgggagcaaacaattctatacctgcggtacgaaatcaggttgaagttcaggttggattagtaggggatgcacaagtagggaaaacatcgctgatggtgaagtacgtacagaacatatacgataaggaatacacacagacgctgggagtgaactttttgaaaagaaaagtaagcatacgctccacggatattatattttctataatggatttaggcggacaaagagaattcatcaacatgctcccaattgcgacggtagggtcttcagtgatcatatttctgtttgacctgacacgtccagagacgttgagttcaataaaggagtggtataggcaggcgtacgggctaaatgattcggcaattcctattttggtgggcacaaagtacgatttactaatagacttagacccggaatatcaggaacaaatctcgagaacgagtatgaagtatgcacaggtcatgaatgctcctcttatattctgctctaccgccaaatctataaacattcaaaaaattttcaaaattgcactggcaaagatctttaatttgacattaaccatcccagaaatcaatgaaatcggcgatcctcttttgatatataagcacctaggtggccagcaacatcgacatcataacaaaagtcaggatagaaagagccataatatcaggaagccctcctcgtcgccctcatctaaggcaccatcgccgggcgttaatacatga

SEQ ID NO: 77887 - DNA, 1179 bp, Saccharomyces pastorianus
atgcctctgtcacaaaaacaaatagaccaagttagaaccaaagtgcactacagtgaagtagatactccattcaataaatatttagacatcttaggaaaagtaaccaagctgacaggaagcattataaatggcacattatccaatgatgatagcaagattgaaaaacttactgagcaaaatatctcccaactaaaagaaagtgctcatcttcgatttttggatctgcagtcatcaattgacacaaagaaagtagcagacgaaaattgggaaacatgccaacaggagacattggccaagctggaaaatctcaaagataaattgcctgatataaagagcatccatagcaagttgcttttacgtattggaaaactacaaggtctttacgattctgtccaagtaattaacagagaggtggaaggcttgtcagaaggccgtaccagccttgtggtgacacgtgcggaatgggagaaagaacttggcactgatctggtcaagtttttaattgaaaagaattatctcaaactagttgatccgggcctgaaaaaggatagttcagaggagagatatcgtatttatgacgatttctctaagggcccaaaagagttagaaagtatcaacgcctcaatgaaatcggatatagaaaacgtaaggcaggaggtatcgtcttacaaagagaagtggctaagagatgcagaaatatttggcaagatcacatcaatattcaaagaagaacttctgaagagagatggcctgctcaatgaggcagaaggagataacattgatgaagattatgaatcggatgaagatgaggaaagaaaagagaggtttaaaaggcagagatcaatggtggaagtgaatactatagaaaatgtggacgaaaaagaggaaagcgatcatgaatatgacgatcaggaggatgaagaaaatgaagaggaagatgatatggaagtagacgttgaggatataaaagaggataatgaagttgatggggaaagcagtcaacaagaagataatagtcgccagggtaataatgaggaaacagacaaagaaactggagtgatagaagagccagatgcggttaatgacgcagaggaggcagacagcgatcactcaagcaggaaacttggaggcactacaagcgattttagtgcgtcttcctctgttgaagaagtaaaatga

SEQ ID NO: 77888 - DNA, 1131 bp, Saccharomyces pastorianus
atgtcttataaattcggcaaacttgccattaataaaagtgagctatgtctagcaaatgtgctacaggctggccaatcctttcgatggatttgggatgaaaagttaaaccagtacagcactacaatgaagataggccagcaagaaaagtattcagtagtgattttgaggcaagatgaagagaatgagatcctggaatttgttgctgtcggcgactgtggcaatcaggacgccttaaaaactcatctaatgaaatattttagattggacgtgtcactgaagcacttattcgataatgtttggattccaagtgataaagcatttgcgaaactttctccacaaggaatccgtatcttggcccaggaaccatgggagacattgatttcctttatttgctcgagtaataataacatttcaagaattacgagaatgtgcaatagcctttgctctaatttcgggaacttaatcacaacaatagatggggtcgcctaccattcgtttcctacaagtgaggagctcacttctcgagccactgaagccaagttgcgtgagctgggctttgggtatagagctaagtatattatcgaaaccgcgagaaaactggtgaaggataaagctgaagctaatattacttctgacaccacataccttcaaagtatctgtaaagatgctcaatatgaagacgttagagagcacctcatgtcctacaatggtgtaggccccaaagttgctgattgcgtttgtctaatgggacttcacatggatggcatcgtccccgtagatgtccatgttagtagaattgcgaagagggactaccaaatatctgcgaacaagaaccatctcaaagaattgaggacaaaatacaacgccttacctatctcaagaaaaaaaatcaacccagagctcgaccatattagattaatgctttttaaaaaatggggatcatacgctggttgggcccaaggtgtcctattctctaaagaaatcggagggactagtggtagcactacaactggtgctataaagaagagaaaatgggatatgataaaggaaacggaagcaattgttacgaaacaaatgaaactgaaagttgaattgtctgatcttcacatcaaagaagcaaaaatagattag

SEQ ID NO: 77889 - DNA, 5040 bp, Saccharomyces pastorianus
atgcgttcaatgaattgcactacgaacaacaccaacaataccggccaaaaaacgaaaaacagtcttggctccagctttaattccagtaattatacttcttatagattccagacacgtctcaccgaccagattatttctgaggcgcagacgtggtcactttcatccctcttcaacttctcgtgggttgtgtcctactttgttatgggtgcctctcgtatgatcttcaggtacggttggtatctggcaactttatcgcttttaaggattccgaagtggatcttcttcaagttacaccatgttcagttcactctttccttttggctgatcctgtttgccctagccgtcatagtctttgtgacttacaccatcatgaaggagagaattctatcccagtacaagaggctgaccccggagttcttgccgctggaaaatacaggtaaatctggctccagcgccaatatcaatgcagcttccactcagtcagccaacgcgccacccgccataggttcctctaccacgggtgcaagctcgattatagactcaaaaaagcattcattgaaagatggcaacgaaaacgaaacctttctttcatcttaccttgaccaatttctcagcgccatcaaaatctttggctatctggaaaaaccagtcttccatgacctgaccaagaatatgaaaactcaaaaaatggatgagggtgagattttactgttggacagtactattgggtttgccatcgtcgttgaaggcaccctgcagttatatcatgaagtagatcattcagataaggaccatggcgatgaaactgaccacagtgacacggatggtcttgacgaccaggatagagatgaagaagacgaagaagatgatgatgacattgataactacgacaccaaatcttgttcttctaacctcatcgatgaagaagatgaatccgttggttacattcatctgaaaaatggactgggaaagtttcaactgctaaatacagtcaagccaggaaacccgctgacctccctcgtgagcattttaaacttattcacgcattccatgtcctcgtatggcaacagtaactttccctctgagttatcgtcacctatagacacaacggtgtcagtcaacaatatgttctgctcatcagagcagaacttctccaacacagattccatgacaaactccaccaacagctttccaacgttcccctcttcaatgcctaaacttgtcgcccgtgcggctacagactgcacaattggtattatcccacctcaatcgtttgccaaattaaccgcaaaatacccacggtctgcttcccatatcatacagatggttctcaccaagctataccatgttacgttccaaactgctcacgactacttaggtttaacaaaggagatcatggatatcgaagttttactaaataaatccatcgtttatgaattgccttattatttgaaagaggccgttattcgtaaatttaaaactgtagataagtcgagcggatcggctgatttagaaccgaaacccaaaaatagtaatgcttcctctaaattgaagaaaccgcccaaagcgaaaccatctgatggtatcattcaatcgcttaagattgctaacgccaacgctaacacaagttcgaattccctttcactaaaaccagaattcacccaccatccaagttcgagacatgtcgtactgggttcaagagaccaatttaatcctggtgatttactgtcaaatgtcccactgtctagaactatggatattctgtcacccaacccaatccataataacaaccgcaataaatcaaacggtattaacacttctacctctaaccaacataagcgatcttctaggagtagcagtaacaatgcttccgtacactctaagaagttttcttctttgtccccagaattgcgcaacgcacaacttagtacatcgcccttgtccttggataatacttctgttcatgaccatatccacccaagtcccgttcatttgaagggacgggtctctccaagacctaatttactgcccacaacatccttttctgctgcccaggaagaaaccgaggactctgctttaagaatggctttagttgaggcaatattaacatacttgggtgtaaacaaaagcaatatgtccgtttcatcttcttcgatagcaaatatgtcttctttaaactctcctcaacttaatgaaatgtatagccgccgtccaagtaacgcaagttttctgatgtcccctcactgtacaccatctgacatttccgtagcttcatcatttgcctctcctcaaactcaaccgacaatgttaagaatcctacccaaggaatacactatcagcaataaaaggcataataaaagtaaaagccaggacaaaaaaaaacctagagcttacaaagaggagttgacacccaatttggatttcgaagatgtcaagaaagactttgcacaaggcattcagttgaagttctttaaaaagggcaccacaattgttgagcagaacgctcgtggtaaaggcctattctatatcatttccgggaaagttaatgtgacaacaaattcttcctcgtcagtagtatcatcaatgtctaaaccagagcaggtttcaggtcaaagttcacacaagggtgaaaatcctcatcatactcaacatttgttatactctgtaggatctggtggtattgtgggctacttgtcctctctaattggttacaaatcatttgttaatatcgttgccaagagcgatgtctatgttggatttttatctagtgcaaccttagaaagattgtttgataaatatttcctaatctacttacggatttctgattcattaaccaaattgctatcttcaaggttattaaagctcgaccatgctttagaatgggttcacttgagggcttctgaaactctattttcacaaggtgactcggctaacggtatttatgttgtcctgaatggtagactaaggcagctacaacagcagtcattgtcaaactccaatacaagttccgaagaagttgaaactcagaacattattctaggagaactggcccagggggagagttttggtgaagttgaagtgcttaccgctatgaatagatattcaacgatagtggcagtgagggattctgaattagcgagaattccgagaacattattcgaactattagctcttgaacatccatctatcatgattagagtttccagattagttgctaaaaaaattgtcggagatagaactgttccagcattaacaggcgatccattatctataaaggaaaacgacttcacttctttaatacctccaacgaaagcgtcttactctagctctttaagtcataaaccccaaaatattacttctgggacaattacttttagaaccatcactatcttaccaattaccagtggactacctgtagaagcatttgctatgaagttagtgcaagctttcaaacaggtaggaaggaccacgattggtttaaatcaaagaactaccctaacacatttaggtcgtcatgcatttgacagattgtccaaattaaaacaaagtggttactttgctgaactagaagaaatgtaccagactgttgtttatatatcagatacaccagttaaatctaattggacaagaacctgtattgcgcaaggtgattgtattctcttactagcagatgctagatccccatcagccgaaataggagaatatgaaaagttattactaaattcaaagactaccgcaaggaccgagttaattcttctacaccctgaaaggtatgtggaaccaggactaacccataagtggttacgctataggccatgggttcattcgcatcatcacattcaatttagtttgacaggaacaaccttgatgaacgaaggcaaaatgcacgttttgaataacggtgccttggcattaatggataagttgattcaaacagaattcagtagaaaaactcaacagaatatatcaaaactacttccagattctatcaagaacaccgtagaaaacttttcttcaagattcatgaaaagtaaaagacaatattacacaccagttcataggcataaaaatgattttctaagattggctagaattctttctggacaagctattggacttgtcctcggaggaggaggtgcgagaggtattagtcatttgggtgtcattcaagctattgaagagcaaggtattccggtcgacgttattggaggaacatcgattggttcctttgttggcggtttgtacgcgaaggattatgatttggtgccaatttacggccgcgtgaagaattttgctggtcgaatttcctctatatggagaatgttaacagatttaacctggccggttacttcttatactactggtcacgaatttaatagaggtatttggaaaactttcggggatacaagaattgaagacttctggatccagtattattgtaattctactaatataaccgattcggttcaagaaatacattcctttggttatgcgtggaggtacatcagagcttcgatgtctcttgctggtcttttacctcctttggaagagaacgggtctatgttactggatggtggttatgttgataatttaccagtaactgagatgagagcgcgtggttgccaaactatatttgcagtagatgtaggttctgcagatgatagaacgcctatggaatatggcgactccctaaatgggttttggatcattttcaatagatggaatccattttcttctcatccaaacatacccaatatggcagagattcaagttagattgggttacgtcgcatcagtaaatgctttagagaaagcgaaaaatacaccaggtgtcgtttatgtgagaccacctattgaagaatatgccacattagactttagcaagttcgaagaaatttatcatgtgggtgtagactatggtcgtatctttttgcaaaggcttattgacgacgacaagatgccatatatacctggttcacaagaaaccactttgaattctcaagttcctgagtttttattacatagaagaaatagtatttga

SEQ ID NO: 77890 - DNA, 207 bp, Saccharomyces pastorianus
atgaccatggaccaaggccttaacccaaagcaattcttccttgacgatgtcgtcctacaagacactttgtgctcgatgagcaaccgtgtcaacaagagtgtcaagaccggctacttattccccaaggatcacgttccttctgccaacatcattgccgtcgaacgtcgcggcggtctttctgacattggtaagaatacttccaactaa

SEQ ID NO: 77891 - DNA, 315 bp, Saccharomyces pastorianus
atgcaaaattcccaagactacttttacgctcaaaatcgctcccaacaacaacaagccccttccacattgcgtaccgtgaccatggcggaatttagaagggtgcctttgccacctatggctgaggttcctatgttgtctactcaaaactccatgggcagctccgcttctgcctccgcttcttcgttagaaatgtgggaaaaggatttggaggagagactcaactctatcgatcatgacatgaacaacaacaaatttggttctggcgaactaaaatctatgttcaaccagggtaaggtcgaggaaatggacttctaa

SEQ ID NO: 77892 - DNA, 390 bp, Saccharomyces pastorianus
atggcgggcactttattcattattctgcggtttgtcgatacgactcttccgtcatctagggtatattgtgtaaggtctctggaagtttctgtggccgtggaattagcagcagcaactgtactagccttcgaatctataggggttgtggacgattgcggacgctctgttttgttttctataattttaatagcggcgtttatctgctcagtatttcttatagcgtctgaagacattgcgggttcaagaagaagtactggctcctgtgtgactctatgggagggaaggaatatctccttttgtttgtatcgtagcaattggcttaatactgttccagttggatatatgttttttctaaggaaaaataggagtcttgatgaaaggtatttttag

SEQ ID NO: 77893 - DNA, 1815 bp, Saccharomyces pastorianus
atgtcttcagacgctataagaaatactgagcagataaacgccgctattaaaattatagaaaacaaaacagagcgtccgcaatcgtccacaacccctatagattcgaaggctagtacagttgctgctgctaattccacggccacagaaacttccagagaccttacacaatataccctagatgacggaagagtcgtatcgacaaaccgcagaataatgaataaagtgcccgccatcacgtcacatgttcctacagatgaagagctgttccagcccaatgggatacctcgtcacgaattcctaagagatcatttcaagcgcgagggcaaattgtcggctgcgcaggcggccaggatcgttacacttgcaacggaactcttcagcaaagaacccaaccttatatctgttcccgccccaatcacagtttgcggtgacatccatggccagtactttgaccttttgaagctattcgaagttggcggagatccggccactacatcgtatttgttcttgggagactatgtcgacagagggtccttttcgtttgagtgtcttatttatttatattctttgaagctgaattttaacgaccatttctggctactgaggggtaaccacgaatgtaagcatctaacgtcatatttcactttcaaaaatgaaatgctgcacaagtacaatctagatatttacgagaaatgctgcgaatcgtttaacaacttgcccctggctgcgttaatgaacggacagtatctttgtgttcatggtggtatatctcccgagttaaactctttacaggacattaacaacctaaatagattcagggagattccctctcatggcctgatgtgtgatctgttgtgggctgacccgattgaagagtacgacgaagtcttggataaagacttgactgaggaagacatagtgaactccaaaaccatggttcctcatcatggcaagatggcaccttcaagggatatgtttgtcccaaactcagtaaggggctgttcatatgccttcacgtatcgtgctgcgtgccattttctgcaagagactggcctgttgtccatcatcagggcacacgaggctcaagacgctggttatagaatgtacaaaaataccaagactttgggctttccctctcttttgacccttttcagtgcgcctaactacttggacacctacaataataaggctgccatattgaaatacgaaaataatgttatgaatatcagacaattcaacatgactccacacccctattggttaccagatttcatggacgttttcacgtggtccttgccatttgttggtgaaaaagttacagagatgcttgtcgcaattctaaacatctgtactgaagatgagctggaaaacgacacccccgtcattgaagaactagttggtaccgataaaaaattgccacaagctggtaagtcggaagcaactccacaaccagccacttcggcgtcgcctaaacatgcttccattttagatgacgaacatcgaaggaaagccttacgaaataagattctggccgtcgccaaagtttccagaatgtattctgttctcagagaagaaaccaataaagttcagtttttaaaagatcacaattcaggcgtgttgccacgtggcgctttatctaatggtgtaaagggtttagatgaagccctgtctacctttgaaagggcaagaaagcacgatttaattaatgaaaaattaccgccttcactagacgaactgaaaaaagaaaataagaagtactacgaaaaagtttggcagaaagtacatgaacatgatgcaaagaatgatagcaaatag

SEQ ID NO: 77894 - DNA, 537 bp, Saccharomyces pastorianus
atgagttctgctaaacctattaatgtatattcaatcccggagttgaaccaagctttagatgaagccctaccttctgttttcgcgagattaaattacgagagatcatacgctttactcgatgctaaattgtacataggttattccatagctgttgtagctggtttgagtttcttcttggataaaaaatttgagagagatcagattgttacgtatcaaaagcttttggtaggcgcatattttgttctctcgctacttttctggtatttctctcgttttattgaaaaggggactgtttatgtgggaaagagaagaggtacaaaggaggaaatatatgtaaagacaaagttcgaaaagaacgaaccattatatctggttgagcttgttcagaaaaaaaagggagaaaactccaagaaggagttgaaggcaaaattagaagtgaataaggtttttaacgaaagtggatatttacaaaatgatgcgtattttaagtggttctctgaacagcacaatgtcctcgacaccaaaaaaaatgaataa

SEQ ID NO: 77895 - DNA, 1776 bp, Saccharomyces pastorianus
atgctaaaatacaaacctttactaaaaatctcgaagaactgtgaggctgctatcctcagagcgtctaagactagattgaacacaatccgcgcgtacggttctaccgttccaaaatccaagtcgttcgaacaagactcaagaaaacgcacacagtcatggactgccttgagagtcggtgcaattctagccgctactagttccgtggcgtatctaaactggcataatggccaaatagacaacgagccgaaactggatatgaataaacaaaagatttcgcccgcagaagttgccaagcataacaagcccgatgattgttgggttgtgatcaatggttacgtatacgacttaacgcgattcctaccaaatcatccaggtgggcaggatgttatcaagtttaacgccgggaaagatgtcactgctatttttgaaccattacatgctcctaatgtcatcgataagtatatagctcccgagaaaaaattgggtccccttcaaggatccatgcctcctgaacttgtctgtcctccttatgctcctggtgaaactaaggaagatatcgctagaaaagaacaactaaaatcgctgctacctcctctagataatgttattaacctttacgactttgaatacttggcctctcaaactttgactaaacaagcgtgggcctactattcctccggtgctaacgatgaagttactcacagagaaaaccataatgcgtatcataggatttttttcaaaccaaagatccttgtagatgtacgcaaagtagacatttcaactgacatgttgggttctcatgtggatgttcccttctacgtgtctgctacagctttgtgtaaactgggaaaccccttagaaggtgaaaaagatgtcgccagaggttgtggccaaggtgtgacaaaagtcccacaaatgatatctactttggcttcatgttcccccgaggaaattattgaagcagcaccctctgataaacaaattcaatggtaccaactatatgttaactctgatagaaagatcactgatgatttggttaaaaatgtagaaaagctgggtgtaaaggcattatttgtcactgtggatgctccaagtttaggtcaaagagaaaaagatatgaagctgaaattttccaatacaaaggctggtccaaaagcgatgaagaaaactaatgtagaagaatctcaaggtgcttcgagagcgttatcaaagtttattgacccctctttgacttggaaagatatagaagagttgaagaaaaagacaaaactacctattgttatcaaaggtgttcaacgtaccgaagatgttatcaaagcagcagaaatcggtgtaagtggggtggttctatccaatcatggtggtagacaattagatttttcaagggctcccattgaagtcctggctgaaaccatgccaatcctggaacaacgtaacttgaaggataagttggaagttttcgtggacggtggtgttcgtcgtggtacagatgtcttgaaagcgttatgtctaggtgctaaaggtgttggtttgggtagaccattcttgtatgcgaactcatgctatggtcgtaatggtgttgaaaaagccattgaaattttaagagatgaaattgaaatgtctatgagactattaggtgttactagcattgcggaattgaagcctgatcttttagatctatcaacactaaaggcaagaacagttggagtaccaaacgacgtgctgtataatgaagtttatgagggacctactttaacagaatttgaggatgcatga

SEQ ID NO: 77896 - DNA, 615 bp, Saccharomyces pastorianus
atgctctcatactatgaacacaatactgcgttccaaacaaacaattgcaattccggtagcaatgccgccactacatacaacagcgacgccaataatgatacgatcatgaataaaagaaaaaatgaccatttcgagtttgatacacacactttctaccaaagatcgaagagaacaaaacgagattctgtaagtacaaagttttcggtcggttccgggtgtgctaatcttaataacaacaacaacaacaacaataataataataataaccataatcataataacagcaataatactgcaacctacaataatattcattatcaaaaaaatatcgaaatatgtcccctgaaaccggttagcatgcaccacactatgaacagccgcttactgaaagaatctgaattttattctgaaacagaagagtacatgattcatggttatttcggtaacactaatcgcgacataacaggcacgagtcctactggaagtgctagtattatacaacaccagtatcatcttctaccatcccaaagtataattgcatcacaagcacccggtactgccatggccgcgttgactaacaacaatatcgctaacgattacatggatatagattaa

SEQ ID NO: 77897 - DNA, 909 bp, Saccharomyces pastorianus
atggttaaggtctggaatatagtactacgtctggtagtgttgctgtttttagcaggtaataccttgctgttaattttgatgattatatctggtgccacggaccattaccccgtgaacagattctattgggtgcagggcaatacaacaggcatacctaatgctggggatgaaacacgttggacgttttggggcgcctgtctacaggataaagacgggtcggatacctgcacaagcaatttggcacctgcataccccatttccccagtagataacttcaacacacacatcaatgtccctcaccagtttatttccaaaagagacgctttttactacctgactagattttcattttgtttcttttggattgcgcttgcctttgtaggtgtgtcgtttatcctttacgttttgacttggtgctcgaagatgctttcagagatggtgcttatcctcatgtcttttgggtttgtcttcaatacggcagccgttgtcttgcaaacggccgcctctgccatggcaaagaatgctttccacgacgatcatcgtagtgcccaattgggtgcctctatgatgggtatggcttgggcaagtgtctttttatgtatcgtggaatttatcctgctggtcttctggtctgttagggcaaggttggcctctacttactccatcgacaattcaagatacagaacctcctccagatggaatcccttccatagagagaaggagcaagcaactgacccaatattgactgccactggacctgaagacatgcaacaaagtgcaagcatagtggggccttcttccaatgctaatccggtcactgccactgctgctacggaaaaccaacctaaaggtattaacttcttcactataagaaaatcacacgagcgcccagacgatgtctctgtttaa

SEQ ID NO: 77898 - DNA, 936 bp, Saccharomyces pastorianus
atgctacgtataactgtcaaaactttgcagcagcgggcatccttccatcatagcttcaaacatattagcgttcctgatcttcatacccgtgctcaaaatgatcaaacaaactgttattgccaagaaataaacgcaaggctgccctcaaaaactgatccattagatcctcatatcaagcttcctcatagaacgcccaattacaataagcatgttttgctgttatcaccgggtgataggtttgctcaaccatggaaggtagcatggaatcataatttggatactaatacaaatcggccatataatgccattagtaaattgcgctcccatttaggtggttctccaggaatactaataaatgcggtgcatttgcaaaatgaatttattccaaggccaaaacaacacgatgaatggctttatttttttgttattcctgacatgaagctctatgtaattaaggaaacggacatcgaggaatttgcatcttttttagatgaaggagctattcaagcaccaaagctatccttccaggattatttaagtggtaaggccaaggcttcccaacaggttcatgaagtgcatcatagaaagcttacaaggtttcagggagaaacttttctaagagattggaagttagtctgtgggcattataagagagatgctaagtgtggagaaatgggacccgacataattgcagcatttcaagatgaaaagctttttcctgagaataatctagccttaatttctcatatcgggggtcatatttttgctggtaatgtcattttctataaactattcggcagagaaaagatgcaaaacaagctggattcattatggtttggtaaagtttacccacacaacttgaagctgttatgtgaaaacttggaaaacggtaaaatcatcgacgaaatgtacagaggtggcatatcgatgaattaa

SEQ ID NO: 77899 - DNA, 1212 bp, Saccharomyces pastorianus
atggagatttacattagacttaacgcagatgtcgagcacgactatgcgtttcaggtgtcaaatgaagacaccataaataacaaaattaagaagattttcccttccaagacgggtttggcggacttaatggtgctgagaccatcaattttccatgagaaggagcccgtaaagttctataagtctatccatccagggtacctgtccgaaggtggttgtttgatgttccattatgaagctgataacgaagaaaatctcgaggagttgaatgactccaagccgcttattgaccagttgtggcctggtcagctagttgttccggagtggaagctatccaagaaaaacatatgggtatacaccattattatgttggcctggctatataccgatttgcccgacgccatttctccaaccccaggtatttgtttgactaatcaattgtctagactattgattcctgtagccaagcacatggatttacctgaaattgccgctaaactcgaacaagaagttcaggcaaactattctagtctcgtagctcaatggcttttctttgtcatgcacattttcaaagtgggcataattactttattcctcaaattaggcattgccaaccccatcagcttcaatccttacaagttatggagtttgagagatttaacttctccttctgctaacggcgctaagaattcaggcggcaataacaacactactgacttaaagacacgtttgcgctctctgggctggattggtgctaagagagctacttacgacgattaccagactaactattacaactatgtcatagataagatgggtggtgcagttgctgcttatagagcgggcgcgattaggaaagctgcagcaccaggtatccaacttgtggctggagagggtttccaaagtcctctagaagataggttcactgcttccactttcacggctattaaaaccgaacggaaattcattttaagtgaagaatactttgtggagctggaaaacaatctaaagaagattttggaagagtatgacggggatattggtaagatgaatgctgaaattaggaggtttagaaggtttggtatttatgaaccagatgaaaaactggcctcgctagttaagctcagaagagaaattgctgatgagaaagagaaagcatcaaacaatgatgctacttttggtataaaaaagaatgatttgaaaaaatctaattaa

SEQ ID NO: 77900 - DNA, 1524 bp, Saccharomyces pastorianus
atgtttgaagtccctataactttaactaataggaagtttcctcaaagaagaaagttaaagtatcaatacataaattacatttctagaagatttgacagaatttccaagaaatctactaccacagatagtttgccaacgcccgaaaattctgcagctgaaaataatgacgaagaagaaggtcaaaacagtgaagccggcgcatataggaggtcagtactacagcagaagaaaagaagaagagaaaggcattggaggagtgtggtcggtgaaatttactctactacggaaagcgaaacagactctcaagaggaggaaactgaggaaggtggcgaacatgacaccgggatagacaaggaagatagtgatgaggagagaaaattttggaaaaaatacgaaaaacctgagaagagtttcgaaatttggcgaacagtgtcctcacaaaataaacagcccattaacaaacaaaaaatgacgtatcataattttaaaaaaattgaaaagattcctttaaggaaaatggaaattccacttttgcattgtacaaaggaaaataaactttacttccaatctatatctagagggttagagccattaaaaacatcaacatcagaagtcagaaactaccgcacaagacatatagtaacattaaccgaccttttgcatttgaatgtgtcaagacataactggtcgcttgcatataaaatattcgccacattaataaggatcccaggggttcaaatcaagtctctttggggcattggcgttgaaatactggataatttatcaaattcatcaagtggtcttgacttcttacaatggatgtgtcaaatctattcgtcaaagtcaagatttgttcagaacatcaattaccgttccattgtccctccttttcaaaccggttctagaacacatactgcgaaatttgctatcacgtacctttggtcttctttaattaattgccaaaaatctatggaaccatcatcaaacatcattgacaaaccttttgatacggaaaacgatttactacaagaattgattgataagatatcagaatgggtattgacccctccgtttatggaagacgctgaagtttggttcatttatgcatcttgtcatttattgaaggccgatacattgtcgaggcaatttgtcaatgacaacaaaaataatgatctaattggtttggatagagacataaagatcaaccaggttataaaacatattcactacgtgagaacgtttttaaaaatttgcttagataaaggtgggtttgccgtccctagcagattaattgaaaatcaactgaaaagcttcgagtcaagactgtacggcgaagcacaagacattcaagagagggatgtagccaacgtatatgatagcattgataacagttcagtggaaaactcttttggagacgtgtatgaaacaaatgcagaatttctagatacgcagctgatggatttatcgccggaggacaacgggttggacgaaatgcattacagtgatgaagactcaagtgagtga

SEQ ID NO: 77901 - DNA, 2013 bp, Saccharomyces pastorianus
atgaggatctgtcattcgagaactctctcaaacttaaaggatcttccgataacgtcaaggagagcaatgcattcggccattgtcaattactccacccaaaaggcccaatttcccgtagagacaaataatggggaacactattgggcggaaaagccgaacaaattctaccagaacaaaaggcccaattttcaaggcattacctttgctaaacaacaagaattaccatcattacccgtgcccgaattgaagtctacacttgacaagtatttgcaaaccatccgcccattttgcaatgatgtagaaacttttgaaagacagcagctgttatgtaaggacttctcggagcacatggggcctatcttacaagaccggttgaaagagtatgccaacgataaaagaaactggatggccaagttttgggatgaacaatcctatttacaatacaacgatcctattgttccatacgtatcttatttttattctcatatgccattaccgaatcatttatcgaagatcgataatgatcctttgattaaggctaccgcgattatctcaaccgtggttaaattcatcgaagctattaaagatgaatctttacccgtagaaattatcaaaggtatgccattttgtatgaatagtttttcattgatgtttaacacttcgagattgcctggtaagccagaggataaccaagatacaaatattttttattcagtttatgagaacaactttgtaactatcgcttataaagggaagttttacaaactgatgacccatgacgggaatgacaaaccgctttccgaaaacgaaatctggaggcaactgtactctgtggtattccaaggatcgcagtccgatcccaaactaggtggcattggttctctcacgtctttacctcgtgatcaatggcgtgaagtacatatggagcttatgaaggatcctatttctcaggattcactagaaacaatccataagtcttcctttatgctatgtttggatcttgaccaatcccctgtcactttggaagaaaagtcaagaaattgctggcacggtgatggtattaacagattccacgataagtctttacagttcctggtcaccggtaatggttcatcaggtttcttagctgaacactcgaagatggatggtacgccaacattgtttttaaataactacgtttgtcggcagttgaataaactagatgtggatgacttcatgagaaaagtaattacgccatcatctacggtggcaatgaaacctatggaactgcccttcattatcacaccgaagattcataaagcaatcgaatctgcccaactacaatttaaggaaacaattggtgagcatgacctacgtgtttggcactacaacaaatacggaaaaacgtttataaaacgccatggcatgtcacctgatgcatttattcaacaagttatccaactggcggttttcaaatatctgaaacgacaactaccaacttacgaggctgcttccacgagaaaatacttcaaaggccgtactgaaactggtagatctgtgtccaccgcttccttagaatttgtttctaaatggcaaaatggcgatgttcctactgcagaaaagattcaggctttgaaacattctgcaaaagagcattctacgtacctgagaaatgctgcaaatggtaatggtgtcgatcgtcatttcttcggtctaaagaatatgctaaaatctaatgatgaccaaattccgccccttttcaaagatcccttatttaattattcttcaacttggttgatctccacatctcaactatcttcggaatattttgacggttatggttggtcccaagtaaatgacaacgggtttggactggcatacatgttgaataacgagtggctgcatatcaatattgtcaacaaaccagccaagagtggagccagtgttaacagattacactattatttatctcaagctgctgatgaaatttttgacgccttggaaaatgagaataaacgaaaagcaaagttatga

SEQ ID NO: 77902 - DNA, 843 bp, Saccharomyces pastorianus
atgaaggcgctggttgaagagattgataagaaaacttacaatcctgacatatatttcacgtcattggatcctcaagcacgtcgatatacttcaaagaagattaataagcaaggcacaatatccacctctaggcccgtaaagcgcataaactactcactggcagatttagaggccaggttatatacttcgagatctgagggagatggcaatagtataagcagacaggatgaccgaaatagtaagaattcccattcatttgaagaaaggtacacacaacaagagattctccagtcggacaggaggtttatggaacttaacacagaaaatttctcagatttgccaaatgtaccgactttattaagtgatctcacaggcgtaccacgagatagaattgaatcaacaaccaaaccgatctcacagacctctgatggtctctctgcattaatgggtggttcttcttttgtaaaagagcactccaagtatggtcatggttgggtgcttaaaccagaaaccttacgggaaatacaactatcgtataaatctacaaaactacctaaaccaaagaggaagaataccaatcgtattgtggcgttaaagaaggttttaagttcaaaaagaaatttacattcgtttttagattctgcgctgctaaacttgatggataagaatgtcatttaccacaatgtttacaataaacgatacttcaaagttgtacccctaattacgacatgctctatttgcggtggctacgatagtatttcaagttgcgttaattgtggaaataagatttgttctgtaagttgttttaaattgcataatgaaactaggtgcagaaatagatag

SEQ ID NO: 77903 - DNA, 1329 bp, Saccharomyces pastorianus
atgaataggactgtctttttggcatttgtatttggatggtatttctgttcaatagctctctccatatacaatagatggatgttcgatccgaaggacggattgggtattgggtatcccgtgttggtgacaacattccatcaggctactttatggttactatccggcatatacattaagctcaggcataagccagtgaaaaacgttttaagaaagaataatagttttaactggagtttttttctaaaaattttactccctacggcagtcgcttctgcaggtgatatcgggctcagtaacgtttccttccagtatgttcccttgacaatttatacaattatcaaatcttcgagcatagcttttgtccttttattcggctgtatcttcaagctagaaaagtttcattggaagttggcactttcagtaataattatgtttgttggtgtagcattaatggttttcaaaccaagcgattccaccagtaccaaaaacgaccaagccttggtcatttttggcagctttcttgtcctagcaagtagctgtctttctgggttaaggtgggtttatacgcagttgatgcttaggaacaacccaattcaaactaacaccgctgcagcagtagaggaatctgatggtgcccttttcacggaaaatgaagataatgtcgataatgaacctgttgttaacctcgccaataacaaaatgctggagaattttggagaatccaagcctcacccaattcatacaatccaccagttagctcctataatgggcattactctgttgcttacctcgctacttgtggaaaaaccatttcctggtatattcagctctagcatatttaggcttgatacgagcaatggcggtgtcggcacggaaactaccgtcctatccattgtgaggggtattgttttgttaattttacctggttttgcagtctttttgttgacaatttgtgagtttagtattttggagcaaacgcccgtgctgaccgtatctattgtgggtatagtgaaggaacttttgacggtaatatttggtataattattctttctgaaagattatgtggtttttacaattggttaggaatgcttattattatggcagatgtatgctattataattacttcagatataagcaagatctattacaaaaatatcattcagtttcaacacaagataatcgtaacgagttaaagggatttcaagacttcgaacagttaggaagcaagaaaatcgcaccatattctattagtgtcgacctaacaaatcaagagtatgagcttgatatgattgctcaaaacgttagtcgttcatcccagcaggtctga

SEQ ID NO: 77904 - DNA, 1023 bp, Saccharomyces pastorianus
atggacgaaaacaaaataatcgaccagttgttcagtaaggaatacacaccgcaagatgactccgagcaagccaaaaatggagatgtgtcgttatatgggttattagatgaagtagcgaacggtaggcggttgatgaactgtttgtttcattcacctatgcaaatggggaataaattgagtaccaacaaacttgatgggaaatgtcggcaaatacaaagagattggattgatgaggaaaaaaccataactatgaattctggcgctttacagctggatgggccagttctattttcctggagtcataatgtagcacctacttctcatcaagaaactataaatacaaccttcaagcagggctctccgagcagaggaagcaacaagtccaaaattactactaccagtcagttatttgatagagcttctgctgagattgataagtgtataaagcccaatagcaaaagttggatggtggaagaaagatttgagagaaatgaggcacatacagctgatggcaagaaaccttctacgtgggctaattccgatttcaaagtggacccgctacagaaattcgttgttaaggaattgcccaaagaaaagaagaaatcagacggtgataagacaaagaaaaataagtcgaaaaggaagagtttttttggattttggggccattctggttctaaatcaggttcaaaaaagaaatccgaaaagcctatagaggccaaaaatgaaattcaggatgaggtaagccaaaaatctggcctatcacctgacgatgatacaactttcagtgataaaaataccatccaatcaaagcaagagagtatgagtgatcaacaagctgaacccaaagtacacgagcccgcagttactaacactggatgcagtgaacatgatgatggtgatggatttgaacaggtacctgcacaatctagttatcatccatccagcgagcccagcattgccagcactccttcattaactctagattcattcatcccattacaaccaaagaagaaaatataa

SEQ ID NO: 77905 - DNA, 570 bp, Saccharomyces pastorianus
atggtagtatccatcataccacaatttcctgacatcaaggtttcactagcattgtttgaacaggttaaaaatgctaaagaaatacgctctaaaatgagtgaattgtcgacatcctttgcctttattgacccccggttagtctgttcgggggagcagatgtattctgcaatttacaagaccttaatagaagtgaaatataacaagatgagaacaagaaatttgaattccgagtgcgtactatgtctttcacccacttccaatattagtgatgctttcctcaaattcggaatcaaagacgattcgtcacagttaatatgccttaagttccatactaatactgacgatgtagacaaagagcaattgaggacaattatgacttctatagtaaaaggacaagagatcgagtttaatgatgacaatttatcgagattttatgacgaagcgctcataagaaaagtatgttttaataataaattcgaggtaaaaacttcaacagcctcaccagaaacacattgtactaacttcacctttgttttccttttattttgtttttacctattagatctataa

SEQ ID NO: 77906 - DNA, 2433 bp, Saccharomyces pastorianus
atggacaatcaggctacacagaggcttaacgacctttctctagaaccagctccttcacacgatgaacaagatggttcaggactagtcattgacatagatcaaagaaagattggtgatgaacaagctggtgtcgtagtggatgatgagacaccccccttagagcagcaagattcacacgaaagtttagctgctgattctcggaatgctaatttctcgtatcacgagaatcagcagttgttggaaaatggcaccaaacagttggccctagatgagcatgattctcactctgccatcttggagcaaccatcgcattctaccaattgtagctcttccaacatagcagcgatgaataagggccatgactcggcagaccatgcatctcaaaattccgggggtaaaccgaggaccttgtctgctagtgctcagcatatcttgccagagacgctcaagtcatttgccggcgctccggtagtgaataagcaggtacgtacctctgcctcctataaaatgggaatgttggctgatgatgcttcacagcagtttcttgatgatccctcttccgagttgattgacttgtattccaaagtggcagagtgtagaaatttgagagccaaatatcagaccatatctgtgcaaaacgatgatcaaaacccaaaaaataagccaggctgggtagtctatccaccaccacctaaaccttcatacaactcagacactaagactgttgtgccagtaacaaacaagccggatgcggaagttttcgattttacgaaatgtgaaattcctggtgaggatccagattgggaatttacactcaacgatgacgactcgtacgtggtacacagatcaggtaagacggatgagttaattgctcaaatccctacccttcgtgactactatctggatctagaaaaaatgatttccatctcatcagacggtcccgctaaatcatttgcttatagaaggctgcaatacctagaagcacgctggaatctttactatctcttgaacgaatatcaagaaactagcgtttccaaaagaaacccacacagggatttttataatgttaggaaagtggacactcacgttcaccattctgcttgcatgaaccaaaagcacttattacgtttcattaaacacaaattgagacattccaaagatgaaaaggttattttcagggacgggaaactactaactttagacgaagtattccgttctttgcatttgactggatatgatttatccatcgatactttagatatgcatgcacataaggatacattccacagattcgataaattcaacttaaaatataaccctatcggtgaatctcgtctcagagaaatttttttgaagacaaacaactacatcaagggtacctacttggctgacattaccaaacaagtcatattcgatttagagaattcaaaataccaaaactgtgagtatagaatttctgtttatggcaggtctctcgatgaatgggataaactagctagctgggtgattgacaacaaagttatttcccataatgttcgttggttagtccaaattccgaggttatatgatatttacaagaaaaccggcattgttcaaagcttccaggacatctgtaagaatctgtttcagccactatttgaagtgaccaaaaatcctcagtctcatccaaaattgcatgtatttttacagagagtaattgggtttgattctgtcgatgatgaatccaaggttgatcgccgctttcataggaaatatcccaagccatcactctgggaggctcctcaaaaccctccttattcctattacctgtactatttgtattcaaatgtcgcgtctttgaatcaatggagggctaagagagggtttaacactttggttttgagaccacattgtggtgaagccggtgaccccgagcatctcgtttcagcatatctattggcacatggtatatcacatggtattttattgaggaaagttccatttgttcaatacttatactatttagatcaggttggtatcgcaatgtcacccctttctaataacgcattatttttgacctatgataaaaacccatttccgagatactttaaaagaggtttgaatgtctcactatctactgatgatcctttacaattctcatataccagagaaccattaatcgaagaatactcagttgcagcacaaatttataaattgtctaatgtagatatgtgtgaattggcaagaaattccgtgttgcaaagtgggtgggaagcacaaatcaaaaaacattggatagggaaagattttgacaagagtggtgttgaaggtaacgatgtggttagaacaaatgttcctgatattagaattaactacagatacgatacattatcaactgaactggaattagttaatcattttgccaatttcaagagaaccattgaagaaaagtga

SEQ ID NO: 77907 - DNA, 399 bp, Saccharomyces pastorianus
atgggggaagcagatttctccctgcgagctcgtctacttctacgaggtgaagctatagatggggaagatgagggacggtccattttcacaataccttcatcgctgggccgaacgttcagatacattttccgtaactgcgggatctgcggtttaaccttttcatcgaacagccccaccagcgcatttttcctagcattagatgggaaatcgacattattttctaccaatatcctcctcaaagtcgcaactttcattgaattcggatcaaaaccgtcctctaaatactccaagtcactattcatcgcggcactaactgagtactgctaccgttctactgtttgttgttctggcctctacgttcactccgtatggtctcagtctactattaataatgactga

SEQ ID NO: 77908 - DNA, 336 bp, Saccharomyces pastorianus
atgatcaaaagggaaactaggttaagagctaaaatattgggaacaaatgccaatgccagtttccataacggtgagtgtggcaacgccagcagtgaaatcaccacagtttggataatagaacatatgaaaaacaacctcgtaactaaatggttgaatcgggtcttgcacacgtcgctaaagatggtatggtacgtgtaccgtggattcaacaactcccttggcgtctgtatcatctgcttgccctgtaatgtcctttcgtcttctcaatcacacttactcatcgccaaagagtctgctcttcccgttagtgattctcgatgttattatattctttaa

SEQ ID NO: 77909 - DNA, 480 bp, Saccharomyces pastorianus
atgtcacgcatgccatctagtttcgatgttacggagagggatttggatgatatgacctttggcgaaaggattatataccattgtaagaaacagccattggtacccattgggtgcttgctgactacaggagctgtcattctggctgctcaaaatgttcgtcttggtaataaatggaaagctcagtactacttccgttggcgtgtgggtctacaagcggccacactagtcgcactagtcgcaggttcatttatctatgggacttctggtaaggaactgaaggcgaaggaggaacaattgaaggagaaagccaagatgagagaaaagttatggatccaagagctggagagaagggaggaagaaacggaggcaaggagaaaaagagccgaattggcaagaatgaagacccttgagaacgaagaggaaatcaagaacttagaaaaggaactaagcgacctggaaaataagcttggaaagaagtaa

SEQ ID NO: 77910 - DNA, 2517 bp, Saccharomyces pastorianus
atgtctgaatatctagctcagacgccctgcaaatttactatatggtcaagcgagattgatcttatcagaacaaacctgttggtgaacgctcaccctttaagcacggttgggcgactacttcaatatatccattatcaaatatacaagcaattaagagctatctatcaaccagaggaacagtgcacgaactcggaaacacctcacacacccttaaatagtatcaacacttacttcctaagttacgaaggcagagagttatctgcaacgtgtttattaaaggacatcacgtcatctagccacccagattcgaaccatttcataagactacaactggaaaagcgtacttctccttccggttcagcatttgacttggaatatgatatggagggcgaatttaactcgatgaatattcaatttgagataaatacactatcttctcaacgtatattcaattccatggaaccaaatttgcctattggcactacattggctagattagagaaactggcattggaacgtataaaggattttgaaaaatcagcagggaatctctgtggtattaaagaggaccattcagtgtctgatttgcagggatttataataaaggggaaacagacacccatgtttttaaattatggaagtgattctgattactataaagacttgaacctggtagatttgataggcattgattttgctccggcacacaattcttttttcacatttttgttcaagatgaatcacgaacagaattcacatatcgccgacgatgaagagagatttgtgttggaattcatatccgatgccacattatctataactcaaatgaatgttaagcccgataccacggtaaaacaagtgaaagatttcatatgttctgtttacactcactcattaaacttgaggagaaatgatatcaagttgatttataagggacagttgcttcatgaaaataattttgcaggcaactcttcaaagatcagcgagtacattaaagagccacatgaagtgaaggtccatgtacaaatcaaccaagagtatacagaatctgggcctggattttggaatgaagtgttcaacaatccgaatattttccaattcatgcctccagatacaaggtcacagtcacctgttagtttcgctccgacgcaaggacgatctcctgctgcaatacgtggcgaagaacgaggtataccatacgtaaccgaatctggaaatgacatcgtgcccacagatgagctttataggaaatgcattatcaacggggatgaagtagtattcattcctgttagcgaactaaatccacaatcgagctatttgtccgtgatcaaaggcgattacggtgaaattaaaatccccatatctagtaatgactacagaattaatggcgataatattttgctatcaccatctgcgatagagcagttagaatctgctttgaacttcaaaatcgagagaccacgggtttcgacactcttgcatccgtctggtgagcatgttcgagctgcagataatacctcctcggcaaatgataataatacagttgagaatgacgagtcagcgtggaatagaagggtagtgcgtcccttgagaaacagcttcccgctgctattggtattgataagaacattttacttaattggctataattcattggttcccttttttattattttggagtttggaagcttccttccctggaaatatatcattttactgagcttgcttttcatttttaggactgtttggaatacccaagaggtgtggaatttatggcgagactacctccacttgaatgaaattgacgaagtcaagtttagccagatcaaggagttcatcaattccaattcattgaccttaaatttctacaagaaatgtaaggacactcaatccgctattgatttactgatgatacctaatctacatgagcaaaggctatcggtctattccaagtatgatattgaatacgacaccaacacccctgacgttggacaattgaatttgctatttatcaaggtgctatcgggtgagattcctaaggacgcgctagatgagttgttcaaagagtttttcgaattgtatgaaacgacaagaaacatgaacacactatatcctcaagactctttgaacgaattgctgctgatgatttggaaggagtcccaaaagaaagacatcaatacgctacccaagtacagaagatggttccaaaccttgtgctcgcaaatagcggagcataacgtccttgacgtcgtactcaggtacataattccagacccggtaaacgatagggtgataaccgctgtgataaagaacttcgtgctcttttgggttacactactcccctatgtgaaggagaagctggatgatattgttgcacagagagcaagggaccgtgagcaaccggctccatctgcccaacagcaggaaaacgaagatgaggccctcgtaatccctgacgaggaagaacccaccgccacaggtgcgcaacctcatctctacatccctgatgaagactaa

SEQ ID NO: 77911 - DNA, 1158 bp, Saccharomyces pastorianus
atgtcacaagaaacaaaaatgctaccttctctatctagtcttctatcgggaaccgaaatctcgtccagccccgtatcaccaagcttcactaatccaagaacgagttttcacctcgatgatcgcggaaccataaaattaccaccgctaaacaccagtatcaatcgtccaagatctgtggaaagcgccttgagacacactgttacatccttgcatgaaaatagcagcgcttatggcgacgacatgctcaagcacacgcaatcagactcagccctctcatctcagttgaatagttctcaggaaacagttgatgaatcacacgaaaaccttctactgactcccctaaatagcaaaaagagagattattcggtttcttcaaagaaaaacgacatattaacaccactctctgcagcgaagtcgattattatcccctctgcctctaaggaaaaaagacgtgcatttgctttcatcacacactcgcaggagaccttccctaagaaggagcctaagatcgacaacgctccactagcacgccgaaagagaagaagaacctcgtcccaggaactatctattcttcaggctgaatttgaaaaatgtcctgctccatcgaaggagaaacgaattgagttagctgaatcttgccatatgactgaaaaagccgttcaaatatggttccagaataaaagacaagcggttaaaaggcagagaatcgccacttcgaagtcaaccactataatacaaacggtatctccaccatctccgcctctggacgttcatgctacgccactagcatccagagtcaaggcggacatacttcgtgatggaagctcatgttctcgttcttcctcttcttcaccgctggaaaatacgccgccaaggcctcatcattccctaaataggcgctcatccacaccaagcataaagagaagccaggctttaacattccatctaaacccacaaaagaagacgttgactcccgtgaaaacgtctcccaacagcagagtaaataaattgatcaatagcatagatcattctccatccaaagccaagcgtccggtaagcaatccctccggctcccctaaaaggaagagaaaattcggattcaagatcgtcgatcaacaaccgttgaaggatcttgatccgaacgctttccgtggttga

SEQ ID NO: 77912 - DNA, 1671 bp, Saccharomyces pastorianus
atggatggtgcgttgataaattccgttttatacgtgagtccacgcaatggtgcacattattttgttgaactcactgagaaacatctattggcgtttgagatgctcaattccatgtgtctcttagaaaattatgatcatgtgctgttgtttttggagtgccagttcggcaaatctcacaatttggctgttatcccgttcgatatcatattagttcttttcacgttatcgactttatctgaatattataaggagccgatattgagggcaaatgatccatataacacgtccagggaaactttaagtaggagagctttgaaactattgcaaaaatatctggcgattctgaaagagtttgattctgagcaatacaatttgtatgacttggagttgttgcgatgccagtttttcttggcaatcgatacgttgacaccaaaaaagcaaaagtggagtttcgatagatttaggagaacgaaatctgaaaagggtgtaacatataggcaaaatgctagtgtagatcccgagttggatcaggctaaaacttttaaaaatccttacaggtcgtatattagttgtcttgagcaaagaaataccatattgggcaatcgcttattgaatttgaaactgaatgaacctggagaatttattaacatgattttatggacattgtctaactcgctgcaagaaagtacccctttgttcctatcaagtcatgagatttggatgcccttacttgaaatactcattgatctgtttagttgtagacaagattatttcatacagcatgaagtcgcccaaaatgtaagcaaatccttgttcgttcaacgcttatctgagagtccgttagcagttttttttgaatctttaaatacaaggaattttgcgaataggttttccgaatatgtatttctcaattgtgattacaaactgccatccgacaattatgcaacgccggttcatcccgtatataatggtgaaaacacgattgttgatacgtatattcccacgattaaatgtagtcctttgtacaaatcacaaaaatcattagctttgcggaggaaactgattgggtcatgtttcaaactattactaagagttccagatggacatagattgattactccgagaatagttgcagatgatgttatccaggggatctcacggacgttggcttcttttaatgatatcctgcagttcaaaaagttttttatgactgaaaatctgtcgcaagagtcttattttatacccctattagctgaaggtaccctttctgagatactcaaagacacacaggaatgtgtcgctattttaacgctagtcgaaaacttatcagatggcgtttcattttgcaacgaagttatcggtttggttaaatcaaaatgttttgcttttaccgagcaatgtagccaagcttcgtatgaagaagccgttttgaatattgaaaagtgtgacgtctgcctactggtcctactacgatatcttctgcatttgatcgggaccgaagcgatattagacgctaaggaacagttagaaatgttacatgcgattgagaaaaatgattcagggaggcgacagtgggccaaagcgcttaacttaggaaataatccgcctttattgtatcccatagtctcccaaatgtttggcgttcatgataaaagtgtaattatagaataa

SEQ ID NO: 77913 - DNA, 564 bp, Saccharomyces pastorianus
atgtctatagcaagttatgcccaagagttgaagttggctttacatcaatatccaaacttccctagtgaaggcattctcttcgaagatttcttacccattttcaggaacccaggtcttttccagaagttgatcgatgctttcaaactgcatttagaagaagcttttccagaagttaaaattgattatatcgtcgggttggaatcccgtgggttcttgttcggaccaactttagctttggccctaggtgttggtttcgttccagtcaggaaagcaggtaagctacctggcgaatgttttaaggctacgtacgaaaaggagtacggttctgatctttttgagatacagaaaaacgctattccagcaggttccaacgttatcattgttgatgacattattgccactggtggttctgctgctgcagccggcggattagttgaacaactcgaagccaaccttttggaatataactttgttatggagttggatttcttgaaaggcaggagtaagttgaatgctccagtgttcactttactgaacgctcaaaaggaagcgttgaaaaaatga

SEQ ID NO: 77914 - DNA, 1080 bp, Saccharomyces pastorianus
atgtggtgcatgagaagattgccaacaaattcagttatgacggtggctcgaaagagaaagcaaactacgatcgaagacttctttggtacaaagaaaagcactaatgaggcgcccaataagaagggtaaatcgggcgctactttcatgaccataacaaatggtgcagctatcaagacagagacaaaggcggtcgcaaaggaggcaaacacggacaaatatcctgctaattcaaatgcaaaagatgtatattcgaagaacttgagcagcaatttacgtacactactgtcgctggagctagaaacgattgatgattcgtggtttccacatttaatggatgaatttaaaaagccatattttgtaaagttgaaacagtttgtcactaaagagcaagctgatcatacagtatttccgcctgcaaaggatatttactcatggaccaggctaacgccttttaataaagttaaagtcgtgattatcggtcaagatccctaccacaactttaatcaggcgcatggcttggcttttagcgtcaaaccccctacaccagcaccaccgtcattaaagaacatatataaggaactgaagcaagagtatcctgattttgttgaagataataaagtgggagatttaactcactgggcttcacaaggggttttattgcttaatacctcgttaactgtaagagcacataatgcaaactcgcattctaagcatggttgggaaacttttacaaaaagggtagttcagttgttgatccaggacagagaggccgacggtaagagtttagtattcctcttatgggggaacaatgctatcaaattagtagagtctctgttgggatctacttccgttggaagcggtagtaagtaccctaatatcatggtgatgaagtcagtgcatccgtctccattaagtgcaagtagaggattttttggtaccaaccatttcaaaatgataaacgattggctatacaatacccgcggagagaaaatgatagactggagtgttgttcctggaacgtcattaaaagaagttcaggaggcatatgctcgcttagagtcagaatcaaaggacccttga

SEQ ID NO: 77915 - DNA, 999 bp, Saccharomyces pastorianus
atgaagtggtgtagcacatacattattatatggctcgccattatattccataagtttcagaagtccacagccactgcatcccataatatagatgatattctacagttgaaaggtgacaccggtgtgataacagtgaccgctgacaactacccattattaagccgtggtgtcccaggttacttcaatatcttgtacatcacaatgaggggtacaaacagtaacggcatgagttgccaactatgccatgattttgaaaaaacctatcaagcagtggccgatgtaattcgctcgcaggccccacaatcactaaatttgttttttacagtggatgtcaacgaagtaccacaattggtcaaggatttaaagttgcaaaacgtacctcatcttgtggtatatccgccagcagaaagtaacaagcaatctcagttcgaatggaaaacatcacctttttatcagtactctttggtacctgaaaatgcagaaaacactttacaatttggcgattttctggctaaaatactcaatatttcgataacggttcctcaagccttcaacgttcaggaatttgtttattattttgttgcgtgtatggtagttttcatctttattaagaaagtaattctaccgaaggtaactaataaatggaagcttttctccatgatattgtcattaggcatacttctaccaagtattactggttacaagtttgtggaaatgaatgctatccctttcattgcacgtgatgctaagaatcgtataatgtattttagcggtggttcaggatggcagttcggtatagagattttttcagtatcattgatgtacattgtgatgtccgcactgtctgtgcttttaatttatgtgcccaaaatttcgtgtgtaagtgaaaaaatgagaggactattgtcgtcatttttggcatgtgttctattctacttcttttcttatttcattagttgttatttgataaagaatccagggtacccaattgttttttaa

SEQ ID NO: 77916 - DNA, 1182 bp, Saccharomyces pastorianus
atggtgtcgaaggatcaaacgtcctttaataagaggtggaccttgggtcttctgatgttgggtctagtcattattttgtgggttttatcgtccttcctgataaatttgatcttcgaggatgactcgtatagaaaaccattctttatcacgtacatcaatactgccgcctttatcttttatctttttccaactgcaaaggccgttgtggtgaactacaaggacacaggccgtgcaaacgttcaccgcgaactaattatggaggaagaaggtactggtagtgatagcaatcgctcggttgatatgactagcccactgcttacaaaccttgaagcaggcacgcatgccaaccaaaagaagaggctaacgttatatgaaacaatcaagttaagtgctgagttctgcattctttggttcacagctaaccttgtgaccaatgcctcgctggcattcacatcggtggcatcgcagacaatcctctccactacttcttccttttttaccttgttcataggtgctatttgtcatgttgaatcattgagcaagtccaaagtactcgggtcgttcatttcctttgtgggcataatcatggtcaccaaatcagattctcatcagcgctaccaacgccatatcgcggacgttagtggtgatgataacgatgccgtgcgagttctgataggcaacttgttggcacttgcaggtgctgtactttacggtgtctacagtactttattgaagagagaagtcggagatgagactcgtgttaacatgaagattttttttggctttgttggtctctttaatttgctttttctatggccatcactgattgtattggacttttttggctgggaaccattctctctgcccaaagatcctaaagttgtggtaataatcttcgtcaattgtctcatcacatttgttagcgacttctgttgggcaaaggctatgttactaacgagtcctttaaccgtcaccgtaggattgagcataacgatacccctagcaatgtttggtgatgtaatctttaagcacaaaaccatgtctgcgctctatttatttggtgctaccctcatcttaggctcatttttcatcattaacaaaagctctgaggaggaacattttgagaactcaataacggctagcaattacgaatcagtggaggtgccagcagcaaacaactga

SEQ ID NO: 77917 - DNA, 1731 bp, Saccharomyces pastorianus
  modified_base (1323)..(1373): a, c, g, t, unknown, or other
atgtccctagaagaatttctagggaacgacactttaggcgagtcagtatgggatgaggaagatattaatttggatgctataagcaatactacgaatattgacatcttgaaacaaaccaaggcaggcgaacatcaacgtgatggtcaccaacagcacccacacggcggtcatggacccatgaacagatcacgtttttctaatgcagggccttttggtggtggtagcatgggggactttgcaaatcatcaccacccgctgcagcatcagcaaggtcctccttatattgtgaagttttctgatttaccaccgagattttccaactttgacattgaagatctttttcaagcaaagtttaccaagtttattaagttcaaactgttttgggagataaataaaaatccaagtatttctactttgaaatcggggtcaatctttgatcaaaatttcaaacgtgactcgaaggtagcatttgtcgagttatacacatcccgtgatatggacaaaattttgaactattggaccactcctttgaaggaaatttaccacattacaacagcgcccgcagaattcgaagattttaaggattacagcacgaaggtgaaattattaacagaccctaaagacgatgctggcaaaccattcattactaagactcagcggtcaaaatccaatccttttggaagtgctaaaccggttgatacgcaatcgaagattttggacattgaagaaaaaatggaaaatttacacgtggaagatacaacaaccctgagggcatcattaatccctagtagtgattctatggcaaccactgcaacaggcagcaagatcacaatcttgaaaaagcagacacctacagaggaggaatcacattctgcaaccccaacttccaaacctttaagttactctgaagtagttgagagatctgtggtcaatgaaacttccaagaaaggaactccattaagcaagcttggctcaccagctcttgaactacaatctaagcccgataaatcggacgagttcaaaggtggcgatgaacaaggctttgagaaaggtggcgacgataaagctcaattagatgtctcaaatgataaagataaaggttcagaaaccgatgttgataaacagttcactttcaagaatgtggaaagggaacatagtatgagcagaaccaaatataacggaaaccataataacaataatggcaattttagagggagtaatagatatcgtggaggccccaacggcagcagttataaaggtgggcataacaatcgtggtaatcgcggcggatatcgcagtggcagctcatacaacaacaacacnnnnnnnnnnnnnnnnnnnnnnnnnnnnnnnnnnnnnnnnnnnnnnnnnnncggttcgagatatcatgatcgacaaaacaatgaagaagggttaacctcagattcatctttagatgcctcaggaaataaaaagaatgatttcacgaactcaacatccaatacacaacaatattccattttcaaaccagcaagtgggttccttggccaaggtaataatgattctataaggaacaatggacgcggtaactataacagcagcggtacgaatggaggttcgagaggaagaggatttggcagaggaaggggatttggcagaggcgcatataacaatcgaggtagtcgtggtggacgtggaagcagcggtaactactccaactacaataacagaacaacagacatgcctttatga

SEQ ID NO: 77918 - DNA, 2079 bp, Saccharomyces pastorianus
atgggtaattcaagttcaaaatcttcgaaaaaggattcacattcgaattcctcctcgagaaatcctcgtcctcaagtgtcgagaaccgagacttcccattctgtgaagtctgcaaaatcaaataaatcttcaagatcaaggcgatctcttccttcttcgtccactacgaatactaattcaaacgtccctgatccctccactccatcaaagcccaatcttgaggttaatcaccaacgacatagctctcacacgaatcgttaccatttcccatctagctcacactcgcattcaaattctcaaaacgaattgttaactactccttcatcatcctctactaagaggccttctacttctagaagatcaagttataatactaaggctgctgctgatttaccaccttcaatgatccaaatggaacccaagtcacccattttaaaaacaaacaatagtagcacacacgtatccaagcataaatcttcatactcatctacctattatgagaacgccttaaccgatgatgacaatgatgacaaagacaacgacatctcgcacactaaaaggttttctagatcttcgaattctcgtccgtccagtataagaagcggatcagtgtcaagaaggaaatcagatgtgacccatgaagagcctaacaatggatcatactcctctaacaatcaggagaattatctcgttcaggcattaacccggtcaaattctcatgcatcttcgctacacagtaggaaatcttcgtttggatcagatggtaataccgcatacagcaccccattaaactctccaggcttgtccaagctaacagatcactctggtgaatactttacctctaattcaacctcctcattgaatcaccattcaagtcgcgatatttacccgagcaaacacatcagcaatgatgatgacattgaaaattcatctcaattgagtgatatccatgcatcaatggaaaatgttaatgataaaaataataatataacagatagcaaaaaagatccgaatgaggaatttaatgatataatgcaatcttccggaaacaaaaacgctccaaaaaaattcaaaaaacctatcgatattgatgaaactatccaaaaattactggatgcgggctacgctgctaagagaacaaaaaatgtttgtttgaagaacaatgaaattttacagatttgcatcaaggctcgtgaaatctttctttctcaaccttccttattagaattatcacctcctgtaaaaattgtaggcgacgttcatggccaatatggggatctcttaaggctttttaccaaatgtgggttcccaccatcctcgaactatttattcctaggtgattatgtggaccgtggtaaacagtcactggagactattttactattgttttgttacaaaataaaataccctgaaaatttctttttattgagaggcaaccatgaatgtgctaacgtcacaagggtttatggattttatgatgaatgtaaacgtcgttgtaacatcaagatctggaagacattcatcgatacttttaatacattaccattagctgctatcgtagccggaaagattttttgtgttcatggtggattgtcgccagttttaaattctatggatgaaatcagacatgtagttaggcctactgatgtgccagattttggcttaattaatgatcttttgtggtccgatcccacagattcacccaacgaatgggaggataacgaacgtggtgtaagttactgttataataaggtggcaattaacaaattcttgaacaagtttgggtttgatttggtttgtagagcccacatggttgtggaagacggttatgaatttttcaatgatagaagtctcgttacggtgttttccgcgccaaattattgtggtgaatttgataattggggggctgtaatgagcgtcagcgaaggtttattgtgctcttttgaattgttagatccactagatagtgcagctttgaaacaagttatgaagaaaggtagacaggaaagaaaactggctaatcaacaacagcaaatgatggaaacaagcatcacaaatgataacgaatctcaacagtaa

SEQ ID NO: 77919 - DNA, 1041 bp, Saccharomyces pastorianus
atgaccgaacctcaaggtcctttggacaccatcccgaaagtgaactatccgccaatactgacaatagcaaactatttttccacaaaacaaatgattgaccaagtcatcagtgaggaccaagactacgttacgtggaaattgcaaaacctgcgaacggggggtacatcaatcaacaatcaattaaataaatatccaaaatacaaataccagaaaaccaggataaatcagcaagacccggactctatcaacaaagtcccagaaaacctgatctttccacaagacattttacaacagcaaacacaaaatagcaattacgaagacaccaataccaacgaagatgaaaataaaaaacttgcgcaggacgaacaattcaagctcttggtaaccaacttggataaagatcaaactaatcggtttgaagttttccatagaacatccctaaacaaaacccaggtcaaaaaactggctagcacagtagctaatcaaactataagtgaaaatattcgtgtttttctgcaagcggtgggaaaaatatatgctggtgagataatcgaattggccatgattgtaaagaataagtggttgacaagtcaaatgtgcatagagtttgataaaaggaccaaaataggctataaattgaaaaaatatctaaaaaaattgactttctccatcatagaaaaccagcaatacaagcaagattatcaatccgatagcgttcccgaagacgaacctgatttctacttcgacgatgaagaagtagacaagcgcgaatctacgctgggcaactcgttgctacagtccaaatccttacagcaatcagaccataattcacaggacttgaagctacaactcatcgagcagtacaataagctcgtcctccaattcaacaaactagatgtaagcatcgagaaatataacaacagtcccttattgcccgaacacatccgtgaggcgtggagactctaccgtctgcagtcggacactttgcctaacgcttactggagaactcaaggagaagggcagggatccatgttcagatag

SEQ ID NO: 77920 - DNA, 840 bp, Saccharomyces pastorianus
atggagataaaccaagcggctgaaaaagaacaggagtatgttcacaaagtgtataatgagatagctccgcatttctcgcaaactagatataagccatggcccatagtgactcagttcttgaagactcgcccaatgggttccatcggtatcgacgtcgggtgtggcaatggaaagtacctcggagtgaaccctgatatatatattatcggttcagatcgctcagatggtcttattgagtgcgccagagggataaacccatcgtacaacttactggtggcagacgggctgaacttaccacacaaaaacgaaacatttgacttcgccatctcaattgctgtagtgcatcactggtctacaagggagagacgtgttgaggtgatcaggcacgttctatcgaaactacgtcagggcggacaagcattaatatattgttgggctctagaacagggcagctcccgtagaggttaccatgaaggtatggagcaagatgtctttgtcccctgggttcttcccaagagtaaatccaaaccaaaaactaaatcaacgccgccttctaaagtcaagacagggccaaagccaaacttaatgaatattcccccaaaggagcgttccgaatacttgcagcgctggaaggaggaacagcaacgcagtaagtctcttgatgataacgacgagaagcaacaacaagatcaagaacaggaaagagaagaggtaaaataccgatactatcacttataccgagagggcgaattggctgaggattgccgccaagctggcgctgccgttcatagtgagggcttcgagcgcgacaattggtgggtggtggcccagaagagatga

SEQ ID NO: 77921 - DNA, 477 bp, Saccharomyces pastorianus
atgcgcatggaggctcaggtggtggtggtgtctcctcatggggtggtgcttccacttggggtggccaaggtaatggaggtgcatccgcttggggcggtgctggcggcggtgcctcagcttggggcggccaaggtactggtgctacttctacttggggtggtgcttcagcctggggtaacaaatcaagttggggcggtgcatccacttgggcgtcgggtggtgaatctaatggtgccatgtctacttggggtggtaccggtgataggtcagcctacggcggggcttccacctggggaggaaataacaataataaaagtacaagagatggcggagcttctgcatggggtaaccaagacgatggaaataggtctgcttggaacaaccaaggaaataagtcaaactatggtggtaacagtacatggggaggtcattaatcaccaaaaggagaaccaatatcacccaagaagaaatcaataa

SEQ ID NO: 77922 - DNA, 327 bp, Saccharomyces pastorianus
atgaaaaaaaaagatcgagattcagtatttcatcgaaacatcgaaatcttcataactattcttattaacgtggtaatattaaagtcttttttattgatttcttcttgggtgatattggttctccttttggtgattaatgacctccccatgtactgttaccaccatagtttgacttatttccttggttgttccaagcagacctatttccatcgtcttggttaccccatgcagaagctccgccatctcttgtacttttattattgttatttcctccccaggtggaagccccgccgtaggctgacctatcaccggtaccaccccaagtag

SEQ ID NO: 77923 - DNA, 213 bp, Saccharomyces pastorianus
atggtaaaagtgaaatctaagaatagtgttataaagctattgtctacagcggcaagtggatactctcgttacatctcgattaagaaaggtgcacctttggttactcaggtcagatacgatcctgtggtgaaacggcatgtgcttttcaaagaagcaaagaaaaggaaagtggcagaaagaaagccattggatttcttgcgtacagccaagtga

SEQ ID NO: 77924 - DNA, 1152 bp, Saccharomyces pastorianus
atgagtgaaacagaattgagaaaaagacaggcccaattcactagggagttacatggtgatgatattggtaaaaagacaggtttgagtgcattgatgtcgaagaacaactctgcccaaaaggaagccgttcagaagtacttgagaaattgggatggtagaaccgataaagatgccgaagaacgtcgtcttgaggattataatgaagccacacattcctactataacgtcgttacagatttctatgaatatggttggggttcctctttccatttcagcagattttataaaggtgagagtttcgctgcctcgatagcaagacatgaacattatttagcttacaaggctggtattcaaagaggcgatttagttctcgacgttggttgtggtgttgggggcccagcaagagagattgcaagatttaccggttgtaacgtcatcggtctaaacaataacgattaccaaattgccaaggcaaaatattacgctaaaaaatacaatttgagtgaccaaatggactttgtaaagggtgatttcatgaaaatggatttcgaagaaaacactttcgacaaagtttatgcaattgaggccacatgtcacgctccaaaattagaaggtgtatacagcgaaatctacaaggttttgaaaccgggtggtacctttgctgtttacgaatgggtaatgactgataaatatgacgaaaacaatcctgaacatagaaagatcgcttatgaaattgaactaggtgatggtatcccaaagatgttccatgtcgacgtggctaggaaagcattgaagaactgtggtttcgaagtcctcgttagcgaagacctggcggacaatgatgatgaaatcccttggtattacccattaactggtgagtggaagtacgttcaaaacttagctaatttggccacatttttcagaacttcttacttgggtagacaatttactacagcaatggttactgtaatggaaaaagtaggtctagccccagaaggttccaaggaagttactgctgctctagaaaatgctgcggttggtttagttgctggtggtaagtccaagttattcactccaatgatgcttttcgtcgctaggaagccagaaaacgccgaaaccccctcccaaacttcccaagaagcaactcaataa

SEQ ID NO: 77925 - DNA, 111 bp, Saccharomyces pastorianus
atggtacacttcatttttatcgccttacgaagcatgcgttttatgcgaagattggtgagaaacctccaatacttgctgttgccgataacttcttcattgctttttatatag

SEQ ID NO: 77926 - DNA, 1971 bp, Saccharomyces pastorianus
atgagtgtgtctaccgccaagaggtcgctggatgtcgtttctccgggttcattagcggagtttgagggttcaaaatctcgtcacgatgaaatagaaaatgaacatagacgtactggtacacgtgatggcgaggatagcgagcaaccgaagaagaagggtagcaaaactagcaaaaagcaagatttggatcctgaaactaagcagaagaggactgcccaaaatcgggccgctcaaagagcttttagggaacgtaaggagaggaagatgaaggaattggagaagaaggtacaaagtttagagagtattcagcagcaaaatgaagtggaagctacttttttgagggaccagttaatcactctggtgaatgagttaaaaaaatatagaccagagacaagaaatgactcaaaagtgctggaatatttagcaaggcgagatcctaatttgcatttttcaaaaaataacgttaaccacagcaatagcgagccaattgacacacccaatgatgacatacaagaaaatgttaaacaaaagatgaatttcacgtttcaatatccgcttgataacgacaacgacaacgacgacagtaaaaatgtggggaaacaattaccttcaccaaatggtccaagtcattcggctcctatgcctataaatcagacacaaaagaaattaagtgacgctacagattcctccagcgctactttggattccctttcaaatagtaacgatgttcttaataacacaccaaactcctccacttcgatggattggttagataatgtaatatatactaacaggtttgtgtcaggtgatgatggcagcaatagtaaaactaagaatttagacagtaatatgttttctaatgactttaattttgaaaaccaatttgatgaacaagtttcggagttttgttcgaaaatgaaccaggtatgtggaacaaggcaatgtcccattcccaagaagcccatttctgctcttgataaagaagttttcgcgtcatcttctatactaagttcaaattctcctgctttaacaaatacttgggaatcacattctaatattacagataatactcctgctaatgtcattgctactgatgctactaaatatgaaaattccttctccggttttggccgacttggtttcgatatgagtgccaatcattacgtcgtgaatgataatagcactggtagcactgatagcactgatagcactgatagcactggtagcactggcaataagaacaaaaagaacaataataatagcgatgatgtactcccattcatatccgagtcaccgtttgatatgaaccaagttactaatttttttagtccgggatctaccggcatcggcaataatgctgcctctaacaccaatcccagcctactgcaaagcagcaaagaggatataccttttatcaacgcaaatctggctttcccagacgacaattcaactaatattcaatcacaacctttctctgaatctcaatctcaaaataagtttgattacgacatgttttttagagattcatcgaaggaaggtaacaatttatttggagagtttttagaggatgacgatgatgacaaaaaagccgctaatatgtcagacgatgagtcaagtttaatcaagaaccagttaattaacgaagaaccagagctcccgaaacaatatctacaatcggtaccaggaaatgaaagcgaaatctcacaaaaaaatggcagtagtttgcagaatgctgacaagatcaataatggcaatgataacgataatgataatgatgtcgttccatctaaggaaggctctttactaaggtgttcggaaatttgggatagaataacaacacatccgaaatactcagatattgatgtcgatggtttatgttccgagctaatggcaaaggcaaaatgttcagaaagaggggttgtcatcaatgcagaagacgttcaattagctttgaataagcatatgaactaa

SEQ ID NO: 77927 - DNA, 2325 bp, Saccharomyces pastorianus
atgcaaaaatccgttagagtgggcgactattttgacaatgatgacaatggtttgtggtcgtggtacttaacaaacctcagattaggcgattttgaagaacttataggcaatcaattaaaatacactctgttaaaaagatttctgaatagtcatttttatggtgataacaatatttcggccaggccaaacaagaagattttgttagtttccatcccagagaatgttcatgaagatatctccatattggaaatcttcctcaaagattactttcatctggaaaaattagaacacattcaaatctcaaaattaactcactcccactgctacaatcatgaaaatcattacctattgacggacaacctcaacaatttccaagaccctacctttttagaatttgcgagtacaagttggcaagttcaaaaaaattccaaggctttaaacaataacaatagaaattcaataccaccacccacaatatcttcatcaaaagcttcaaacgggaagctagaatcaaacgtttcggatgatcagtggtcaaatataaatacccagacttcaacagctacccgaactaatacgaatacgaggactttgacatctccggatacagttgatataaacgttacatccgtgaatagtcaaagcaataataatgatacgtctcaagataatgaaaacgaagttgatgaagaggatgccacaagttttatagtcctaaatttttctcattcgcgaacagtagattcaaagcctaatagactacccaaaatttttccatcatacactaatgaagactatacaccgtcacattccgagataatgtcaatagatagttttgctggcgaagacgtatcatccacatatcccggacaagacctgagtttaactactgccaggcgcgaggatgaaagtggtcaggatgaagttgaggatcattatagcagagtctcacatgatctaggtgacgagagtatcgatcaagcaagttatagcatggaaagttcggtcagctacactagctatagtagtagcagtaatagtagtagtgcccactacagtttaagcagtagcagccgaggtaatccaaaacgtgaaaacatcgatcacacgaatgccacctatgtctctgaattgtcaagtataacgagttctatagacaatttaactacttcgacaaccccagaggaggaggataatttaattcatcataactatgacgcccaagggtatggatcaggagaggacgatggagaagaggtttatgatgatgaagatctttcttcttccgattactcagtactatccattctaccgtcgatctcaatttgtgattcgctagggtattttaggctagttttgcaatctatattaattcaggatccagacaccaaagaaatttttactgcgattagacagtcaaacaataaacctacaatggcaagcgttaccgatgattggttgctgtatgattccaatttttcaatgaataatttacaaattctaacacttcaagatttgctagatatcaagagatcatttccaaaaattttattttacacaatggttattgtgacaaactccggcaaacaggttgaagaagaacttaaaaatcccaattatgataatagggaaggaatatcaaaagagcaacctctagattctgagttatcattaactaacgacccgcaacaatatttcccgactgcatataataacggttacaacgactatattgacgatgaagacgatgaagacgatggtgacgatgcttctttatcagaacagtcaggcccacaaatgtacataccaactagaatggaatctaacgttactacagcacatcgttctattagaaccgtaaacagtatcggggaatgggcattcaatagacataattctgttacaaaaatcgataaaagtaatagtaacgagttggataactctaaaacaggtgaaagtacagttttatcaagtgaacctcatccaatgacacaactgtcgaactctaatacgacttcctcgaattttagccattctttgaagacaaaaaattctcacaaacctaattccaagggtaacaatgaaagtaattccaaaaatgagttgaaaaagataaagagttccatcaatgctatgagtgccgtggaaaggtccaaaagtttgcctttacctacattactaaagtctttaagcggcatagataaccctactcatgccactaacaaggatagaaagcgttggaaattccagatgaataggtttaagaatcataaaaacagtggttctgcaggtacggataaatctcagcgttgtgccatcatgtaa

SEQ ID NO: 77928 - DNA, 981 bp, Saccharomyces pastorianus
atgtccactgatagtacacgctatccaattcagattgagaaagcctcgaatgatccaacccttctgcttaatcacacatgtttaagagtcaaggatccagcaagggctgttaagttctacaccgaacacttcggtatgaagctattaagcagaaaggattttgaagaagcaaaatttagcttgtactttttaagctttccaaaagacgacatacccaaaaataagaatggagagcctgatgtttttagcgcacacggtgtcttagaactaactcacaattggggtactgaaaaaaacccagactacaagatcaacaacgggaatgaggaacctcatcgtggatttgggcacatctgtttttctgtatccgatatcaataaaacctgcgaagagctagaatctcagggtgtcaaattcaagaagagactctctgaaggaagacagaaggacattgcgtttgctttagaccctgatggatactggattgagttgatcacatattctagagagggtcaggaatacccaaagggctcagtaggtaacaagttcaatcataccatgattcgtattaaaaacccaacccggtctttagaattctaccagaatgtgttgggaatgaaattattaagaactagtgagcacgaaagtgcaaaatttacgttatactttcttggttatggcgttccaaagaccgacagcgttttttcatgtgaaagtgtgttggagttaactcataattggggaactgagaatgatccaaacttccactatcataacggtaactcagagccccagggttatggtcacatctgcataagttgcgatgacgctggcgccctttgtaaagaaattgaagtgaaatacggcgataagatccaatggtctcctaaatttaaccaaggcagaatgaagaatattgcctttttgaaggatcctgatggttattccattgaagtcgttcctcatggtttgattgcctaa

SEQ ID NO: 77929 - DNA, 627 bp, Saccharomyces pastorianus
atgtcttctagaaaaaaaaatattttgaaagtaatcatcctaggtgactctggtgttgggaagacctccttgatgcaccgttatgtcaatgataagtattctcaacagtataaagcaacaattggggctgactttttaacaaaagaggtgacagttgacggtgataaagttgccaccatgcaagtttgggatactgctggacaggaacgtttccaatcactgggtgttgctttctatagaggtgcagattgttgcgttttggtctacgatgtgaccaatgccagttcctttgagaatattaagtcttggcgagatgaatttctagtgcatgcgaacgtaaactcaccagaaacatttccatttgttatactgggaaataaaattgatgccgaagaatctaaaaaaattgtatcagaaaagtccgctcaggagcttgctaaatcattaggcgatattcctttgtttttaacaagtgccaaaaacgccataaacgttgataccgcatttgaagaaattgcaaggagtgctttacaacagaatcaagctgatacagaagcctttgaagatgactataatgatgccatcaatattcgcctagatggagaaaataattcttgtagctgttga

SEQ ID NO: 77930 - DNA, 231 bp, Saccharomyces pastorianus
atgatctttgaatgtacatcctttgaaacaaggcatatcttgaacagttactcttgtgctactcaactttcgtacaatacatatagaatcactgagatagtaaatcccattcaagcggcagtttcaaagaacaataagccttttgtgtcaaattctgattctgctttttttcctattttttcatccttcaattttgtggcatatactacattaactttcaagaaaacttaa

SEQ ID NO: 77931 - DNA, 483 bp, Saccharomyces pastorianus
atggcacgttcaagaggatcatcaagacctatatcgagatcgagacctactcagacaaggtccgcttctaccatggcggctccagttcatccacaacaacaacaacaacaacaacaacaaccaaatgcctattcacaccctcctgctgcaggtgcccaaacgagacagccaggtatgtttgcgcagatggcctccactgctgcaggtgttgccgttggtagcaccattggacacaccctaggtgcaggtattaccggtatgttttccggatccgggtctgattccgctcctgttgagcaacaacagcaaaatatagccaacacctccggccaaacccaaacggaccagcagttgggaagaacttgtgaaatagacgcgagaaactttacacgttgtttggatgaaaacaacggcaacttccagatatgtgattattacttgcagcaactaaaagcctgccaggaagctgcacgtcaatactaa

SEQ ID NO: 77932 - DNA, 597 bp, Saccharomyces pastorianus
atgtcaatttctctattaggtagaattgtttcacaacaattctccggcatacgggcggctgggccagggagatctctatatttaccgtttaccttactattgaaacagcccggtgcttacaaggtgagcctacacagatatgtacatagtacccaaacgaagagccacttgagctttttaatgaataataacgatataacaccttttcaaaaatttacagttaaagttctcaaagagcagtgcaaatcaagagggttaaaattatcaggtcgcaaatcagatttgctacaaagacttatcacgcacgattcatgttcaaataaaaaaagtagtgtgaagataaatgaaccgaaaaaaaagaggatattaataaatgatccaatcaaaatcacgaagaaattggttagtgataaaacttttagaactattgaaaaaaatatttcttcactgcagaacacacctgttatcgaaactccctgcgacgttcattcacacttgcaaccaagggatagaatattcttattaggatttttcatgttatcgtgtctttggtggaacctcgaacctcaggaatctaaacctaccattgaccattag

SEQ ID NO: 77933 - DNA, 1536 bp, Saccharomyces pastorianus
atggacaattacgaaggcagtgatccttggaataccagttctaatgcatggactaaggatgatgatcacgttgtttctaccaccaataatgaacccagcctcaacggaatctctggtgagtttaacgccttgaacttttcaacacctctggacacaaatgaggaggatactggttttttaccgaccaacgatgtgcttgaagaaagtatctgggatgatagtagaaatcctcttggtgcaactggcatgagccaaactcccaatatagcggccaatgagacagttatagataagaatgatgctagagatcagaatatagaagaatctgaagccgacttacttgattggactaacaacgttagaaaaacatacagacctctagatgccgacatcatcatcattgaagagatacctgaaagagagggtttacttttcaagcacgcaaactatttagtgaaacatctcattgctcttccaagtacctcgccttctgaagaacgtactgccgtaagaagatactctgatttcttatggttaagagaaattctgctgaaaagatacccttttagaatgatccctgagctacctcccaaaagaattggatcccaaaacgcagaccagctttttttgaagaaaagaagaatagggttatctagattcattaatttggtaatgaaacaccctaaattaagtaatgatgatttagtgttaacgtttttaaccgtacgcactgacttaacaagttggagaaagcaagcaacctatgacacttcaaacgaattcgctgataaaaagatatcacaagaatttatgaaaatgtggaaaaaagagtttgcagaacaatggaaccaggctgcatcttgcatcgatacctcgatggaattatggtatagaatcacgcttctcttggaaaggcatgaaaaaagaatcatgcaaatggtacacgaaagaaatttttttgagacactagtggataactttagcgaagtgactccaaaactatatccggtacaacaaaatgataccatattggacattaataacaatttgagtataattaaaaaacacctagaaactacgagtagtatctgcaaacaagaaacagaagaaatatcgggaacgttatcgccaaaattcaaaattttcacggacatcttactttctttgagaagtttatttgagagatacaaaattatggctgcaaataacgtagttgaattgcaaagacatgtcgaattgaacaaagagaaattggaatcgatgaaaggaaaaccagatgtcagtggagcagagtacgacaggataaaaaaaatcatacagaaggatagaagaagcataatagagcaatcaaacagagcttggttgataagacaatgtattttggaagagtttacaatctttcaggaaacccaatttttaataacacgtgccttccaggattgggcaaaattgaactccaaccatgccggtctcaaactgaatgagtgggaaaagctcgtcacaagcatcatggatatgccgatttctcgtgaataa

SEQ ID NO: 77934 - DNA, 1167 bp, Saccharomyces pastorianus
atggcaaattcgccgaaaaagccatctgatggcactggagtatcagcgtcagacacgcctaaatatcaacataccgtcccagaaacgaaaccagtatttaatttgtcaccaggtaaagctagtgagctatcacatagccttccgtcgcctagccagataaaatcaaccgcacatgtatcttcaactcacaatgatgcggcaggtaatacggatgattctgttcttcctaaaaatgtatcacccacaactaatttgagagttgaaagtaatggagatacaaacaatatgttctctagccctgctggactagctctaccaaaaaaggatgataaaaaaaaaaacaagggtacgagtaaagcagattctaaagatggcaaagcatccaactcctcaggacagaatgcacaacaacaatcagacccaaataaaatgcaagatgtccttttttccgcaggtatcgatgttagggaggaggaggctcttctaaattcatctattaatgcctcaaaatcccaagttcaaacaaataacgttaagatccccaaccatttaccattccttcatccggaacaagtttccaattatatgaggaaagtcggaaaagagcaaaacttcaacctgacccctacaaagaatcctgaaattttggacatgatgtcaagtgcctgcgaaaactatatgagagatatcctaacaaatgccattgtcatctcccgacatagaagaaaagcagtcaagataaattctggtagaagaagtgaagtttctgcggctttaagagccattgcactaattcaaaaaaaagaagaagaaaggcgtgtgaaaaaaagaattgcgttgggactcgagaaggaagattatgaaaataagattgattccgaagagacgttacacagagcatcgaacgttacggctggccttagagcaggtagtaaaaaacagtatggttggctaacttcatcagtaaataagccaacgtccttgggagcaaaatcttcaggcaaagtcgcctccgacatcacggccagaggagaaagtgggctaaagtttagagaagctagagaggagcctggtatagtaatgagggatttactctttgctctcgaaaataggcgcaacggcgttcagactattatttcaaagggttatgccaagatcagagattaa

SEQ ID NO: 77935 - DNA, 2121 bp, Saccharomyces pastorianus
atgcaattacggaatatattacaggctagctcgctaatttctggactttcgctcgctgcagattcatcgtccactactggtgatggttatgctccatcaataattccttgtcccagtgatgatacctctttagttagaaacgcgtctggcttatctaccgctgaaactgattggttaaagaaaagagatgcgtacactaaagaagctttacattccttcttaagcagagctacttctaacttcagtgacacttctttgctatccactcttttcagtagtaactcttccaatgtgcccaaaattggtattgcatgctctggtggtggttatcgtgccatgttgggtggtgctggtatgattgctgctatggacaatcgtactgatggtgctaacgagcatggtcttggtggtttactacaaagttccacgtatctatcgggtttgtccggtggtaactggttgactggtactttggcatggaacaattggacctctgtacaggaaattgtagaccatatgagtgagagcgattccatctggaatatcacgaaatccattgtgaaccctggtggctctaacttgacctacacaattgaaagatgggagtccattgtacaagaagtgcaggctaagtctgatgcaggcttcaatatatctttgtcggatttgtgggcccgtgcactttcttacaacttctttccaagcttgccagatgctggctccgctttgacttggtcctctttgagagatgttgatgtgttcaaaaacggtgaaatgcctttaccaattactgttgcagatggtagatacccaggtaccaccgtgataaacttgaatgccactcttttcgagttcactccatttgaaatgggttcttgggatccttctttgaacgcttttacggatgtgaaatatctaggtaccaacgttacaaatggtaaaccggtcaacaaggatcaatgcgtttctggttacgataatgctggatttgtaattgccacatccgccagtttattcaacgaattttccctggaagcttccacttcgacctattataaaatgattaatagttttgccaacaagtacgttaacaacctatcccaagatgacgatgatattgcaatttacgctccaaatccattcaaggatacagaatttgttgaccgcaattacacttccagtattgttgatgccgatgatttgtttttagttgatggtggtgaggacggccaaaatttgccgttggttccactaatcaagaaggaacgtgacttggatgtggtgttcgcattggatatatccgacaatactgatgaatcatggccaagtggtgtgtgcatgacgaacacttatgagcgccagtattctaagcaaggtaaaggaatggctttcccatatgttccagacgttaacaccttccttaacttgggcttaactaataagccaacgttttttggttgtgatgcaaaaaatttgacggacttggagtatattccacctttagttgtatatatcccaaacacaaaacattcattcaatggtaaccaaagtactttgaagatgaactacaatgttacagaacgtcttggaatgatcagaaatggttttgaagctgctacaatgggcaactttacggatgactctaactttttaggttgcataggttgtgccatcattagacgtaagcaagaaagcctaaatgccaccttgccccctgaatgtaccaaatgttttgcggattactgctggaacggcacactaagtacctcagctaatcctgaactttcgggaaatagtacgtatcaaagcggtgctattgcctctgcaatctctgaggctactgacggtattccaataacggctctcttaggttcatcaacctccggaaatactacatcaaactcaacaacctcaacttcatcaaatgtcacttctaactcaaactcttcgtcaaatacaactttaaactcaaattcttcatcctcttcaatttcttcctctacagctcgttcttcttcctctacggcaaacaaagcgaatgctgcggctatttcctatgcgaacactaatactctaatgagtttgttaggcgccataacagcattatttggactaatttag

SEQ ID NO: 77936 - DNA, 540 bp, Saccharomyces pastorianus
atggttaaggtatatattcatgacaacaaggttgactccgattatcgcgcaccccacaattctggaacagaactttccctggatgaattagccaagttaggagtgatttataaatactgtgcaaatgaggaagaagtgaatgaaattgctaggcaaagagaatataaaaatagagatgtggtcaacatctgcgaaggttccttcaaaagtgaagcagagtttaatgaaaaactagcaacattctaccaagagcatttacatgaagacgaagaaataagatactgtctcgagggtgctggatactttgacgtcagggatgcttccacaccagagaactggatcaggtgtttggtagagtcaggtgatttactgattcttccaccaggcatttatcatcgtttcaccttgacaactagtaaccacatcaaggccttgagactgtttaaggacgagcccaaatggcaagctatcaacaggtcaaatcaggctgattcattgcctgtacgcaaggactacattgccctgatcaatcagtactaa

SEQ ID NO: 77937 - DNA, 1218 bp, Saccharomyces pastorianus
atgtcaacaacaggtccgttagatgctactttaataagggacgttgcggttgctactgccaccaaagcatcatacgatatgagcgatactctatattcatatctacccaaggtcgaccaattttatattcctgaatggcttacaatgcaattcattgccaacaatttgatcagctttacccccctattttcatatggtaccacgatcattagcattgagaaatgcaagactgctttagggttttcaatagatatttgtgccacaatgttgatcgctagtatcctaagaatatcttactatctcattacaccgtatgaaatcactttgttgaggcagtcattagtgatgatttttattcaactgatcttgctgagaacaagcttaaaatatagacctgatgagtacaaataccaaaatctcaccgatgtagagtcattgtcacatttgattcacgacatatggttcgagttttttagctgcattaatagaccgaaatttttaagtgaagattggaagaatctgatcaaatctctttcgttcacaaatttactgaaattttcattcaaaatttttttggcatttttttataaaattttgaaattctttgacccaaatttcaaaagaattggagcgttttggcagtgggatgacgacaaaaatttctggaggtttttagctctttttgcaactgtacaaatattggtcacatttttcatctctaatattttaaactgggactcattagctcaaggactgggctctatcatagggtcgttgggtttattggtggagtcgcttttgccgttaccacaaatcgccattctttataaattgaagtctgttcaaggtttcaaattgatccttttggtaagctggctttgtggtgatacactgaaaatcacttacctgatatttggtgcgaaaaatatttctgctttgtttgttatttttgcattatttcaaatgtcattagacttttacatcggtggtcaatacatttactacagatactattatccaaagctaaggcatcaacatcaccctaatgacagtaattcgccatcagatgaagatgaaagcgaaatgtacgaattagatctttttaataccttacaaaaggatgtcgaaaaggccttgaaacaggatagtaatgatacgtcagattcacctcaagatgaccaagtgggtaaatctcaggcacaggcggtaacggtatag

SEQ ID NO: 77938 - DNA, 1626 bp, Saccharomyces pastorianus
atgtctgaattcgctactagccgcgttgaaagtggctctcaacaaacttctatccactctactccgatagtgcagaaattagagacggatgaatctcctattcaaaccaaatctgaatacactaacgctgaactcccagcaaagccaatcgccgcatattggactgttatctgtttatgtctaatgattgcatttggtgggtttgtctttggttgggatactggtaccatctctggttttgttaatcaaaccgatttcaaaagaagatttggtcaaatgaaatctgatggtacctattatctttcggacgtccggactggtttgatcgttggtatcctcaatattggttgtgccattggtgggttaaccttaggacgtctgggtgatatgtatggacgtagaattggtttgatgtgcgtcgttctggtatacatcgttggtattgtgattcaaattgcttctagtgacaaatggtaccagtatttcattggtagaattatctctggtatgggtgtcggtggtattgctgtcctatctccaactttgatttccgaaacagcaccaaaacacattagaggtacctgtgtttctttctatcagttaatgatcactctaggtattttcttaggttactgtaccaactatggtactaaagactactccaattcagttcaatggagagtgcctttgggtttgaactttgccttcgctattttcatgatcgctggtatgctaatggttccagaatctccaagattcttagtcgaaaaaggcagatacgaagacgctaaacgttctttggcaaaatctaacaaagtcaccattgaagatccaagtattgttgctgaaatggatacaattatggccaacgttgaaactgaaagattagccggtaacgcttcttggggtgagttattctccaacaaaggtgctattttacctcgtgtgattatgggtattatgattcaatccttacaacaattaactggtaacaattacttcttctattatggtactactattttcaacgccgtcggtatgaaagattctttccaaacttccatcgttttaggtatagtcaacttcgcatccactttcgtggccttatacactgttgataaatttggtcgtcgtaagtgtctattgggtggttctgcttccatggccatttgttttgttatcttctctactgtcggtgtcacaagcttatatccaaatggtaaagatcaaccatcttccaaggctgccggtaacgtcatgattgtctttacctgtttattcattttcttcttcgctattagttgggccccaatcgcctacgttattgttgccgaatcctatcctttgcgtgtcaaaaatcgtgctatggctattgctgttggtgccaactggatttggggtttcttgattggtttcttcactcccttcattacaagtgcaattggattttcatacgggtatgtcttcatgggctgtttggtattttcattcttctacgtgtttttctttgtctgtgaaaccaagggcttaacattagaggaagttaatgaaatgtatgttgaaggtgtcaaaccatggaaatctggtagctggatctcaaaagaaaaaagagtttccgaggaataa

SEQ ID NO: 77939 - DNA, 150 bp, Saccharomyces pastorianus
atgtgggcgggaattctcgagattttgagtgcttttattcgaattttgttcaaactgttatattgttgggcacttttttttactgtgttgaaaggcttcagccgtggtccattgttaccgctgatatatcttataaacaaatctttgtaa

SEQ ID NO: 77940 - DNA, 81 bp, Saccharomyces pastorianus
atgatgatttccacatttcacgacggtcaactgtgtttttcgaatgtttatcgattaactttgatgatatttcgcctgtga

SEQ ID NO: 77941 - DNA, 1560 bp, Saccharomyces pastorianus
atgccttccgaatcatccgtctctatctacaagcttgatcagttggagtatcagtaccattatttgacaaaatcattacagaagtttgaaccaagatatccaaaaactgccaaattatacaattgtataggtaaaaagaacaaaaagaaaattgaaaaactgttaaactccttagatttgaaaactttggacaaagaactagatgaaagttactcaaagttactcaataataagattcactattacgagacgcattcatcaaaatgtataaaagaacaaattcagaaaatatccaaaaaaaattctagtaaagtgaaggatgctcaaaaaaataaatcaccctctatagatattgaaaagatgcttgctacgcagttgtcattagatgatttagcactcttcatgacaagatttaggctgatcaaaatcttacaccagaggatcaaacaaaaaagcaaaaagattgaaggtgatacgaataataaaacttggttgaataacaatgattatagtggttatatcaatgataagacaagtaagtggaacccaagcaatatatggaatgaagttattacgaagctgccaagttgtgaaaagttaaacgcactaattggtcaaagtaaaatcgttcaaaatctaaccgaatcattcgatttaagtatttgtctcatatttggatttgatgtaagcgctatgaaagcaaagaagtatggagcaagggagaagacggccaatgctaatcagacgcactccaacattgactatgacaccgatgacggcaatgaaaagaatgccatcgatagcaaatctactgcgatcggcgcacaaactcaaagcaataaagaaacaacgtccgacaatgaggatctattgataaaggaatacgagggaatgctaggcagttcaggagatgaaggggaaggcggcggatacttgaaccctaatatcaattacaatgaagtaacagatgaagaatctagcgaagcgtcatccgatgaggatgacagtgacgaacgcttcagcgactctgaagagaatgaaccaaggagaaaaaaaccaaaattgcataatttacctgaactaatggctggttattacagtggaaatgacactgaagaggaaagcgatgaagacaacaaaaatgttaagggaaagaagaaaaagagagaaacagcagaagaccgtacggccagagagcagatgtcaaacgagccaaagaggaaaaacagacgtgggcaaagggcaagaagaaagatttgggaaaaaaaatacggctcacaagccaagcacgttcaaagggaattggaaaaggaaatggaagatagaaagcagaggcaaatcgagtacgaagcaagagtagctaagcgtgaagctaaagcagcatcattagaggcctctaggagtagggaacgcgaagacagacgtactgaaacgaacaataagaaagaaaaagaaactgcatccactggagaagaacatccttcttggattgcaaaaagattagctgaagaaaaattacaaaaagctaaatttgaaggtaagaagatcaaatttgattga

SEQ ID NO: 77942 - DNA, 1617 bp, Saccharomyces pastorianus
atgagttctgtcgcagaaaatataatacaacatgccactcataattctacgctacaccaattggctaaagaccagccctctgtaggcgtcactactgccttcagtatcctggatacacttaagtctatgtcatatttgaaaatatttgctactttaatctgtattcttttggtttgggaccaagttgcatatcaaatcaagaaaggttccatcgcaggtccaaagtttaagttctggcccatcatcggtccatttttggaatccttagatccaaagtttgaagaatataaggctaagtgggcatccggtccactttcatgtgtttctattttccataaatttgttgttatcgcatctaccagagacttggcaagaaagatcttgcaatcttccaaattcgtcaaaccttgcgttgtcgatgttgctgtgaagatcttaagaccttgcaattgggtttttttggacggtaaagctcatactgattacagaaaatcattaaacggtcttttcactaaacaagctttggctcaatacttaccttcattggaacaaatcatggataagtacatggataagtttgttcgtttatctaaggagaataactacgagccccaggtctttttccatgaaatgagagaaattctttgcgccttatcattgaactctttctgtggtaactatattaccgaagatcaagtcagaaagattgctgatgattactatttggttacagcagcattggaattagtcaacttcccaattattatcccttacactaaaacatggtatggtaagaaaactgcagacatggccatgaagattttcgaaaactgtgctcaaatggctaaggatcatattgctgcaggtggtaagccagtttgtgttatggatgcttggtgtaagttgatgcacgatgcaaagaatagtaacgatgatgattctagaatctaccacagagagtttactaacaaggaaatctccgaagctgttttcactttcttatttgcttctcaagatgcctcttcttctttagcttgttggttgttccaaattgttgctgaccgtccagatgtctcagctaagatcagagaagaacaattggctgttcgtaacaatgacatgtctaccgaattgaacttggatttgattgagaaaatgaagtacaccaatatggtcataaaagaaactttgcgttacagacctcctgtcttgatggttccatatgttgttaagaagaatttcccagtttcccctaactataccgcaccaaagggcgctatgttaattccaaccttatacccagctttacatgatcctgaagtttacgaaaatcctgatgagttcatccctgaaagatgggtagaaggctctaaggctagtgaagcaaagaagaattggttggtttttggttgtggtccacacgtttgcttaggtcaaacatatgtcatgattaccttcgccgctttgttgggtaaatttgcactatatactgatttccatcatacagtgactccattaagtgaaaaaatcaaggttttcgctacaattttcccaaaagatgatttgttactgactttcaaaaagagagacccaattactggagaagtcttcgaataa

SEQ ID NO: 77943 - DNA, 2355 bp, Saccharomyces pastorianus
atgcccatcggtaacccaatcaatacgaatgatatcaagtccaaccgcatgcgccaggaatcaaatatgagtgccgtgagcaatagcgaaagtactattggccagtccacccaacagcagcagcaacaacaacaatatctcggccagagcgttcaacctctgatgcccgtatcctaccaatacgtagttcctgaacagtggccgtacccgcaatattatcagcagccgcaatcccagtctcaacagcaactgcaatcccagcctcagatgtatcaagttcaagaatcctttcagagtagcggttctgactcaaatgcttccaatccaccttccacgtctgtaggtgttccttccaacgctactgcaactgcgttaccgaatggttctgcaatcaccaccaatagcaataacagtactaatatcagtaacaatgtaccatactactattattttccccaaatgcaagcccaacaatcaatggcatattcgtatccacaagcgtattattattatcctgcaaacggcgatggaaccactaacggtgcaacaccatctgtaaccagtaatcaagtccaaaaccccaatttggaaaaaacctactcaacctttgaacaacagcaacaacaccagcagcaacaacaattacaagctcaagcgtatccggcccaaccaccaaagataggtaatgcattttcaaagttcagtaaatctggaccaccttctgattcgtccagtggctctatgtctcccaattctaatcgcactagtcgcaatagtaatagtatctcgtccttagctcagcagcctccaatgtcaaactatccacaaccttccacctaccaataccccggttttcacaagacttcgtcaattccaaactcgcattctccaattcctccaagatctttaacaacgccaactcaaggtccaaccagccaaaatggacctttaagctacaatcttccgcaagtgggtttgctaccgcctcagcaacagcaacaggtgagcccgttgtatgatggaaattctataactccaccagttaaaccctctactgatcaagaaacttatttaactgcaaataggcacggagtgtcagatcaacagtatgactcaatggctaaaaccatgaattctttccaaacaactaccataaggcacccgatgcccttaatcgccactaccaatgccacaggcagtaacaccagcggcacttcggcaagtataataaggccaagagtaacaacaacaatgtgggaggatgaaaaaacgctatgttatcaggtagaagctaacggtatttcagtggtaagaagagcagataatgatatggttaatggtaccaaacttctgaatgtaactaagatgacaagaggtagaagagatggtattctaaaagcggaaaaaatcaggcatgtggtgaagattggttccatgcatttgaagggtgtctggataccgtttgagcgtgctttagcaatagcacaaagagaaaaaattgctgactatctttatcccttgttcatcagggatattcagagcgtattgaaacaaaataatccaagcaatgatagcagtagtagtagcagtagcactggtattaaatccatcagtccgcgtacctattatcaacctattaacaactatcaaaatcctaatgctccttcaaatatatctgctgctcagctgacatactcctcaatgaatttgaacaacaaaattatacccaataattctataccagctgtaagtacaatcgctgcgggtgaaaagcccttgaaaaaatgcacaatgcctaactctaaccaactagaaggacatactataactaacctacagaccctttcggcaacaatgccgatgaaacaacaactgatgggcaacatagcttcacccttatcgtatccacgcaacgccacaatgaattcggcaagtacattaggcattacaccagcagattcaaagtctttgacaccttctccaactacaacaaacacaaatcaatcatctgaatcaaatgtgggaagtatccatacaggaatcacccttccaagagtggaatctgaatcggcatcacattccaaatggtctaaggaagcggacagtgggaatactgtaccagataatcaaacattaaagaagccacgatctagtcaattaccaatctccgctttgacttcgacggatactgacaaaataaaaacaagtacaagcgatgaagcaacacaaccgaacgaacctagtgaagcagaacctgtcaaggagtcagagtcatccaaatcacaagttgatggagctggcgatgtctccaacgaagaaattgccgctgatgatacaaaaaaacaagaaaaatag

SEQ ID NO: 77944 - DNA, 1194 bp, Saccharomyces pastorianus
atggggttcagaaaaatacttgctagcaaatcgcatcacagtcgccaccataatcagcaccataagaacctgaagttgcaaaatcatcgctatgtacttatttccaatattacaggatcccatgaaacaaaatatttatcacccttcaggatggacaattgttcaggaagcagaagacgtgataggctacatgtgaagcttaaatccttgaggaataaaatccacaaacaacttcacccaaactgtcggttcgatgacaccactaagactagtgatgataaatgcgtctcttatgaggtgcccgaaaaggatggccttgctactatttcgttagaagaggtttttccaaagtccaacaggtgccaaatacctgaagaaaacttgggagaaacagatagcgttattcacagagatttgggaaattttgcaaatgagaatgactatccacagtggagaaaagttgaaagtcaatataacttagagaatgtccagcctgaggaggatgaaatagttgatagactcaggtccgagattagaagcactaaattaaaatctgtaaaaacgacaagcagaacacttgaaaaagctatagaggctcgatgtactggaaagagagttcttcaacaactaagttgtcagagcaaccaactcaccaagatcgagagcaattgtgacatgcttaaaattcaatctaacgtagccgaccgaaagattgacgaacttgcccatgaaaatagaagcctgcttgcattaaaatcacccaaccccttcaggaagaaaagggagagagaaaagcgagaccagatcaacaatttgaagttaaagcatcgtcacttacagcaagaaactatgaaaagagcccaagattctgacaaaaatttagccataaatctaagttctgaatatggacggtatggccaaggggtggaaagacagcgtattcttagagatgcccagaagtatcagtttgaagccgatgaagaagataaccaaatggaaatcgacttgtacggaaacctagaacaaataaaagcggtaagtggtgacttgaaaattatggctcacgcttttggcagagagtttgaagcacaaaacactagaatgtttgacatcgagaacaatgtacagcaggcagataatgctttacaggccaagcgatatagattggagaaagtgatcgggaaaagatggtga

SEQ ID NO: 77945 - DNA, 1527 bp, Saccharomyces pastorianus
atgaatacagtttcaccagccaaaaaaaaggttattataattggtgccggtattgctgggcttaaagctgcatctacgctacaccaaaacggtattcaagattgtcttgttcttgaggccagagatcgggtcggtggtaggttgcaaactgtcacaggctatcaaggtcggaaatatgatataggtgctagctggcaccatgatacgttgacaaaccctttgtttttggaagaggctcaactgagtttgaatgatgggagaacgaggtttgtttttgatgacgataattttatttatatcgacgaagaacgtggaagggtagaccatgacaaggaactgcttcttgaaattgtggacaatgaaatgagcaaattcgcagagttagaattccatcaacacttaggagtttcagattgctccttttttcaattagtaatgaaatacttactacaaagacgccaatttctcacaaatgaccaaataagatatttgccacaactctgtcgatatctggaattgtggcacggcttagattggaagcttttgagtgccaaggatacatacttcggtcaccaaggaaggaacgcctttgctttgaactatgattctgtggttcaaagaattgctcaaagctttcctcaaaattggttaaagctaagttgtgaagtgaaatcaattacacgagaaccttcaaaaaatgtgacagtgaactgtgaagatggtactgtgtacaatgctgattatgttattattacagtacctcaaagtgtattgaatttgtctgtacaacctgaaaaaaatttacggggaagaatagaatttcaaccacccttgaaaccagtgattcaagatgcttttgacaagatccattttggagcgctaggtaaagtaatttttgagtttgaagaatgttgttggtcgaacgaaagttcaaaaattgtaactttggctaactctaccaatgaatttgtcgaaatagtacgtaatgcggaaaatttagatgaattagactctatgctagaaagggaagagtctcaaaagcatacgagtgttacttgttggagccagcctttatttttcgtaaatttgtcaaaaagcacaggagtagcaagctttatgatgttgatgcaggcaccgcttacaaatcacatagaatccattagagaagataaagagcgtctttttagttttttccaacctgtgctgaacaagattatgaagtgtctaggttctgaagatgtcatcgacggaatgaggccgatagaaaacattgcaaacgctaataaaccagtcttaagaaacatcatcgttagcaactggacacgcgatccttactcacgcggtgcttattcggcctgttttccaggagatgatccagttgatatggttgttgcaatgtctaatggtcaagactcccgcataagatttgcaggcgaacatactatcatggacggcgccggctgtgcctatggtgcttgggaaagcggaagacgggaggcgactcgaatctctgacttactgaaatag

SEQ ID NO: 77946 - DNA, 1254 bp, Saccharomyces pastorianus
atgataatatttaatgggaacaaatatgcgtgtgcatcgtgcatcagagggcatcgctcttcaacatgcaggcattctcaccgaatgctaattaaggtgagaactagaggaagaccttcacccatggctatcagagatgctattttagtagactctacatcgcaaagtacagaatacgaaaatggtgcacaaattgaaggtgactgctgcagcgcaatgaatcaacagccaatactgtttgtacgtgcctctgctgttagaaaggcaagaatgataaacggaaaattgcatatattaatggaggaaggttgcactgctcatgagcctaaagatattagcacatttaccgatgatggtaacaaatatatcaccgaaacggagtttcttaggaaacactctcccaaagctccggcaacaggaacaatatctccggactctaccaagtcatcttcttcaagtgagaagaaagagcgaagccggcttcaacaggagcctatacgacatttttcaaactgctgtaagaaagataaatcacagaacccagcttctaatggcaagacgaacaaggcatcgtctgatgacatatttacgccatacggctccttggaatctacgtccgcttttaacgatattttacaagaaaactacaatagttctgttcctggtgcgcatgacagttcagaaacactcaccccacaaagtacaacaacgattgctgctcctcattcaagcgacgttgcttcgaaagttgaagtcctgactcataagggcatttttttaagcacgcagtgctcttgtgaagatgaaagctgcccatgtgttaattgtctaatccatagaagcgaagaggaactgaattcttatattcaacaaagtggtgttcctttaaccaatattggtgaagctcaaattactgataagatgatggattatttggatgattgtaaatgcactgacaaggaatgcatatgtcctccggataactgcacttgtgatggatgtttttctcactctacaaatataattccatttgaaaaattctttttctatggaattctgaatgcaagattaacaaggaaaactcaaataaaattcaaaggtaaattggtgccgtcaaaatattggtgggattttttgaagttgcaagtgccattgatgacagatgctcagttagaattacttgacattcatgcgtggtttcaaaaattagtctctaattatgcaccacatctaagcgatgccaccacttcataa

SEQ ID NO: 77947 - DNA, 498 bp, Saccharomyces pastorianus
atgtcgaaaaccgctcagaaacgtctcctcaaggagcttcaacagttaattaaagattctccacctggtatagtggctggtcccaaatcggagaataacatattcatttgggactgcctaattcaagggcctccagatacgccatacgctgatggtgtttttaatgctaagctagagtttcctaaagactatccgttatctccacctaaacttactttcacacccagcatactacatccaaatatttatccaaatggggaagtgtgcatatccattctacactcccctggtgatgatcctaacatgtacgaattagcggaagaaagatggtcgccagtgcaaagtgtagaaaaaattctattaagtgttatgagcatgttgagtgagcccaatatcgaaagtggtgccaacattgatgcttgcatcttgtggagagataatagacctgaatttgagagacaggtaaagttatccattttgaaatcattaggattctga

SEQ ID NO: 77948 - DNA, 1173 bp, Saccharomyces pastorianus
atgggcatagttttgaaaagagcaatagcagcaggtatgaaaccttttccaaacagtacgtggcattggagccgaaccataagacctttctcacagcatttgtctagcacatgctttctgcagcaatcctcgagatttacttcaaaacgatacctacacctttcaacattaacacaacaagaaaagcgcttcctacccgaatctgaacttgctaaatataaggaatactaccagggtttgaagagcactgtaaatgaaatacctgaatcagtggcctctaagtcaccttcgttaagaacgcttcataagagattacaattacctaatgagttgacctattcaacactttccagatgcttaacgtgtccctctgcaaaactacccgacaagataaataatcctacaaaaggtgcagctttcgttaatactgtacctactaataaatacttggacaaccacggtttaaacatcatgggaaagaacttgctctcttaccacgttacaaaatccattatacagaaatatccgagactacccactgtggttttgaatgctgcggttaacgcatatatatcagaggcggtactggcgcacattgctaaatactggggtattgaagtagaaactacgtctgttttatcacgctatttgaaaatggaaccattcgaattcactttgggaagactcaaattctttaataattcattgaactctaaggacggtattgagctaatcaccggaaagaacttttcagaaacaagcgctcttgcaatgagcgtgaggagtataatagctgccatctgggcagtaacggagcaaaaagattctcaagctgtttacagatttattgatgatcatataatgagcaggaaattggatatcacgaaaatgttccagtttgaacaacctacaagagaattggctatgctatgtcgtagagaggggctggagaaacctgtatcgaaactggtcgctgagtctggtagactatcgaaatcacctgtctttattgtgcatgtattttcaggcgaagagacattaggtgaaggttatggttcctcattaaaggaggcaaaagcaagagccgctactgatgctttgatgaaatggtattgctacgagcctcttgctcaacaggaaccagttattgatcctggcactgttgttgtttag

SEQ ID NO: 77949 - DNA, 888 bp, Saccharomyces pastorianus
atggacctcctaaaattcagttctctagctatatcagaaattaacttcctgcacgagtcatcgtttgactcgatagaccactcttggtttttattgataggttgcaaattggatcaagatgatgaaatttacatcccaacaaatggtaatgaagcagagtctcaatggtatattgaaaaagttatacgaatcccgatgcaggaaaatgataaaataaatcaagaacgcctagaaaggagaattaacctaacaaaagtgactcaaaaggacatttgtatactgggtattcttgatttatgtcagttagaagaggacgaaaatatcactaataaagtgacggagaaagtgctcacccaattgaccgccttggcattgaaatatctgataaaatataacgtgtttcgccaacatacctccttccaagaagctgtcaatagtttaaagggttataaaattgaaaatagtgtacagataggcgcggaaattatccttgattttctacaagataaagtgcaaattaaggatgtaaatgacagataccaaattcccacacctaataataccgtagacccaggttttgatgagtttcaattaattgacatgaaggataaagaaatcaatattcaaaaatataataataatgccataagaaaattactcgagaagattaatcgaatgataatattcttgaaaaattatgatgccactgacaagcctttctcttccacgcaagatgtaatacttcgaaaaatatcaatgcttgtaacacaactgcaaagaggtggaacaagtgacatgaattacctgctggataacaaaattaatgaaataaaattattagaaatttcgtgtaaacaatgggaaatttcaaatatgttaaaaaaataa

SEQ ID NO: 77950 - DNA, 1572 bp, Saccharomyces pastorianus
atggctattaaccaggcacatgttcatccgcattacacgttacctggtgtaatgcactacttgcaaacggagttcacgaagaatgaaagagatagaatcacctgggagctagaaaggtcggaaatgaaagcaagaattgcagaactagagggcgaaaatagagatttgaagcatcaattgaatcaaatacaatcgaaagctgtttctcctgaaggtgaaaaggaagaaaaacatgtgcctgattcattactgcagtctaagctagctgttcaagaaaatgtgaaggaaataatttatttgttgaaaggccctaacacggtcaatcagttagagtcattaaatagcagagaagcgggttctgaattgcacgatttagagaaactgaacgtgaatactcccaaggaagagggcagtgcgaagacaaatgggatggatattttaaataatgccctcttggacaccaaacccaatccaaagcaaggtccttcagagtcaccatcaccaaccaaagtgaaatctttgtttagcacagccaacaagcgtgaaaataatgaaacaatatccaagatacactcggaattgtcgaaagtcgacattatcagctcctacggggactgtatggcactttatgatgcagacaccaaatcgttagaaatacaccaagtggacgcaaacttgaattccaaactcttaaagaaaatatctttagggcaagatagcgacattatgaaatttttctgggtttcgacgtccaaactccttgttattgaaaagagtttccatttgaaattgttctctatttctagcgcatctttgatctcagatgtggacctattacaagactcagaacagccgttttcgtctagtgatatcattaatatagacttcaaaaataaatggttgttgatagctagtaagaataaatctcaaattagaatctgggaattggacaatatagaggctcctgaggatgtcccaattaacataaaagaaacatatgaaataacacatgataatgatgacgatgatagtaatgattccacaaacattctggattgtatattgggtataacagaaaaatccttaatattactgtcttcaaatccataccagcttaccatatatgatttcgagggtaagcttctacaaaaaattgatttgaagattgatacaatattatcgggtaagccagaagaagaaggttaccatttatttttggatagaaaaacttctaagctactgattcagctaagcaatgagagattattggtttattcttttgataagaaaaaagttgtactgaaggaacaattgactccatcgtcaacactaccaatacaactcgatttgaacgacagcataatcgccgtatcatatagtaatggagactttgagtttaggaatttagaaaacctaaaaccatccatcgacgaatttgtcgtagcagacatcaacttctcggaaagaaaagagcctgtggtattttcttcaaatctgattgtagattctacgccggtgttaatcaccgtgaataaaaataacgaagtccttttgcacaagattaaaatataa

SEQ ID NO: 77951 - DNA, 1131 bp, Saccharomyces pastorianus
atgaaggacctaaatccagaaatggggaaatttgctaccactaaaggccctcctcaagacaatagaggcatggttgatatagcgacactgcctaattttcctgccaaccgtagtgggactcctcgtgaggagatgtatctggcgcccaacaagatggaaactccaaggacacttaatatgaatatggtaccggattatttgcaaaaagagaacttctcgccagatttttcttctgctaccgtatctgccaagtcatctcctgtcaacgttactcatgatgagtcgcttcctctgggaactattgaatcgaatagcacaaaggattctaaatatgcagttcaacggcaacagcaacaagtggtagatttcatagagaataatatgcagctactgtcttcagaaacactaaattttagatcagacattatgaaaactttggagcttcccattcccaagagaagagatattaagggaaaccatctatctaaactattatttgctaaatcacctctaactatcaacacatattgccaattttatgaccgtagaaccaagcgaatttgcaatcaagaaatgatatggaaagataagaacagtagagagaagcatggttctagaaagtatcaaagacatttgagtaaagttcacgatgtccagctaacaccaaataattttaccgaattttttgatcataattctccacttttccaggaatgctatgactatcaatctagattgatgcgtgatttacttgttgaaccagatgccaaattcaaagagaagaaaaagaagaaaaaaggggaagtcaacggaaatcatcctgaaaccggatcgagcctcatcaaccaccaggtccaacagcaaaatgttcgagaacttcaatcgaaaatagccatgaacgacttgatagagattcttatcgatttaaacattccgttttctgttttagactaccaaccaatgagaaattggctcatcaaatattcaataatttcaacagatactttgccggatgaagtatacttcaaaactgatccaggcgtgaatgaactggaacacaacagtagtaatttaaacaatagcaataccggtactcctcataatcataatcaaaaccaacataccaattaa

SEQ ID NO: 77952 - DNA, 327 bp, Saccharomyces pastorianus
atgtctctatcttctacagctgaaattaaagacattggttattttgcgttggttccctatatgcaaagctatttaacaactaaagactgtgtaatcgtcagagtgcactattttgcttcttgtcaaagtagttgccaaagagctgaacctttaggatccaccgaattaataaacattggtgatatactgcaagcaacaaggagttctccccatcgagtggcagtagttcttccccctctcgagggtgcccctttcggtagtttgcgattttcttccagaagagcaccgattgccccatccggaaagtactatttcccttttgggtaa

SEQ ID NO: 77953 - DNA, 1305 bp, Saccharomyces pastorianus
atgaagactcagtactctctaatacgaaaaatttgggcacattcagtaatagaatttctgaaatcccagtggtttttcatctgtttggctattttaatcgttattgcaagatttgctccgaattttgcaagagacggagggttaattaaaggccaatatagtattgggtacggctgcgtcgcctggatttttctccaaagtggcctgggaatgaaatcaaggtcactaatggcaaatatgttaaactggagagctcatgccactattctggttctgagtttccttattacctcgtccatagtatatggattttgttgcgcggtaaaggctgctaatgatccgaaaatagatgactgggtacttatcggtctaattttgactgccacttgtccaacaaccgtggcttcaaacgttatcatgactacgaatgcaggtggaaatagccttttgtgcgtttgtgaagtattcattggaaatttgttgggtgcgtttattacacctgcattggttcaaatgtttactaaccgcgcaccatttgcatacggcaaccctgccactggaaatggcattggtgcgctttatggccgtgttatgaaacaggttggtctctctgtattcgtacccttgtttgtgggtcaggttattcaaaattgctttccgaagggtactgcttattacctgggctttttgaaaaaataccatattaaaattggatcttacatgcttttattgattatgtttagttcattctcaactgccttttatcaggatgcgtttactagcgtttctcatgtttgcatcatatttctctgcttttttaatttgggaatttacatattcttcacgggtctgtcatacttatgtgcaaggccatggttcatcctcaagcttttccctcatgaaccaatagagggcaaatctacaagattgtaccgctattcgtataatatctttaggcctttttattattcaaaggaagatgcgatttgcattatgttttgtggcccggctaaaactgcagcactgggtgtatcactaattacttcacaatacggcgataaaaaagaacacctgggtaagttgttggttcccttggttttataccaagttgagcaagtcatgacggcaaatttctttgtaagcttgttcaaaagatggatacaaaaggacgctcaagtagacggaagcgagtcatcttgtgcaaatgagaatgaggaagttgatttagaaaagatcatatcaattggaactggtgaaaatcaatccgttctgtcgaacaacgtcccatatacacaaccaaggtga

SEQ ID NO: 77954 - DNA, 534 bp, Saccharomyces pastorianus
atgtttcgagccggatcatcaaaaagattcttacgaaacacactaatagcaatttcatgggttccggtacttctaacaatcaataataatgtggtccatattgcgcaagttaaaggtacctctatgcagcctacgctgaacccgcaaacggaaacgctggcaacagattgggtgctgctttggaagtttggagtcaagaacccaagtaatttatctagagatgacattatccttttcaaagctcctacaaaccctcggaaagtttactgcaaaagggttaaaggtttaccgtttgataccattgacacgaagtttccataccctaaacctcaagtgaacctgcccaggggacacatatgggtcgaaggggacaattattttcattcgattgatagcaatacttttggccccatttccagtgggttggtcatagggaaagctataacgattgtttggccaccctccaggtggggaacggatctcaaactgagtaccggtagagactgcattagcaaaagagcaattttagaatga

SEQ ID NO: 77955 - DNA, 1665 bp, Saccharomyces pastorianus
atgaacaatatatttcatggaactgaagatgaatgtgccaatgaagacgttcttagtttccaaaaaatttccttgaaaagtccctttggtaagaagaagaacatatttagaaatgttcagaccttctttaagtcaaaaagcaagcattcgaatgtcgacgatgatttaatcaataaagataatcttgcctttgataaatctccattgttaacaaatcacaggagtaaggaaattgatggtccttcaccgaatataaagcagcttggccatcgcgatgagttagatgaaaatgaaaatgaaaatgatgatatagtcttaagcatgcattttgcttctcaaaccttacaaagtccaacaagaaactcatcaagaagatctttgaccaataatagggataatgatcttttaagtagaatcaagtatcctggcagtccccagaggtcgagctctttttcaaggtcaaggtccttgtcgagaaagccaagcatgaatagcagtagcaattcaagcaggagggtgcaacggcaagatgggaaaattccgaggtcatcgagaaaaagttcacagaaattttctaacattactcagaatactttgaacttcacgtctgcgtcatccagtccactagctcctaattcggtaggggtgaaatgttttgaatcatgcctagccaaaacacagataccatattattatgacgatcgtaactcaaatgactttttccctcgaatttctccagaaacgttgaaaaatattctgcagaataatatgtgcgagtcattttataattcatgtcgtattatagattgtcggtttgaatacgaatatactggcggccacataataaactccgttaacatacactcgagagatgagttagagtacgaatttatccataaagttttgcataacgatactagcaacaacaacactctaccaactcttttaattatccattgcgaatttagttcccaccgaggaccttcattggcctctcacttgagaaactgtgatcgtataataaatcaggatcattatcccaaattattctatcccgacatattgatattggatggcggatacaaagctgtttttgacaattttcctgaactatgttatccacgtcagtacgtgggaatgaactcacaagaaaatttgctgaattgtgaacaagaaatggataagtttaggagagaatctaaaagatttgctactaaaaataattcctttagaaaactagcctccccttcaaatcctaacttcttttatagagatagccatcaatcttcaacaacaatggcatcttctgcactatcgttcaggtttgagccgcctccgaagctgtcactaaaccacagaagagtctctagtggttcatcattaaattcaagtgagagtacaggcgacgaaaatttcttccccatcttaagtaagtcgtctatgagtagtaacagtaacctaagcacttcacatatgctactaatggacggactggataccccatcatattttagtttcgaagatgagagaggcaatcatcagcaagtaagtggagatgaagagcaagacggagattttactttcgttggttccgaccgagaagatttacccaggcccgcaagaagatcgttattcccttctctagagactgaagataaaaaatga

SEQ ID NO: 77956 - DNA, 750 bp, Saccharomyces pastorianus
atgaccacgaacgatacatacgaggctacttatgccattcccatgcactgtgaaaattgcgtgaatgatataaaggcatgcctaaaaaatgtcccaggaatcaattcattgaatttcgatatagagcaacaaataatgagcgtggaaagctcagtagccccttcaaccatcatcaacaccttgcgaaactgtggtaaagacgccatcataagaggcgccgggaagccgaattcttccgcggtcgctatcttagagacctttcaaaaatatactatagaccagaaaaaggacaccgccgtgaggggcctagcaagaatcgttcaggttggagagaataagactctttttgacatcactgtaaatggcgtcccagaggcgggaaattaccacgccagcattcacgagaaaggcgacgtctccaagggcgtggaatctactggtaaagtttggcacaagttcgacgagcccattgaatgcttcgacgagagtgatttgggcaagaacttgtacagtgggaagacctttctgagcgctcccttgccaacatggcaacttatcggccgcagctttgtcatttccaagtctctgaaccacccagaaaacgagccttcctccgttaaggactactcatttctgggagtcattgcgagaagcgctggtgtgtgggaaaataataaacaagtgtgtgcgtgtaccggaaagactgtttgggaagagagaaaagatgccttggccaacaacatcaaatag

SEQ ID NO: 77957 - DNA, 867 bp, Saccharomyces pastorianus
atgtcatattacaacaggtataggaacaaaagaagaagcgataatggtggaggaaacttaagtaacagtaacaataacaatggtggtatgccatctggactatccgcatcagatgcaatttttgatctgggtaaaaataagagggtcacggtaagacaatttagaaacataaatttaattgatatccgtgagtactatctggactcatctacaggcgaaatgaaacctgggaagaaaggtatttcgttgacagaagatctatacgacgaattgcttaagcacagattgaatattgatgaagccttgagaaggctaggatccaagagaccaaaaaccaaaatggttagactattgtccgacgacgaatatgaagatgataacaataatgacagtactaataacgacaaggataaaaacgggaaggacaagaacagcccaaagaagaggagagaagataagtccaaagcatctaatgagagtcatgacttggagccacgttcaaagaagaagaaacctgctccacccactctacttccacacgaggaaaacattcaaaacgctgaaagagaagccaatgctactttgatcatcccaggccaggcaggtaggaaacaacaagaggaacgcaagcaaaaggaaaaagaagaggcagaggaggcaaaggcaaaagcagttgcagaacaagagaaagaggcaaaggcaaaagaaaagatagctgaacctgtacccacacttcaagctaaaaaagaagatattgtctccaacataaacgagtcaaaagatgcaaattctagtgacgaagaatttgctcaaagcttggaagctgaaatgaacaaggctgaagacgacataagtgaagaagaataa

SEQ ID NO: 77958 - DNA, 1008 bp, Saccharomyces pastorianus
atggttaatgaaaaagtgaatccattcgacttagcttcggtttctcctttagtcttaggaggtgcaatactgaaccagcaatatacagatgagccagaatccattccactggaagacataatcaaatacgcattttcgcatggtatcaatgcaattgacacttctccctactatggccctagtgaggttctttatggtagggcactgtccaatttaaggaatgaatttcccagagacacttattttatatgcacaaaggttgggcgtattggtgcggaagagtttaactattctagagatttcgtgagatttagtgttcacagatcgtgcgaaagattacacactacatatctcgatttggtgtacttgcacgatgtcgagtttgtcaaatttccagacatcttagaggcattaaaggaattgaggaccttgaagaacaaaggagttatcaaaaattttggcatatcaggctacccaatcgactttatcacctggcttgctgagtactgctctaccgaggaaagtgatattgggtcattggatgcagtattgtcctattgtaacttgaacttacaaaacaataagctattgaactttcgagaaagactgctacgcaatgctaaactgaaaatggtttgcaacgcatcaatcttgagcatgtcgctactaaggtcacaggagacaagacagtttcacccgtgttctcatgaattgagagaatgcgcatctcaggctgccaaatactgtcaagaacaaaatgtcgacttagccgatttggccacaagatacgcgatttcggaatgggtaggaaagggacccgttgttcttggagtcagtagcatggaagaattgaaacttgctctggataattacgaaattgtgaaatcgaatggcaacagattatcttctaaggacggacaactagtagaatatatccaaaagaatatttttaaagaacattttaatgaagagtggtcttcaggtattcctcatccagaaatgatataa

SEQ ID NO: 77959 - DNA, 534 bp, Saccharomyces pastorianus
atgacgtcgaatagcgacggttcaagtaccagtccagttgagaaaccaattaccggcgatgttgaaactaatgaacctaccaaaccaatacggcggctttcaacgccatcgccagaacaagatcaagaaggcgatttcgacgaagaagacgatgatgacaaattcagcgtgagcacatcaactcccaccccaaccataacgaaaactaaggacagcagcgacacaagtacggttacgaggcggaagcagccgatcaggtacatcgagaataagacccggagacatgtcaccttctcgaagaggcggcacgggatcatgaaaaaagcatatgagctctccgtcctaaccggcgccaatattctgcttctaattctggcaaactctggcctggtctacactttcacaacgcctaagctcgagccggtggtacgggaagacgagggtaagagcctcatcagggcatgcatcaatgcttcagacactcctgacgctaccgacacgtcgccggcacaggaacaatctccggcaaactga

SEQ ID NO: 77960 - DNA, 858 bp, Saccharomyces pastorianus
atgtcagacatcgaagaaggtacgcctactaataatgggcaacagaaggagagaagaaagatagaaattaagttcatcgagaataaaacaaggcgccatgtgacattttccaaaaggaagcacggtatcatgaaaaaggcgtttgagctttctgttctaacggggacccaggtcctgttgctagtcgtttcagaaacaggtttggtatatactttcagcacgccgaagtttgaacctatagtcacgcagcaggaaggtagaaacctgatccaggcctgtcttaacgcccctgatgatgaggaagaagacgaggaggaagacggtgatgatgatgatgatgatgatgacgatgatggtaatgatatgcaacgccagcaaccacaacaacagcaaccgcaacaacagcaacaagtattgaatgcacacgcgaatagcttaggccatctaaatcaagatcaggtaccggcaggcgcgctgaaacaagaggtgaagtcacaattgctaggtggtgccaatcctaatcaaaactcaatgattcaacagcagcaacatcacacgcagaattcacaaccacaacagcaacagcaacaacaaccacagcagcaaatgtcacagcaacaaatgtcacagcatcctcgaccacagcaaggaataccacatccgcaacaatcgcagccacagcaacagcaacaacaacaactgcaacagcagcaacagcagcaacaacaacaacccctcaccggcattcatcagcctcaccaacaggcttttgccaacgctgcctccccctatctgaatgctgaacagaatgctgcctaccaacaatactttcaagaaccgcaacaaggccaatactaa

SEQ ID NO: 77961 - DNA, 1428 bp, Saccharomyces pastorianus
atgtctgaagcgatattccagccaatggatattgttcttgccaaagttaaaggcttttcagcatggccagcaatgattatccctaatgaactcatcccagataacatcctcaagaccaagcctgtgagtgtccacaaaggcaaatcaggtagtgataaaaaagcaaatgaagatattgacgcagacacggaatcagaggctagagatcgagagcaaagcgaagaagaagaagatatagaggattttggtgagagtgaggataatcctgaaaaatttataatatacactcccgttctgaagtttcgtaaaaatgatacgttgaaatcgacttactgcgtcaagtttttttgcgatgattcttatatctgggtgaagcccacggatatgaagattctaacaagcgaagattgtcgtaagtggctaagcggcaaacagcggaagaataagaaactcataccggcatatgaaatggctatgagaggcaaaaatggaattgatatttgggaatttgtggaatatgggtcttacggcaagccagatgaagaggaatatgtagaggaagaggaagaagagaacgaacctgaaaaaaaggctataaggccaaccaggtcttccagtagacagcgtcagaagcgcgtctcagaaacggaaaagagtgagggcggtaatagcaataaaaggaaaagagttactagatcgactaggcaacaagcgatagatgcttcagaagaggaagaggaggaagaggaggaaaaagtacaagagactgttagaaagaggccgcaaaggaccaaaactaagaaagttgtagtatccaagactaaaccaaatccaaaaacaaaggcaaagaaagagaaacctaaaccacctaagccaatcaaatatcattttgaagatgatgaagattggagcattgttgggttgggcccacaagatctatcaatcgaaaaaacgatggatccgattgcgaaaaaactgtcgcagaagaaaaatctagaaaagcatgtggagattaagctagatctcgaggataaactagcaggcatcaacaagctcctctgtgatgtcttatgttcagccattaaccaggctgtttcgataaaggatgatttcgaaataatattagatgaattgcagattgcccttgacaccagggggtccagaaacgaatttataacaattttccaatcaaataattccctactgttaaactttaggatattatttaacttgagaaaaagggaactgaacaaatgggatctgtgggatcgtttccaggatatttttaagcatatttattcctaccagtttatacctgatacggaagattggcaactagagcaaaatatggaaattgaagaaatggatcgggaaaagccgagctttagtgaagacgtaaaggaagaagaaagcaaagtaggagcatga

SEQ ID NO: 77962 - DNA, 615 bp, Saccharomyces pastorianus
atgaatagcggtggtagtgatagtttcgattatcttcttcaattaacaaaagctttaagtgcagagtgtcgggctaacagacaagagaccgatcgaatagaactattgttaaagcgccttgccaaacagtcaggaatatcttatgataatttgagcaaaaatataattccagattcatggaaagataatgcatctcaaaaagcatctccccccactgaggcacagaaacttatcagcgaaaattttaaactcatatacgagattgaaaaacaagagtacttcaatacaaaggctgttgcgctaattaacaacataaatgagcatttctcatatattaaaaattttatcgacgaacagaatgcaataagagaacgaaatattgccacatttacatcagaaaagcttgatgaaaggaacaaaagtcttcaacaaaattacgagtcattgaagacagaaaatgaagaaacaaaaaaaaaattgcattcaattatcaaacagtttgaaaaacttttgaaggaagtggattgggatcgtatatctaaagattccagagattacagccgctttaaaaaacagttggaatacctgcaagacacgtaccaggtactgaaatag

SEQ ID NO: 77963 - DNA, 2553 bp, Saccharomyces pastorianus
atggttatggcggatactattgccacaggagacaaaactagccagtttgatggaaaacatatgcaggatttagaaagaatttactccactagggatacactcgatgataatttctttggagaacgtggacaaaaagatgcaaacggtgattattacgatgaattaaacaatgaggaaaccaattacagtggaagtagttactatggtcactcagatgattcggaagtggttgggttgataaagaatgatactgtgagccagctcccgcctctcgacagttttatattcccagattctagggctttgttcttgttagatttaggcaactatgctgatttaacttatgaagaaattatcgtacacgggtttgaaatatatattgtggagcaatgggtagcatgtaggaatttgtcaacattgattacgtcatatacaggaaactctcaggatacaatatcgggagtcagagtcgttttgccaaaggatacgagtatgtggccagggagatttagacagtattttgaagaattaatggaatttgcgcggccaaaatttacaccaaagggcactctatttattaccaatctttcgggtgtgtcctttggcttgaatctgttgcatgtggaatgtggtgacttgagaacaatttggaaggatttcgaggttaattttgatctgaaaaacctgcattgtggtggaagatcagcaaatctgttatgccctccaactatggcatcacttgataagttttcacaactgttcaaaatccctacaaatggttttattgcacagtatccccaaatgattcagcagcagcaaccgcgtttgcctgaggaagaatacaagacggttggaaattcaaagtgtcgaaataccgatagtaaatcaccagtcgtggagatggtaactttaattcaaatttcgttgagttatttcaatttgttatctaagaactaccagacggatggtcttttgtgtgaagacaccaagcgagctatagatgaatggtgggaaacttacgggaaactgtaccttggtacagaaaagccaaggaatgaatgcacactgggtccgacgacagtagctggcctaattagtttgatcctttgttgctatttcaagttgatgatagaaaattgcatttcctctaaggatccctttgatgaagctggtttcttccaaggtatctataatttccaaaaaaagcatggcctcaataaaagaaaatctagagtttatttagacccaagaacgttagagaaactctttgaagtgacagcgaaagtttccagcaaagacatttttaaactgaagaaaatggtgacatcaacggtacaggacatcataggaaagggaaatcccatcaacctgtcacacaaaattcttacaacagatctagatacacttattcataatattcatggaggctctgtaggactactatggaaaggtaagggacacccaaggaaatgccgtacggatatttctaatgaagaatttttgaaatttaactaccagagaggcgatcctgatgggcagataagagaaagggaaatgctactagaaaaatttcgtttggaaagaatcgcatacgctcaaaagcacgcctccaaaaaggttagttcttccagtcttgatacatctgaagacgtagggaggaccaatgctatgccctcatctgcaacagtgtcatcgatgtttccaaactacgataataccaaatatgcatataattttggcatcaacaaattatatcaaggagaatactaccgaagaaattcgtttccctattgtaaagatcgcacacacgacaacatttatgaagatctttcagagctgaaggaaaagtcatctcgtttgtatagatgcaactcttcttctgctgtacagaatattgtggaaaaatgggatttaccatttgatccatctgttgttcgaatagctagagatttgttacgaatgaaatacgacatccaagcgcagcaacacatacaagaaatggatgagcattatatgggtaaattaaataaggagggaactgttggtcagtactctaaattcaacgaaagatataaaagactgcaagaactatataagaagtattcagatggtgcaaaagtgtttgaagggagatttgaagacattgacaataagcaacaacttcttctccatgagatgcaagagttaaattccttatcatctaggttgaaatatgatatgaggatattggaagttcgtgtacgagatattgaaagtagtgttgctcagtttgattccaaattaattgggttgaaaagctctcttcagggacagggtaaaactggaatatgctctgcaatagatcccaatagtgataaagacgaatatgatagatgcgtaaatgatttgatgaccactaacaaccccacctatgaagctctttgtttaaagatgctgagccgccgttattttaaagatttaaagaatgatactgtggggtggttcaggtggttatttggtaataattctttacacaataatgccagtgaagacgatagaggaatacgagtatga

SEQ ID NO: 77964 - DNA, 930 bp, Saccharomyces pastorianus
atgtctcacacagaaacacagactcagcagtcacacttcggtgtggacttccttatgggcggcgtttctgctgccattgcgaagacgggtgccgctcccattgaacgggtgaaactgttgatgcagaatcaagaagagatgcttaaacagggctcgttggatacacggtacaagggaattttagattgcttcaagaggactgcgactcatgaaggtattgtgtcgttctggaggggtaacaccgccaatgttctccggtatttccccacgcaggcgctgaattttgccttcaaagacaaaattaagtcgttgttgagttacgacagagagcgcgatgggtatgccaagtggtttgctggaaatctgttttctggtggagcggctggtggtttgtcgcttctatttgtatattccttggactacgcaaggacgcggcttgcagcggatgctaggggttctaagtcaacctcgcaaagacagtttaatggattgctagacgtgtataagaagacactgaaaacggacgggttgttgggtctgtaccgtgggtttgtgccctcagttctgggtatcattgtctacagaggtctgtactttggcttgtacgattctttcaagcctgtactgttgacgggggctctagaggggtcctttgttgcctctttcctattgggttgggtcattaccatgggtgcttccactgcgtcgtatcccttggatacggtaagaagaaggatgatgatgacttcgggccagaccatcaagtacgacggtgctctggactgtttgagaaagattgttcagaaagagggcgcgtattccttgttcaagggctgtggtgccaacatatttagaggagtcgctgcagctggtgtcatctcattgtacgatcagttgcaactcataatgtttggcaaaaaattcaagtga

SEQ ID NO: 77965 - DNA, 447 bp, Saccharomyces pastorianus
atgaaagatataataaattgtcgaagagaaattacgtcgaggaggttgaggaaaataagaatggcaacgacagatatcatatctctagtaaaaaataatttactctatttccaaatgtggacggaagtggaaattttacaagacgatttatcatggaagggaaatagcctgagattactgagaggtcgtccccctcacaagctgagcaacgatgtagacacagagcatgaaaatagcttgtcatcgccacgcccgctagagttcatattacccatcaatatgtcacagtacaaagagaattttctcactttggaatgcttgagccagacatttactcacttatgtagtccatctactgaaagaatactgctggccataattaacgatgatggtacaattgtttactacttcgtttataaaggagtacgaaaaccgaaaagaaattga

SEQ ID NO: 77966 - DNA, 2034 bp, Saccharomyces pastorianus
atgtccagctctacgactcctgatttactatatccctctgcggacaaagtcgcagagcctagtgacaatatacatggagatgaactacgacttagagaaaggattaaagacaatcccacgaatattttatcatacttccagcttattcaatatttggaaactcaagagtcatacgctaaggtgagagaagtatacgagcaatttcataacacattcccgttttattcacctgcgtggactttgcaactaaagggtgaattggcaagagatgaatttgagactgttgagaagattttggctcaatgtctttctggcaagttggaaaataatgacctatctctttggtcaacatatttggactacatacgcagaaaaaacaacttaattactggtggacaagaggcgagagctgttattgtcaaggcattccaactagttatgcaaaagtgtgcaatttttgaacccaaatcatcttctttttggaacgaatatctcaattttttagagcagtggaagccattcaacaaatgggaggagcaacagcgaattgacatgctcagagaattctacaagaaaatgctatgtgttccttttgataatctagaaaaaatgtggaatagatacactcaatgggaacaagaaataaattccctaacagccagaaaatttattggcgagttatcagccgaatacatgaaagcccgttccttataccaggaatggttgaacgttactaatggattgaaaagggcatctccaattaatctgcgcacagcaaacaagaaaaacataccacaaccaggtacctcagactcaaacattcagcagttacagatttggttgaattggataaaatgggaaagggagaataagttgatgcttagtgaagatatgctatcacaaagaatcagttacgtttataaacaaggtattcaatacatgatattttctgctgaaatgtggtacgattattcaatgtatatatctgaaaattcggatcgacaaaatatcttatatactgcgttattagctaatcccgactcaccttctcttacattcaagttatccgaatgctacgaactggataatgattctgaaagtgtttctaactgttttgacaagtgcactcaaactttactatcgcagtataaaaagatcgcctccgatgtaaattcgggtgaagataataacacagagtatgaacaagagctgctatacaaacagagggaaaaattaacattcgtgttttgcgtgtatatgaatacgatgaaaagaatatcaggactatccgcagcacgtactgtatttggtaaatgtcgtaaactgaagcgtatattaacacatgacgtctacgtggaaaatgcatatttagaattccaaaatcaaaacgattataagactgcttttaaggttttagaattgggtttaaaatacttccaaaacgatggagtttatatcaacaaatacttagattttttaatatttttaaataaggattcgcagatcaaaaccttatttgaaacatcagtggaaaaagtgcaagatttaacccagttgaaggaaatatacaagaaaatgataagttatgaatcgaaattcggtaacttaaacaacgtttattctctagagaaaagatttttcgaacggttcccccaagaaaatttgattgaagttttcacaagtcgttatcaaattcaaaactccaacttaataaagaaattagagttaacttatatgtataatgaggaagaagacagttacttttcttctggaaacggggatggccatcatggctcttacaatatgagttcgtcagatagaaagagactaatggaggaaactggaaacaatggaaacttctccaataagaaattcaaaagagactcagagcttccaacagaggttcttgatttattgagcgttataccaaaacgtcaatattttaatacaaatttactcgatgcgcagaaattggtgaattttttaaatgatcaagtagagattccaacagttgagagcaccaagtcaggttaa

SEQ ID NO: 77967 - DNA, 720 bp, Saccharomyces pastorianus
atggttagcatgatccatattgtggtgtttttgctagcaatcacaaccattttcgaaatacttccgctaataaccgtccccgtgaccaagtacctatcgctatcgtcattcagaaaccactattatggcctgtttggctggtgtgtacgtggtcaaaaccaagaattgatgtgcacgaaaatgaagataggatatgacagtacagatgtcgactcctccgggcacgttttgaccctgccatcgaactcaaaagtggtcgtctccaatttattagtggttcacccgatttcactggcattcacaggaacgctattaattttagcagtgattatcatggtaactccactaggggactcacctgagatgttattgttcacggcccttttttcgctgccaacgttcatgctatgtcttttatgttttttggtagatattcttctgttcatctccaaactggactggcccggctggctaatgctagccgctactattagcgtagcactttgttgttccatgctgtgggtcatgagaagagttgtgtcagtcaaaaaatatgaatcgcaacagtcaattgcgcatgcgtgctcaatggaacagcactcaatttccgacatttaccagagtaaacagaacggcaatagctcagaatatgaagtggccccaacacatacagatagtctgattgctccagaagtgacatatagagggttcattgaataa

SEQ ID NO: 77968 - DNA, 1557 bp, Saccharomyces pastorianus
atgattactacagtgcaagaaatcagcaaatggagaaacctgtgcttcattaggatgcaatctcgcaaatggtacccagtacttaaaaagactcctttagtagcggacggtcgaaagatcatcaaacatgccgataaagttccccatccgggagaaataattcacccattttaccaaccaacagcaatagaacaattcacggcatgcgctacggaatacaatcctagcctgcttgatggcaaaaaaattgctccatcactgataaaacacccggtgagcctaaaaaccatactagttgatagcaaattaaagtttgatgatattaggggagtgaatagatggttgatggaatttgttgcaagacgacaacatcaaagaaatattgtacttacgcctgcgagcaaaagcgttagatcttttcacgttctgcatttgtcttcaaccgatattgccaaattaagaggtcttgaaaatgtattatcagagattgaaaacacgaatgatttgcaatccagggtcgagtccgtgaataatgaactacagaatatttttgaccgcgacagtaaacagacaagattattttgcgagaatatactggcttatttgataaagaattatggaaactcgactgaaaaacttatactactaataaatgttactgagatgcaattatattcacgtttagaccaaatgaaggccatgaacattattttatataatatcctttgtaaagtggaagcaaatgaaaacccaccgtacagtcccacattggttaccgcactagaaaacctattggcagcgatcaacaacagattttttccagggcgttgcgaaaattcattgcacccaatagtaattgaacaactattatcatatttcattaaaaccggcaatttgaatgaaagcaaaaattttttgggccatttaataaaaaagggtattttaccagaggctactatcattaatagatatttggaggcaattgatgttcatttcgataaaagcactaagatttttgatataagatccaaatttgcattcatagcagatcttgcacccataatagaaaattatggaacaatagacctgtttaaatttttgatacctatgtgccggcatttcgacgaattgtgttctctgctaaatattattcgaaaatccaataacgcaaaacgggctgtggatagcaccttacctatttttatcaaaaaagtattaacatttactaaagatccaatgatcaactccggaaatctatccactgttttcaatatagtgagcccaatatatggacaaaacgtgcccagcgaattcgtggagaaatttatactgtcttttgcacttcaaggaaattacactatgatggctcatatgatagatacatataagatcaaactaagtcataaataccaactacaaattattagggctctcaaaaatagtgagagaaatcacgcgcttaagaatacgggcgctgtaggttataataaggaatttaaaaagtatttcatcgagaaatatttgaattgcactgaacgagaagttttacgcccataa

SEQ ID NO: 77969 - DNA, 1515 bp, Saccharomyces pastorianus
atgtttgcaatgcgctacgtctatttgtttgcaatttgtattaagtttgtttcaagctccgaactaggaaaaatcaacaatctgctgcaaggaagattgatatacacagataattccgttgcgacaaatgtattagaatccaaatttccattcttgaaatcaacatgtgttaaagacgcactaaaattatttttgccacaatgtattgcaaatggacttgaatccattgacgctgaaacaagggtagaaacggccattaaactttcaatatgcgagtttcaggcatctggcttgggcgaaataccagaaaattgcatggttgacgacctaggatcaatgatggattgtatgtttgaactagaatcatcttcacagtggtggacaacttatagtggaaattatcagcgactatcgagtatttgttatgaaaatcttcttccttttgaaaaagaacagatactgaaactttttctaaatatcactgaactttatgattcatttggggatgatgtcgatactaagttaaatcatctgatgtttcaaatggagcaagattctcaaaattttttggacgatctggccaggatgttccacaactatgacaatgaactgcgaaatgcgaccgaaagcaatcgaataatcttagaaaacgacctctcattttttagaaataaagtgaatgatgtactctatgaaacttccgaacaactagaggtccaaatcatagagaagaacagtcaactaatgaatgaagttgataccgtccatcatattatgagcgatctagccgatgagcttgctaaaaatgacataaaatctaagataaatgacttgaaggacgacagcctgaataatttacaggacctagtggaaatgtccaacgacgtaaaagaatattactctagaaataacaagttagttaataccgagttggaaaacttctcgatgggtttaaaaaaacagttaggaggcatgtcaaaggatctttctgaatcacaaatggaagctatagagctcttgcaagggttcaattccatccttcatgattcattgttaccatccatgacggatgagatagtacctgagatgacgaacttcaaaaataccttactacaagaatggacagctataacatctacactaaatggagattttgctttatggaatgaggagattttttcaacttttaatgatatttcagagaagctgaatggcacaaaaaaaaaattagacgacattgaaatcagagtctcacttgtccataaaaatgtcatgacaatgatgagggtattggattttatgtggaaaactagtaaaatgattataagatgtgggtaccttgcagtcaagaataaatactactggttactgtgctccgttgtgtggatttggtcaaaataccgtacgtctcgagtaaacgtcaaaatgattcctattaaacgctattaccaatgggcagctcttctactttcaatttatctaggagctaagactggctcattgattgatttttaa

SEQ ID NO: 77970 - DNA, 1251 bp, Saccharomyces pastorianus
atgcctatggttaccgtgaagtataacttccaacttttcaaatgtaaagtttcgttgaattcaacactaaacgatgtgttacaccaatccatacaattctttcaactgcacacctcgtcaaacgactggtcattgatacatttggataaaccggtgccattagatttgccatggaggcttctaaacttaccaacgggtgtcaacttagaattatctaaaagtagtaattttccggtggcgaataagaccaaccgcgaagatattccattcaatatgatcaaaatacggtttcaaatcccaggaagagattccgtggttaaagaaatgctatctgaccaaccaattgcccctatcttgcgacagatgagcggcgctgcgggagatgattttaagatccaggtcttttccaagataatagagttcaaaacaattaaggatgagaatttgactctcgaaaatttagggattcaggagccttcgtcagttagattgatttttaataatacatctcattctgagggcattagcgctaatagcgctattcacccaaaacaaactccccctacgatgacgaacccggaaacggttgcctcactaccacctcacgaactacataaaccttctgtgtttttgccctcggatgagccattagcagttatcaaggatcaaatcgaggatgaagaagattatgaattgacagtagaacaagccaagaaataccaaaaaatgttatcatcgaaggctggtactttgggtggtcctattttgacaaagagacttagagagcaatcagccaacaacttgccaaagaaaaataaggctatatctgagtgtttgctgagagtcaagttccccgatagaagccatattcaaatagcattcaaacccaatgaagacatgcgtacagtttataacgtcgtgtcgcagttcctgatcgatgagaacatgccttttacgttaaaccaatctcatcctttcaaacccttggccaaagacgataagaagctactggatgacctggaatttggctctaaaacaatgctgctttttgaaacaaattcaaattctaatggcccattaataaaggctcatcttttggaagacgcacaaaaaatcacacacgaaacgaggacaaccccatcagttaatacgataaataaatccaatccacagggcccttctgataacgctacaagtatcaaaaagactttaaatagagtacctaaatggatgaaattaagtaaaaaataa

SEQ ID NO: 77971 - DNA, 1281 bp, Saccharomyces pastorianus
atgttgaaagagccctcagttcgcttgcgggaggctattattgaaggcaatttacttatagtgaaaagattattgcgacggaatccggatttgctaaccaacatagactcagagaacggatggagttcattacattacgcctcataccatggaagataccttatatgcgtgtatttaattcagctggggcacgacaagcatgaactaataaaaacctttaaaggaaacacctgtgtgcatttagcattaatgaaagggcacgagcaaaccttacatttacttttgcaacaatttccgcgatttatcaaccatcgcggagagaatggtagagcccccatccatatagcatgtatgaacgattactaccaatgtctgagtctgttgataggagttggtgctgatttatgggtaatggacactaatggcgacacgccgctgcatgtatgcctggagtatggcagtataagttgtatgaagatgcttctcaatgaaggtgaggtgtccttggatgataatgtcagggacaagggaaattggaagccaatagatgtagcacaaacgtttgaagtaggtaatatatattcaaaagtgttaaaagaggtgaaaaagaaggggccaccgttgggtgcaggcaaaaaaccaagttcattcagaactcctatactaaatgcgaaggccactttcgaggacgggccttccccagttttaagcatgaattcgccatattcgctctattccaataatagtccgttgccggtattaccaagaaggatatcaacgcatacaacaagcggtaacggtgggaatcggaggagttctatcacaaatccagtattcaacccacgaaaaccaaccttgtctacggacagtttttcgtcaagctcaaattccagctcgagactaagagtgaactccatcaacgtcaagactccagtaggtgtgtcgcccaagaaagagcttgtatctgaatcagtacgacacagtgcaacaccaacaagtccgcacaacaacatcgcgttgattaatagatacttgttgcctaacaagagcaatgacaacgtgagaggagactcacagacagctacaatcaacgatgacggtggcggcggcaatggcggtgatgccactataggaatgggactaagaaaggacccggacgatgagaacgagaacaagtacaagattaaggtaaacaatggcgagccgaggagacgagtgtcacttctgaacatacccatctcaaaattaagaaatagcaataacacgcgtgcagaagattga

SEQ ID NO: 77972 - DNA, 858 bp, Saccharomyces pastorianus
atgcgttcttcggtatatagtgagaacacttacaactgtatacgaacatcgaaggagcacctaacagaaagaaggagggtcgccatggcgccaatgttccaacatttcttaaacttatgcgtggaaaaatttcctgaatccatcgagcacaaggatacagatggaaacggtaacttcaccaccgctattttagaaagggagattatctacatccccgaagatgacactgacagtattgacagcgttgacagcctcaagtgtataaactacaagctgcacaaatctcgcggcgaccaagtgctggacgcctgtgtgcaattgatagacaagcacctgggcgccaagtatcgccgggcctcgcgcattatgtacggcaacaggaaaccatggaaggcaaacaaactcgcagagatgaaaagcgccggccttgtgtatgtctgttactgggacaacggcgtgctaggtgcatttacttcattcatgcttacagaggagacgggtctcgtcgaaggtgacgctttacacgaggttagcgtgcccgtgatatacctttacgaagtacatgtagctagcgcgcaccgcgggcatggaatcggtcggcggctactggagcatgcactgtgcgatggcgtagctcgacacacccgccgcatgtgcgacaatttcttcggtgtagcactcaccgtattcagtgataacactcgggcccggcgactatatgaggcgcttgggttctaccgcgctccaggatcacccgcaccagcatcacccacaattcgtcacacgcgacatggtgggggacgcgtagtcgtgccctgcgatccgctttattacgtatattgccttcacatgccgtga

SEQ ID NO: 77973 - DNA, 504 bp, Saccharomyces pastorianus
atggctttaagtttaggacagttcatcaatgtgggtggtatggtgaaggatttgaaaagtttcaactttagcgtatatggtagatggtttggatatatcaacataatcttgtgtattgcactcgggatagcgaatctgttccacgttagtggagtgatagcttttggtatcattagtataatccaagggttagtgatcctattcattgaaataccatttttgttgaaaatctgtccccttagcgataatttcattgaattcatcaagagatttgaaacaaatggatggagatgtcttttctatctagcaatggcgataatccagtatatttccattgcagtgatggctacgagtctaattgtggtagctgtcgggctaacgatatcgtcaatcagttatgcggtagcatatactaaacaccaagagttccagaatacgaacattatcaaaaatcctacagatgacgatttccctcacgaggccgttgttagagagatgttgtaa

SEQ ID NO: 77974 - DNA, 552 bp, Saccharomyces pastorianus
atgaacagttacagcctattaactagatctttccacgaatcttctaagccccttttcaatttggctagcaccttgttgaaggcttccaagagaacgcagcttagaaatgaattgataaaacagggtcctaaaaggcccacatctgcttatttcttatatttgcaagaccacagaagtcaattcgttaaggaaaatccaaccttacgtcctgctgaaatcagcaagattgccggtgaaaagtggcaaaatttagaggctgatataaaggaaaaatacatttctgaaagaaaaaagttgtattctgaataccaaaaggcgaagaaggagtttgacgaaaaacttcctccaaagaaaccagcaggacccttcattaagtatgccaatgaagttcgttcgcaagtttttgcacaacatcctgacaagtctcaattggatctaatgaaaattatcggagataaatggcaatccttggatcaaagcattaaggacaaatacatacaagagtacaaaaaagctatccaagaatataatgctcgctaccctctcaactag

SEQ ID NO: 77975 - DNA, 606 bp, Saccharomyces pastorianus
atgagtagtgacggcatgaacagagatgtttcaaactcgaaaccaaatgtcagattcgctgctcctcagcgactaagcgttgctcatcctaccatatcatccccgctgcatatgcccatgtcgaagtcatcaagaaagcctcttgtaagaaccaaaataagactagatcctgggcacagtgctctggactggcactctctaacctccaatccagcgaattattatacaaaattcgtttcgctacagcttatccaggatttactcgatgatccggtatttcaaaaagataacttcaagttttcaccttcacaactgaagaaccaattgcttgtccaaaagatacccctttataaaataatgccacccttaagaataaacagaaaaatcgtaaagaagcattgtaaaggtgaggacgagttatggtgcgttataaacggcaaagtctatgacatttctagttatttgaagttccatccaggtggtacggacatcttattaaagcaccgtaatagtgacgatttgattacatattttaataagtatcatcaatgggttaactatgaaaaattattacaggtttgtttcattggcgttgtatgcgaataa

SEQ ID NO: 77976 - DNA, 438 bp, Saccharomyces pastorianus
atggacccagagttacaagctattagggaagccagattggctcagttgaaaaacaacagtgggggtaccaacggcgatagaaatagcggtgctaataatggtggaggtgaaaattccgctcccgttggtgcagctattgcaaatttcttggagccacaagctttagaaagattatctcgagtggccttggtccgtagagacagggcccaagcagtagagacatacttaaagaaactgattgctacaaacaacgtcactcataaaatcactgaagctgaaattgtttcaatcttgaatggtatcgccaagcaacaaaattcacaaaataacagtaagattatcttcgaacggaaagatttcagcgaagatctgaattcatttgacaagcagaatgctaaaaatgatgacgacgaagatgatgacgacttctttgattag

SEQ ID NO: 77977 - DNA, 2055 bp, Saccharomyces pastorianus
atggacaccagcaagaaagatactactaagtcgccctcacattccaacagttcttctccttcatcttcttctctctcttcatcttcttccaaagagaaaaaacgtcctaagagactatcctcccagaatgtaaattacgatttgaaaaggagaaagatcatcacttctgaaggtatagaaagatcattcaagaacgagcatagcaatcttgcagttgaagacaatatcccggaagaagaacccaaggaacttcttgaaaaggactccaagggtaatatcatcaaacttaatgagccatccaccatctcggaagattcgaaggtatctgtcactggattgccgttaaataaaggtccttctgagaaaatcaagcgagagtctctttggaattatagaaaaaatttgggaggccaatcgaacaactcagaaatgacgctggtccccagtaaaagatttactcaggtgccgaaaaattttcaggatttgaacagaaatgatttgaaaacgtttttaactgagaacatgactgaagagagcaatatacggtcaactattggttggaatggcgatataataaacagaactcgtgaccgtgaacctgaaagcgaccgcgataataaaaagctatcaaatattagaaccaaaataatactttcaacgaatgctacctatgattcaaaaagtaaactatttggccaaaattccatcaagtcaacatcgaatgcgagtgaaaaaattttcagggacaagaacaattcaaccatagattttgagaatgaagatttttgttcggcttgtaatcagtcaggttcttttttatgctgtgatacatgccccaaatcctttcactttctttgcttagacccaccaattgatccgaacaacctgcctaaaggtgattggcattgtaatgaatgtaagtttaaaatcttcataaataactcaatggcaactttaaaaaaaattgaatccaacttcattaagcaaaataacaacgtcaagatttttgctaaattacttttcaatatcgattcccacaacccaaaacagttccagctaccaaattatataaaagaaacctttcctgctgtgaaaacgggttcgagaggacaatactctgatgagaatgataagattccattaactgatagacaattgtttaacacttcttatggccaaagcataactaaattggactcttacaacccggatacacatatagattcaaattcaggtaagtttttaatttgttacaaatgcaatcaaaccagactaggttcatggtctcatccagaaaattcaagattaataatgacttgtgattattgtcagactccatggcatttggattgtgtaccgagggcttctttcaagaacttaggttcaaaatggaaatgtcctctacattccccaactaaagtttacaaaaagatacaccattgtcaagaagataatagcgtaaattataaggtgtggaaaaaacaacgattgataaacaagaaaaaccaactttattatgaacctttacaaaaaataggctaccaaaataacggaaacattcaaatcataccaacaactagtcatgcagattatgatttcaatcaagatttcaaaattacacaaatagatgaaaattccattaaatatgatttttttgataaaatttacaaatcaaaaatggttcaaaaaagaaaactctttcaatttcaagaaagtttaatagataagttagtatcaaatggatcccaaaatggcaatagcgaggataatatggtcaaagacatagcctcgttaatatatttccaagttagcaacaacgacaagagtagtaacaataaatcggcttccaaaagcaataacttaagaaaattatgggatttgaaagaactgactaacgtagtcgtgtcgaacgaactagattctatacaattcaatgacttttccaacgatgaaataaagcatctgttatatttaaagaagattatcgaatccaaaccaaaggaagaactgttaaaatttttaaacatagaaaatcccgaaaaccaatccgaatag

SEQ ID NO: 77978 - DNA, 666 bp, Saccharomyces pastorianus
atgggccaaaaaagtagtaaagtgcatataaccaaaacagatagggcgatcctagaagtaaaacgatctaaagatgaaattcataagtttacgaggaggacagataatttgattttggtagagaagagtcaactaaaagacctaatacgaaaaaatcctgaaaattataaatctaacatgaaggtacgatttctactaaaaagaattcattatcaggagcatttgttgcagcaggcttcggatcagcttattaatttggaaaatatggtgtcaacacttgagttcaaaatggtagaaaagcaatttattaatggactgaaaaatggaaatgaaatcttgaaaaaactaaacaaggaatttagcaatgttgatgaactgatggacgatgtacaagatcaaattgcgtatcaaaatgaaattaacgagacattatctagaagcttagtcggaacaagcaattatgaagacgatctagataaggaattggatgctctagaaagtgaactcaatccagagaagatgaataacgcaaaagtagctaacatgccatcaacagaaggtttgccatcattgcctcaaggagaacaaaccgagcaaaaagaaagagaggaattcgcgacggaggagagatcagacactaaggaacctttagcattactatcctga

SEQ ID NO: 77979 - DNA, 2226 bp, Saccharomyces pastorianus
atggttgataccgcaccatacattggttcactagggagaagttccctttttgatactggtgatatagaacaagcccctggtaataatgcaattggtattaatgaggaagatattcacgcgtttgtatcaagtactggcgaaacggttcaattaaagaagaagcctgcgaagttagcaaccgggaatattagtctatacactaacccagatactgtttggagatcagacgacacgtacggcatcaatataaactatttgttagacaaaattgaggcatctggcgatgaccgcactaacgcacaaaggacttcacctataactggcaagataggtagcgacacactctgggtagagaaatggcgtcctaaaaaatttctagatttggttggtaatgaaaagacaaacaggagaatgttaggttggttgagacaatggacgccggctgtgtttaaagagcaattacccaaattgccaaccgaaaaagaggtcagtgatatggaactcgatccattgaaaaggccaccaaagaaaattttactactgcacgggccaccaggaataggcaaaacctcagtagctcacgttattgccaaacaatcagggttttctgtctcagaaatcaatgcaagtgatgaaagggctggacctatggtaaaagagaaaatatataatcttttattcaatcatactttcgatacaaatcctgtgtgcttagtggcggatgagattgatggaagtattgagagtggatttattagaattttagttgacattatgcaaagcgacattaaagccactaataaactattatacggtcaaccagataaaaaggacaaaaagcgcaaaaagaaaaggtctaaattgcttacgcgacctattatttgtatttgcaataatctatatgctccttctttggaaaagctgaaaccattctgtgaaattattgctgtgaaaagaccttccgatactaccctactagagcgattgaaccttatctgccataaagaaaacatgaatattcctataaaagcaatcaatgacttaattgatttggctcaaggtgacgtaaggaattgtataaacaatttacaattcttggcctcgaatgttgattcaagagattcctctgcatcagataaacctgcttgtgcaaaaaatacgtgggcgtcatccaacaaggactcccccatatcatggtttaaaatcgtgaaccaattgtttagaaaggatccacatcgtgatataaaggagcagttttatgaattgctaaaccaagtagagcttaatggtaactctgacaggatattgcaaggctgttttaatatatttccctacgtaaaatattccgacaatggtataagaaagccagcaaacatttcagattggctatttttccatgatttaatgtaccaatcaatgtatgcgcataatggcgaattgttacgttactccgcccttgtgcccctagtcttcttccaaacgtttggcgatatcgcaaacaaagatgatattagaatgaagaatagtgaatacgaacaacgtgaattaaaacgagccaactcagatatagttagtctgattatgagacatatctcggttcagtccccactaatggcaagttttacggatagaaaatcgttaatctttgaaatactaccatatctagattcgatgatctcttccgattttaataaaataaggaacctgaaactcaaacaagccatcatggaggaattagttcaattgctgaaaagctttcaactgaatctaatccaaaatcggtcagaaggatttgatgtaaggggtggcctaacaatcgatcccccaatcgatgaagtcgtattgttaaatcctaaacatattaacgaagtccaacataaacgggctaataatttgagttcattgttagcaaagattgaggaaaaccgggccaagaaaaggcatatagaccaagtgactgaggatagactacagtcacaggaaatgcatagcaaaaaagtcaaaactgggttaaattcttcctcaagtacaatcgactttttcaagaatcagtacggattattgaagcaaactcaggaattggaagagacacaaaaaactattggatcagacgaaaccaaccaagcagatgactgcaatcaaacggttaaaatatgggtgaaatacaatgaggggttctccaacgctgtcaggaaaaatgtgacttggaataacctgtgggaataa

SEQ ID NO: 77980 - DNA, 1017 bp, Saccharomyces pastorianus
atgattgcttcagaaatttttgaaagaggtgtacaagatccattttgtcaagattgtgattatgaagatgaaacagacgtacaaagttttttaggttcaaatgatttgaatgattttgtaaattccaaattagcgtcctttagttttgaaaattcctcgaaatcaaataattctcaccacagcagcagtaccaatgccggaaatacaagcagacacataggcaatcatactattggccatcatttgaggaaaatcaagacagctccgcatcacttgtatggcttcgtcccagcaagttcaacgaacaattccaatgaaccaattcgcccttctccaagaagaataagagcaaatagtagcaccctcattcaccagttgtccagacaatccacaagacagtcttccttgggcgacgcggcggattcctgttttgaccacaaatgcataaagccaagatccaggcattcttcctgttacggtataccaacacatctatacggccttgaaaaatacgtttcatccgagctagactctctagcagtagctaacgaccagtcaaatgatctcacttccccattaacatctgtttcaacacccgcctcgaattccaactcgtatttgaatctgaattcaagttcggctgcatatccgtcgtcttatctctccaacgaaaagaataatcgactaaaattgatttcccatgggaaaatatcatcaaataacgtcccaggtcacagtggaaaccttaaccactatcacagagaacgaacgccatcaaatctaagaagagaatccttttcgcttctttccaatggttcctcttcctctcccttgcagactagaaacaactcgtattccaactctttggtgaaatctccttccaatagttcattgaatactagtgtggcttcttctaacgaagaatctattcctcacacttctaattgcctggaggaaaggaatcccaggagaaaatcattcataaaattgtcactagcgagttcattctccaattga

SEQ ID NO: 77981 - DNA, 357 bp, Saccharomyces pastorianus
atgactatcgctgaaataactataagacaaaagttctcttacccctttttatttggcaatgttttaggtcatccgtggccaagaaatgtgccaaggaaggaaattaaaatgcttttatttcgaaccgcaaataatagtttccccggatttttacttatttttacgagaaagcgaaggaacttaccaaaacaacgtgacaacgaaattccccgcacacgcgcattagaaacatatctacgggttttctctgccgctagaaaacagcgcgaggcagatgccaccgcctcgttctggcggctcgtaacatctgcttcgagaagccattaccatatgtggcccatcaagcggattatctag

SEQ ID NO: 77982 - DNA, 2478 bp, Saccharomyces pastorianus
atgttgctactttcttggtcaagaattgctactaaggtagttagaaggcccgttcgcttccggtcctattacggcttgacccatatcaagagtttacatactcaatatcggctactcaataggctgcaagagaataagagcggtaacaagaacgaggacaataacgaagacgctaaacttaacaaagaaattcccacagacgaagaggttgaagcaataaggaaacaagtagaaaaatatatcgaacaaactaaaaataatactataccggctaactggaaagaacagaaacgcaaaattgatgaaagtattaggcgtttagaagatgctgtattgaaacaagaatctaacagaattcaagaagaaagaaaggaaaaagaggaggaaaatggtccttcaaaagccaagtcaaacagaacaaaagagcagggctactttgaaggtaacaatagcagaaatattccaccgccaccacctcctcctcccccaaaaccacctctaaatgatcctagtaatcctgtatcgaagaacgttaacttattccagataggactaacttttttcctcctttcgtttttattggatctcctcaacagttcggaagagcaaagtgagataacgtggcaggattttagagagaaactattagcaaaaggttatgttgcgaagttgattgttgtcaacaagtccatggtgaaagtgatcttaaatgacaacggaaaaaaccaagccgacaattacggtcgcaacttctattatttcacaatcggttcaattgatagcttcgaacacaaacttcagaaagcacaggacgaactggacattgataaggatttcagaatacctgtactatatgttcaagaaggcaattgggctaaagctatgttccaaattttgccaactgttttaatgattgcaggtattatttggttgacaagaagatcggcacaagcagcgggcggtagccgtggaggcatatttggtctgagtcgttctaaggctaaaaaatttaacactgaaacagacgttaagatcaagttcaaggacgttgccggatgcgatgaggctaaggaagaaattatggagtttgtgagcttcttgaaagagccttctcgttatgaaaaaatgggagctaaaattcctagaggtgcaattttatctggtccaccaggtaccggtaaaactttgcttgcaaaggcaacagcaggtgaagccggtgttccgttttattttgtttctggttcagaatttgtagaaatgtttgttggtgttggtgcagcaagagtaagagatttgttcaaaactgcaagagaaaatgcaccctcgattgtgtttattgacgaaattgatgctataggaaaagcaagacaaaagggtaatttttcaggtgccaatgatgagagagagaacacgctaaatcaaatgttagtagaaatggatggtttcactccagctgaccacgttgttgttttagctggtaccaatagacccgatattctcgataaagcattattaaggcctggtagatttgacaggcatatcaatatcgacaagcccgaacttgagggtagaaaagccatttttgctgttcatttacatcatttgaaacttgccggggaaatttttgatttgaaaaatagattagcggctttgacgccaggcttttctggtgctgatattgccaacgtttgtaacgaggccgccttgattgctgctagaagtgacgaagatgcagtaaaattgaatcattttgaacaagctatcgaaagagtcataggtggagtggaacgcaaatccaagctgctctctcccgaagagaagaaagtggtggcttaccacgaggctggacatgctgtatgtggatggtacttgaaatacgcagatcctcttctgaaagtcagtattattccacgtggccagggcgcccttggttatgcacagtatttgccaggtgatatcttcttactaactgaacagcaacttaaggacagaatgaccatggctctgggtggaagagtttctgaggaattacatttcccatcagttacaagtggcgcatctgatgacttcaaaaaagttactagcatggccacggcaatggtcacagaattaggcatgagtgataaaattggctgggtcaattaccagaagagagatgatagcgatttgacaaaaccattttcggacgagacaggtgacattattgattccgaagtatacagaatcgtccaagaatgccatgacagatgtacaaagctgcttaaagaaaaagcagaagatgtagagaagattgctcaagtactactgaaaaaagaagttttgacaagagaggatatgattgatttacttggtaagcgccctttcccagaaaggaatgatgcttttgataagtacttgaacgattacgaaacggaaaaaatcaggaaggaagaagaaaaaaacgaaaaacgtaatgagcctaagccatctacaaactga

SEQ ID NO: 77983 - DNA, 684 bp, Saccharomyces pastorianus
atgtctcctatgaaagttgcggttgtcggtgccagtggtaaagttggacgtttattgataaaccaattgaaggccaacgatagtttctcaacaccattagcgattgttagaacacaggatcaagtcaattatttcaagaatgaagtaggtgttgatgctagtttgacagatatagaaaacgcgtccgttagtgagatcacagacgctattaaggcttatgatgccgtggtctttagcgccggtgcgggtggtaaaggaatggaaagaattttcacggttgatctggatggctgtatcaaagttgttgaagcatgcgaaaaggctggtatcaaaaggttcgttgttgtttcagcgctcaaggcggaggatagagatttttggtataacattaagggcttgcgtgaatactatattgcaaagagatctgctgatcgtgaggttagaaactccaatttggattacactattttacagcctggatcgttggaactaaataaaggtaccggtcttttgcaaccccttgacaaattagaagagaaagcttctgttaactactccattaacagggaggatgtagcttcttttattgtggaaagcttactacatccaaatgcaacagtgaaaaaaaccatttcgttggtaaatggcaacgagccaatggaaaaattcattcaaagtttgtag

SEQ ID NO: 77984 - DNA, 1542 bp, Saccharomyces pastorianus
atgtcgactgctaggcctagaataatcacttcgaaggctccattattgcctcaacagactaccccggagcagcgttactggcgtcaatacacttccgcacaactggttaaagaacataatagcgttactcacatatcattcaatcctcaacatcctcatgattttgcagtaacttcctcaaccagagttcaaatattttcttcaagaactaggcaagtgatcaagaccttttcaagatttaaagatgttgtctattctgcatcctttaggagtgatggtaaattgctttgtgccggtgatgctaccggtttagtgtctgtatacgacagttataatcccaggactatccttttatctataaacgcttccacacatcccacacatgttacgaaattccatacgcaagataacaaaattctggctacggcgagtgacgatagagtgacaagactttgggatatatccaacgcatatgagccacaattagagctcaccggagccactgactatgttcgtaccttatcatttatcccagcagccccacatttggttgcaacaggctcatacgatggtttgatcagattatatgacacaagatctagcggatccacgccaatttattctctgaatcatgaccaacctgttgaaaatgttattgcagtatctccaacccaaattgtttcttgcggtggcaataatttcaaagtgtgggacttgaccagtaacaagaaattatacgaacgtggcaatttcaataaggctgtgacatgcttggactatgttgaaaattttgattctccaatgcaatcggcgttgatcgcttcttccttagatggtcatgtcaaagtctttgatcctttagacaatttccaagtcaaatttggctggaaattttcgggtcccgtactaagttgtgctgtctcccctagtaccgcacaagggaataggcatttagtagcaggtttatcatcaggactactagccattagaactaaaaagaaagagaaacgttcttccgataaagaaaacgcacccgccagttttaataagaatgcgaaaagtaataacttccagagaatgatgcgaggctcggaataccaaggtgatcaagagcatataatccacaatgataaggtaagatctcaacgtcgtatgcgtgcattcgaaaggaacataaatcagtttaaatggagcgaagcactcgacaatgcctttgtaccaggtatggccaaagagttgacacttactgttcttcaagaactacgcaaacgtggcaaagttcgtgtagcgctatatggtagagatgaatctacattagagccgctactgaattggtgcttaaaaggtattgaagatgtgagatcagcatctattgtagcggattgggtcgccgtggttttagaattatatgggaatacgttagaaagctctccagttcttcaagaattgatgatagatttgaaaactaaagttagacatgaaattcataagtctaaagaagctcaaagaattgaaggtatgcttcaacttttaacgagttaa

SEQ ID NO: 77985 - DNA, 675 bp, Saccharomyces pastorianus
atgcacaaaacccacagtacaatgtccggaaagtcgatgaaagtaattggggttttggcgttgcaaggtgcctttttggagcataccaaccatttaaaaaggtgtttggctgaaaacgactacggaataaagatagaaatcaaaactgtaaaaactcctgaggatctagcccagtgcgacgccttaattattcccggaggagaatctacgtcgatgtccctcatcgctcaaagaacaggcttatatccttgtttatacgaatttgttcataatccggaaaaggtagtttggggtacttgtgctggtctcatctttttaagcgcgcaattagaaaacgaaagtgccctagtaaagactttaggtgtgttgaaggtcgacgtgagaagaaacgcatttggaagacaagctcaatcttttacacaaaagtgtgatttttccaatttcatacctggctgtgataattttcctgctacatttattcgcgcacccgtgatcgagagaattcttgatcctatcgcagttaaaagtttatatgaattgccagtgaatggaaaggatgtggttgtagctgcaacgcaaaatcataatatccttgtgacttcttttcatccagagcttgctgacagtgatacaagatttcatgattggtttatcagacagtttgtttctaattaa

SEQ ID NO: 77986 - DNA, 894 bp, Saccharomyces pastorianus
atgactggagaagactttaagatcaagagtggtctcgcccaaatgttaaaaggtggcgttattatggatgttgttactccagagcaggcaaaaatagctgaaaaatctggtgcatgtgcggtaatggcattagaatccatcccagcagatatgcgtaagtcaggaaaggtttgccgcatgtcagatccgaagatgattaaggacatcatgaactccgtttccattcccgtcatggctaaggtaaggattggccattttgttgaagctcaaattattgaggcattggaagttgactatattgacgaaagtgaagtcttgactcctgctgattggactcaccacattgaaaaggacaaattcaaagttccatttgtttgtggcgctaaagacttaggtgaagctttgagaagaattaatgaaggcgccgctatgattcgtaccaagggtgaagctggaacgggcgatgtctctgaagccgtcaagcatataaggagaattacagaggagataaaggcgtgccaacaattgaagagcgaagatgacattgcaaaagttgctgaggaaatgagggtaccagtttctttgctgaaagatgttttagaaaaaggtaagttgccagtagtaaattttgctgcaggtggtgtagcaacgccagccgatgccgcattgttaatgcagttgggttgtgatggtgtgtttgttggctcaggaatttttaaatcatctaatcctgtaaggttggccactgcagtagtagaggctaccactcactttgacaatcccagcaaattgttggaagtatctagtgacttaggagagttaatgggtggtgtatcaatcgaatctattagtcatgcttccaatggagtaagactttccgaaattgggtggtga

SEQ ID NO: 77987 - DNA, 1104 bp, Saccharomyces pastorianus
atgcacataaatgtgagaggaactaggaaaataatttccaacgtttcatccttcacaccaagatatgaatttccaaagtacagtatgcctctcactgatttcaagggacaccaagtcaaagctcttaaaacatttgaaaagttgcttcctcaaatgaatatgataatagaactacgtgatatacgtgccccgttatctacaaggaatgtggttttcgatcgaatagcaagaaaggaacacgatgtgatgaaattagtggtatacactagaaaggatcttatgcccggcaataagccatatataggaaagttaaagaattggcatgaagagctgggggaaaagtttattttactggattgccgaaacaaaactgacgtcaggaatctactaaaaatactagaatggcaaaattacgaactagaaacaaatggcggatatctacctatgggataccgagcattgattactggcatgccaaatgttggaaaatctactttaataaatagcttgaggacaatttttcacaatcaagggaatatgggaagaaaatttaagaaagtagccaaaactggtgcagaagctggtgttactagagccacaagcgaggttattagagtaacttcacggaatacggaatcaagaaatgaaatatacttgatagatactccaggaatcggtgttcccggtcgcgtttcagatcataatagaatgctaggactggcgttgtgtggtagtgttaaaaataaccttgtagatccaatatttcaagcggattaccttttatacctaatgaacttgcaaaatttgaacgatggaagaacagagctttaccctggaagcaccaattctcccacaaatgatatatatgatgttttaagaaggcttcaagtgaataaaagccaaaatgaaaaatcaacggctatcgagtggactaacaaatggaggttgcatggaaagggtatcatatttgaccctgaggtactgttgaataatgacgagttttcttataaaaactatgtaaatgatcaattggaaaagttaggagatctttcgtatgagggattgtctaacaaactaaaagggaaccccaatcaagtattctag

SEQ ID NO: 77988 - DNA, 894 bp, Saccharomyces pastorianus
atgcctatcaaagaaactgataaagaagttgttttgactcatccagctgatgagaccaccagcgttcatattctaaagtacggtgctacagtttattcttggaaattgaaatctgaagaacagttgtggttgtctactgctgctaaattggatggtagcaaacctgtgagaggtggtatacctttggtctttcctgtattcgggaaaaatagtaccgatgaacatttgagtaaattacctcaacatggtcttgcaagaaattctacttgggagtttttgggtcaaactaaggaaaacccaccgaccgtacaatttggcttgaaaccagaaattgctaacccagaattgaccaaattgtggccaatggattatcttttgattttgactgttgaattaggctccgattatttgaaaactgccatagaagtagaaaacacatctagttccaaggaattaaagttcaactggttgttccatacatacttccgtatcgaagatattgaaggaacaatggtctctaatttagctggcatgaaactttatgaccaactgttgaaggaatcctacgtcgacaagcacccagtcgttaccttcaatcaagaaaccgatgtaatttatcagaatgtcagcgccgaacgggccattcaaatagttgacaagggcgttcaaattcacactctaaaaagatacaacttgcccgacactgttgtttggaatccatggattgagaagtctcaagggatggccgatttcgaaccaaaaactggttaccaacaaatgatatgtattgaacctggtcatgttcatgattttatttccttggctcctggtaaaaaatggaatgcttatcaattactttgcaaagaagaattgaaatatcaagctattcaataa

SEQ ID NO: 77989 - DNA, 1863 bp, Saccharomyces pastorianus
atgagagactctaatcatcgatcattaacgtcgaacaagcctatagtaacaataacatctactgtctatgaccgaagggcattggatatcaactctagtattccgttaataaactcactaaactacttaacatatctaacctctaattcatcaaaagttagggaaacggtagctaacgacggtgctctcgaaagattagtctcaatattgaggagttgtcatttaagtttgtttgagttgctggatttggatttagaaaattttaatgagcacgaaaacataaaggatctatggaaggagaaaagactagcactatgcgcttggaaatggactttaacatttcagtgcttagtattgacaggtactagagggacagaacaaattcgtaaaaaagtggtaatgtctggggtcttatctgtgctggtcacagtattggataactatttactatatcataaaaattacgacttcatcaaagatcaaacaatgacctttgacttcaaagggataaccacggagacaatgtataaattcatgagaaaagatgagaatgaaacatatcagcagtatatagagttcattacaggtcaggataaattgaagttgtcaactgacaaaaattttctaaacgaacgattagtggcaccgtctatgacaattccaactgattttagtgatatatggggccggtttgcagacctagctagcaattttgaacctgaccaggaaagacacgacgacgacattgatattgatagtgaagtagaaagtgaaaattttgatgcacataagaatttcttttcgcaaccagacattaatagacctacaatttccactccacgtgaattttttctcggaagaattgtccccaaacaagacgacgttatatggtcgcttcagttattagcttttgtttcgaagtatacatatatgaaatcaacccttcaaaatgttgagctggttgaatccctatcgttcagaagtatggcttacaaaattaaacagagaatctcagaagagaatgacttagaagaacaagaaagagacgtaactgtaaaattgtcttcattatatccttatttatcgaaaaatcctgaaaacaattccaaagttaaggcactagatactagcaaaatggatccatttttcaaagaattagaagaactctcaaacagatgtcaacaagaagaacaaaatgaaatatgtaataaccactgtcccgttcttaatttgtttgagcgctaccgtgtaccgaaacctagcgacgacaatgcctatggcaaagacaaggaaagaattaatttaaggaagaaaatatctgataactttgaaaggcgctggagctacgataaaatgaaaaaggaattaacaaatattgtttacaaaaacaaggtactaacaaatgttgtaaacatcttccccttagtcgaaaaatatacagtgagcgcagaaaatacacatgatgttatatattggagttctgtcatcatgagaaattcatgtcgaaaaaatgagatcttaggtgtgcgtcagtgtgccaatttttcgtgcggaaaatgggaagattttccaagacaatttgcaaaatgtcgtcgatgcaaaagaacgaaatattgctcacgaaagtgtcaattaaaagcatggggatatcataggtattggtgtcacgaagttggatcaagtcatatgagatccacgaatactaccacaggtgtcaataccccaaatgagcctagttctttaaatgccactgctactacagcagctgatgtttcgaattctaccagtacgttcactcctaatatatccaccaccgtacctgatgaaataagcaatagggatgaaaatagcatacctgagtaa

SEQ ID NO: 77990 - DNA, 2505 bp, Saccharomyces pastorianus
atgacgaatatggcggaggataaaacaagtataagcaaggtacattctgaattcagcaattcctcgaataccactggatttgaagaggagagtcggtcgcatcaagagagcttcgacggcgagtccagttccggtgaaagtaaaagtaaaagcaaactaaatcttgaatattctgcagatatcgagccattgaagttcagaatgacaaaaactaataatacaaatgacaaattaaaatatagtaacaatggcaacgccactgattcatttatgagactaaaggaacatttacagagaggcaatactttaaattcgaatcttagggtcaatgagttttaccctttcaattccattgatacagagcaatttgaaaactatttgagagagccaaaatacattaaaatgttgaaacgtcggaaaaacctgaaacaatttagaagattgtttctcgcgcaagaactaatggcctacgaaggtgaaacggttacctccacttccaaatcatctgaaccaacctctaaagctatatggagtacaaagtttagccgcgatggaaaatttatggccactggtagcaaagatggtaaaataagaatatggaaagttattggctctccagttgaaagagccgaattggactcgagtgcggaatcaaataaagaggcacgagccaagtcgatgcggatcaaacagcaggtcagttcattgaacaatccaaaagaaaaacaatttttggattctgctacagagaaatacgaagagaaggaaaaattattgaatttgtatgcgcctgtctttcacccaacgcctttgcgactgtataaagaacacgtgcaagatgttctggatataaattggtctaaaaataattttattttgtcagcatcgatggataagacagtaaaactatggcatcccgataggaaaaattcacttaagacattcatacatcctgattttgtcacttgtgtggaatttcaccccaccgacgatagatttttcattagcggctgtctggatcacaaatgcaggttatggtctatactggatgatgaagttagctttgagtacgattgtcaagacttaataacatctgttacattatcccctgaggagggaaaacacactataataggaacatttaatggatacgttcatattctgatgaccagaggtctcactccagtttcttcatttcacgtagctgatagacaaacacaagaacaaaacgctcacgtcatggtcacggaaactgactcaaaaattcgtcatggtccacgtgtgacgggtttgcaagcttttagatctcaactggacaattctttccgcttagtagttacatcgaatgattcgaggataagaatttttgacttagaacagaggaagcttctagaggtattgaaaggcttccatagcggatcttcccaacacaaggcgcaattgtccatctggcatggtcagccaatcgttgtaaatagtagtgatgaccattgggtttacggctggaggttaaagtcttcggatagagagaatgatcaagacgaacctaaaaggaaaccaaagggattggctcggtccggaagtttgagaagcatatttagtaaatcaatgagtaggtcttccagccagaataacgaagaaaaaccacatcatcatttaaaacttactaacttacttcccttgcctcatcatagcaacgatcattatatcaaaaatacggattacatttcttttcatgcacacaatgcccctgttacttgtgttagcattgcaccgccagaaacttcgaaaacattatctttgtctaacgatgttatctgcgagctatctctagagttttttcagacatccgatagtttcgatgttttgagtcggagtaacgacgatggcataatgtcagatgtagagtcgtctttgggctacaattctaaaccaggctcgatttctaatgcttccgccaccagtgctatcccagatgttgttgacgcaattggaacgatattgatcagtactgataacgtagggactattcgtgtgtttagagcagatatgccctctgttataagaaagcgcgtgttacttaaactagaagaatacaatagagaggttcggagaaggtttaacagttctgattctttgcattctttgagtcgaagcttcaactcgagagcgaaatcaaacttggctggccaaccggcagcggcgtatactaatactggaaaaggctatgcaacgggacgtggatactctaatatatgtcccaaaagcagtacctcactaaaaacactcggcagtaatgcacagccaagaacaccaagggaaagcatgtcatctattttctccaatgcacatgggcctaccactccaacgagcgcaatgaatttacctatccgttgcaatgtttgtagcggttcaaggtttgaggctttttctggtgctaatgaccaacaagatagaaactattattgcgtagactgcggtacagtagttaataacttccgctaa

SEQ ID NO: 77991 - DNA, 363 bp, Saccharomyces pastorianus
atggtccgcagaggctgcgctcttcttttagcaactctcacacgacttatgttgcttattcatttcttttacagcattatcagaattcttccgtctacggaattgagatcaaagaccgacctgttgtcggccgaaggacggacgcttatacccgcggatgtcaaagcgaagcccgcggggcgcaagtcgaggttaccggaattcgccaaacggcaaaggacccttgcattgcctgaaaggaaagattcgcttttctgtctgttgccacttttcttacatagtctgggccgggagcagcttatttcttccgcggatgatcctggatttccttgcgcgggctcagccatggggagccttacctag

SEQ ID NO: 77992 - DNA, 1710 bp, Saccharomyces pastorianus
atgtcatttcaaattgaaacggttcccaccaaaccatatgaagaccaaaagcctggtacctctggtttgcgtaagaagacaaaggtgtttaaagacgaacctaactacacagaaaatttcattcaatcgatcatggaagctattccagagggttctacaggtgccactcttgttgtcggtggtgatgggcgttactacaatgatgtcattcttcataagattgccgctatcggtgctgccaacggtattaaaaagttagttattggtcagcatggtcttctgtctacgccagccgcttctcacatcatgagaacctacgaggaaaaatgtactggtggtattatcttaaccgcctcacataatccaggtggtccagaaaatgacatgggtattaagtataacttatccaatgggggtcctgctcctgaatccgtcacaaatgctatttgggagatttccaaaaagcttaccagctataagattatcaaagacttcccagaactagacttgggtacgataggcaagaacaagaaatacggtccattactcgttgacattatcgatattacaaaagattatgtcaacttcttgaaggaaatcttcgatttcgacttaatcaagaaattcatcgataatcaacgttctactaagaattggaagttactgtttgacagtatgaacggtgtaactggaccatacggtaaggctattttcgttgatgaatttggtttaccggcggatgaggttttacaaaactggcatccttctccggattttggtggtatgcatccagatccaaacttaacttatgccagttcgttagtgaaaagagtagatcgtgaaaagattgagtttggtgctgcatccgatggtgatggtgatagaaatatgatttacggttacggcccatctttcgtttctccaggtgactccgtcgcaattattgccgaatatgcagctgaaatcccatatttcgccaagcaaggtatatatggtctggcccgttcattccctacctcaggagccatagaccgtgttgccaaggcccatggtctaaactgttatgaggtcccaactggctggaaatttttctgtgctttgttcgacgctaaaaaattatctatctgtggtgaagaatcgtttggtactggttccaaccacgtaagggaaaaggacggtgtttgggccattatggcgtggttgaacatcttggccatttacaacaagcatcatccggagaacgaagcttctattaagacgatacagaatgaattctgggcaaagtacggccgtactttcttcactcgttatgattttgaaaaagttgaaacagaaaaagctaacaagattgtcgatcaattgagagcatatgttaccaaatcgggtgttgttaattccgccttcccagccgatgagtctcttaaggtcaccgattgtggtgatttttcatacacagatttggacggttctgtttctgaccatcaaggtttatatgtcaagctttccaatggtgcaagattcgttctaagattgtcaggtacaggttcttcaggtgctaccattagattgtacattgaaaaatactgcgatgataaatcacaataccaacagacagctgaagaatacttgaagccaattattaactcggtcatcaagttcttgaactttaaacaagttttaggaactgaagaaccaacggttcgtacttaa

SEQ ID NO: 77993 - DNA, 195 bp, Saccharomyces pastorianus
atgattttagtacatacagggaacgtcctctacccacgttttattgttgttgcatttacttttgaacagcgacaggggggaaggtgtaaaggaggaaaagcaacctgcatggctagtgttcaaagttacaaggtaacaatgcaaatcagtagtatgacaattatttacccgctatttatttttttttctctttaa

SEQ ID NO: 77994 - DNA, 1890 bp, Saccharomyces pastorianus
atgtcaagtgagtcaacaactttcatcgtggatgtttcaccatcaatgatgaaaaataataatgtttccaaatctatggcatatctagagtacactctattaaacaaatctaaaaaaagtagaaaaacagattggataagctgttatctcgctaattgtcccgtatctgagaattcccaggaaataccaaatgtgttccaaatacaatcctttttggctcctgttaccacgacggccaccattgggtttataaaacgcctgaaacaatattgtgatcagcacagtcatgatagttcgaatgaaggcttacaatcaatgattcaatgtctgttggtcgtctcattagatattaaacaacaatttcaagcaagaaaaattctaaaacaaattgttgtatttacagacaatttagatgatctggatattactgatgaagaaatagacctgctaacggaagaattaagcacaagaatcattttgattgattgcggtaaagacactcaagaggagaggaaaaaatcgaactggttaaagttggtcgaagcgataccgaattcaagaatctacaatatgaatgaacttcttgttgaaatcacttccccagcaacatctgtcgttaagccagtaagagtattctcaggcgagcttaggttaggggcagatatattatcaacacaaacatcgaatcctagcggcagcatgcaagatgaaaattgcttatgtatcaaggtagaggcttttcctgctacgaaagcagtttcaggcttaaataggaaaaccgctgttgaggtggaagactcccagaagaaagaaaggtatgtgggggtcaaatccataatcgaatatgaaattcacaacgaaggaaataagaaaaatgtcagtgaagatgaccagtctggatcgtcatacattcccgtgaccatctccaaagactctgtaacgaaggcataccgttatggtgcagactacgtagtgctaccgtccgttctagtcgatcaaactgtatatgaatcttttccaggcttggatttaagaggatttttgaatagagaagctcttccaaggtactttttgacgtcggaatcctccttcattaccgccgacacaagacttggctgtcaatctgacttaatggctttcagtgctctagtggatgttatgctagaaaatagaaaaattgctgttgcaagatatgtgagcaagaaagacagtgaagtgaatatgtgtgcattgtgtcccgttctaattgagcacagtaacattaattccgagaagaagtttgttaagagccttaccttgtgtagattaccattcgcggaagacgagagggtaactgattttccaaaacttctggatcgaacaactacatccggggtaccgctgaaaaaggaaacagacgggcatcaaatcgatgagcttatggaacaatttgtagattcaatggatacagatgagctaccagagattccgttaggcaactactatcaacccataggcgaagtaacaacagacaccactctcccacttccctctttaaataaagaccaagaggaaaacaaaaaggatcctcttagaatacccacggtttttgtctacaggcaacaacaggtgctactggaatggattcaccaactgatgatcaatgattccagggaatttgaaatcccagagcttcctgactcattgaaaaacaaaataagtccttacacgcacaagaaatttgatagcacaaaattggttgaagtgctcggcatcaagaaagtagacaaattaaaactcgactccgaactaaaaactgagcttgagagggaaaagatcccggacctagaaacgctattgaagcgcggtgaacaacacagtaggggaagtccaaacaatagcaataattaa

SEQ ID NO: 77995 - DNA, 348 bp, Saccharomyces pastorianus
atgggtagtttttgggacgcattcgcagtatacgacaagaaaaagcacgcagatccaagtgtatatggaggaaaccataacaacacaggagacagtaaaacgcaggttatgttttcgaaagagtaccgtcaacctaggacacatcagcaagagaacttgcagagcatgagaagatcttccataggatcacaggacagttccgatgttgaggacgttaaggaagggagattacccgcagaagtagaaataccaaagaatgttgacatctctaacatgtcgcaaggtgagtttttaagactttacgaaagtttgaggaggggggaacccgacaataaagtaaatagataa

SEQ ID NO: 77996 - DNA, 2064 bp, Saccharomyces pastorianus
atgatcagacaatctacgctaaaaaacttcgctattaagcgttgctttcaacatatagcataccgcaacacacctgccatgagatcagtagctctcgcgcagcgcttttatagttcgtcttcccgttattacagtgcgtctccattaccagcctctaaaaggccagagcctgctccaagtttcaatgttgatccattagaacagccggctgaaccttcaaaattggctaagaaactacgcgctgagcctgacatggatacctctttcgtcggtttaactggtggtcaaatatttaacgaaatgatgtccagacaaaacgttgatactgtatttggttatccaggtggtgctatcctacctgtttacgatgccattcataacagtgataaattcaacttcgttcttccaaaacacgaacaaggtgccggtcacatggcagaaggctacgccagagcttctggtaaaccaggtgttgtcttggttacttctgggccaggtgccaccaatgtcgttactccaatggcagatgcctttgcagacgggattccaatggttgtctttacagggcaagtcccaactagtgctatcggtactgatgctttccaagaggctgacgtcgttggtatttctagatcttgtacgaaatggaatgtcatggtcaagtccgtggaagaattgccattgcgtattaacgaggcttttgaaattgccacgagcggtagaccgggaccagtcttggtcgatttaccaaaggatgttacagcagctatcttaagaaatccaattccaacaaaaacaactcttccatcaaacgcactaaaccaattaaccagtcgcgcacaagatgaatttgtcatgcaaagtatcaataaagcagcagatttgatcaacttggcaaagaaacctgtcttatacgtcggtgctggtattttaaaccatgcagatggtccaagattactaaaagaattaagtgaccgtgctcaaatacctgtcaccactactttacaaggtttaggttcattcgaccaagaagatccaaaatcattagatatgtttggtatgcacggttgtgctactgccaacctggcagtgcaaaatgccgacttgataattgcagttggtgctagattcgacgaccgtgtcactggtaatatttctaaattcgctccagaagctcgtcgtgcagctgccgagggtagaggtggtattattcatttcgaggttagtccaaaaaacataaacaaggttgttcaaactcaaatagcagtggaaggtgatgctacgaccaatctgggcaaaatgatgtcaaagattttcccagttaaggagaggtctgaatggtttgctcaaataaataaatggaagaaggaatacccatacgcttatatggaggagactccaggatctaaaattaaaccacagacggttataaagaaactatccaaggttgccaacgacacaggaagacatgtcattgttacaacgggtgtggggcaacatcaaatgtgggctgctcaacactggacatggagaaacccacatactttcatcacatcaggtggtttaggtacgatgggttacggtctccctgccgccatcggtgctcaagttgcaaagccagaatctttagttattgacattgatggtgacgcatcctttaacatgactctaacggaattgagttctgccgttcaagctggtactccagtgaagattttgattttgaacaatgaagaacaaggtatggtcactcaatggcaatccctgttctacgaacatcgttattcccacacacatcaattgaaccctgatttcataaaactagcggaggctatgggtttaaaaggtttaagagtcaagaagcaagaggaattggacgctaagttgaaagaattcgtttctaccaagggcccagttttgcttgaagtggaagttgataaaaaagttcctgttttgccaatggtggcaggtggtagcggtctagacgagttcataaattttgacccagaagttgaaagacaacagactgaattacgtcataagcgtacaggcggtaagcactga

SEQ ID NO: 77997 - DNA, 1599 bp, Saccharomyces pastorianus
atgtcaaacgacggctcaaaaatattgaattataccccagtgtctaaaatagatgaaatagttgaaatctcaagaaatttcttctttgagaaacaattgaaattgtcccacgaaaataacccaaggaagaaagatctagaattcaggcagttgcagttgaaaaaactctattatgccgtcaaagatcatgaggaagaactgatcgatgctatgtacaaggactttcatcggaacaaaattgaatcggttctgaatgaaacgaccaaacttatgaacgatatacttcacctaattgagattttaccaaaattgatcaaacctcggagagtatctgattcttctcctccatttatgtttggtaaaacaatcgtggagaaaatatcaaggggcagtgtcttgattattgctcctttcaattttcccttacttttagcatttgccccattggcagcagctcttgccgcaggtaacaccattgttctgaagccaagtgaactaacaccacacactgctgtagttatggaaaatttgttaaccacagctggttttcctgatggattgattcaagtagttcagggagctatagatgaaactacaagactactagattgtggaaaatttgacctaatattctacacaggttctccccgtgtcggatcaatagttgctgagaaagcagcaaaaagtctaacaccttgtgtacttgaacttggtggtaaatcacctaccttcattacagaaaatttcaaagcaagcaacataaaaattgctttgaaaaggattttttttggtgctttcggaaattctggccagatttgtgtttcaccagattatttgttagtacataaatctatctatccaaaggtcattaaagagtgtgaatcggtactaaatgaattttatccaagctttgatgaacaaacagatttcactcgtatgattcatgagcctgcttacaaaaaggccgttgcaagtataaactcaactaacggctccaagattgtgccttcaaaaatttctattaattcagatactgaggatctatgccttgtaccaccaaccatagtttataacattggttgggatgatcctttgatgaaacaggaaaactttgctcctgtattacccatcattgagtacgaggatcttgatgagaccattaacaagataatagaagaacatgacactccattggtgcaatacatattctctgatagccaaactgaaataaatcgtatcttgacgcgcttaagatctggtgactgtgttgtcggtgatacagtgattcatgtaggaattaccgacgctccatttggagggatcggtacttcaggttatggtaactatggtggatattatggattcaatacctttagtcatgaaagaacaattttcaaacaaccatattggaatgattttaccctttttatgagataccctccaaatagcgcacaaaaggaaaagctcgtccgttttgcgatggaaagaaaaccttggtttgacagaaatggcaataacaagtgggggttacgccaatatttttcattatctgccgccgttattttaattagtaccatttacgctcattgttcttcctga

SEQ ID NO: 77998 - DNA, 1389 bp, Saccharomyces pastorianus
atgcccgctcgagaatataactatgtagaaggttttggtgggtacggctcgttggacgatgatgattcagatagagattctgaacgcaggaatcacgatctagggcagcgaactataaccacaagtccaacaggagtatcaagacatgctgcattaaataggtacatgatcccaggccgtatcaatcctcttttcagaccgacagacgctgctcaacctcccatagtgtctacatccacatcagcatcggcaacagaaccgaccaacagaataggccctggaaggataaaagaaacccctgaaacaaatttcaatgcatttcttatagcacaactaaccagaatggaggaacaaaatgccaatctgaaggaagaaatcagcctaatgaaaaaggaacaagaactcttctttctagagaatcaaaagaagttggagaaaggatttaaagacatcaataaatatgttgaagatgtttccgcaatgaaagaagtcttcaaagaggtagttggtattatgactggggagagaataagatttatagaccatactggggaaaatgttactcctcaggaagctgctcgtgttggaaatccatcaacaagtacgcaagctcatcaaagtcagtcaagatcaacaaactggcaagaatatagtatgcacgcaagcatattagccggcgatcctcgtatcaagcctgagccagggctgtcagactttgaaaatggggaatacgatggtaatgaaagtgatgagaacgctaccaccaggaacctacctttaaataaccccgattctgttagcaatgccgatgacagtaataaccaactcgatggaacaggaaacgagaatgatatcagaaacagaagagggtgcgttggaacgtcatataaactaaatcgtgcaatccagaacgttacagatgcggcccgtgaatactttgaaggcttaccgggccaaccatcagttctttcccttgagaggagatatgggtccacttggaggcgatctgccaaagaaaggactttgttcactaaaagaatgacaatcataaaaagaataatagatataaaagatgatccaaacaaatatggtttgtcgctacctgagaataaaataagtagaaaccaagccatcaaggttgtcgaaaatataagattgggaaacaataccttcaaaggacatcattgccgattatcaatgtcccagttatacgaatacttctccaaaaaaatggacaaactcgaagactattcacttactctaaagagaagagggaagccaagaagaattttcttgttagaagagagagaagctagattatcattacagcagccacatagtataccaaattccagtacaggcacaccagaacatgatcaagacacttag

SEQ ID NO: 77999 - DNA, 396 bp, Saccharomyces pastorianus
atgcaggttctcaatacgaaaagtgaaacgaaacaagaaaacgaaacaatgcagccaccatatatacaagaacgtcttaagtcattaaatgatatagagacccagttatgctccatgttgcaggaggcgtctcaagtcacgttcatatttggtgaactaaaacgaggtaatgaatcagtgaaaccccaattcgaaaatcatgtcaaacagttttacgaacgactagataaatcaaccacacagctacgtaaggagatacagttgttggatgagaacgttggaacacgactactgcccatcaatgtcaacaagaaggccctaggtcaagacacagaaaaaatggaagaacaattggatttattgtcggctatattagatccttcgaaatccaagtaa

SEQ ID NO: 78000 - DNA, 1284 bp, Saccharomyces pastorianus
atggccattgaattgggactttcccgtattacaaaactactagagcatttaggcaatccgcaaaactcacttagagtgctgcacattgcagggacaaatggtaaaggttcagtatgtacttacctatcttctgtgttgcaacaaaagtcctaccaaattggaaaatttaccactccacacttggtgcatgttactgattccattacaatcaacaataagccgattccgttagagagataccagaatattagattacaactagaagctttaaacaagtcacactctttaaaatgtacggaattcgaactattaacatgtaccgcattcaaatatttttatgatgtgcagtgccaatggtgtgtcatagaagtaggccttggcggaagacttgatgcgaccaatgttattccaggcgcaaataaggcatgttgtggtattactaaaatcagtttggatcatgaaagctttttaggtaacaccttgtctgaaatctctaaagagaaagcaggtataataacagaaggggtacccttcacagtgattgatggaaccaatgaggcaagtgttacaaatgttgtgaaagaaagatgcaaggctttagggtctgaactatccgttacagattctcaacttaacggcaatatgattgacaccaactcctggggttgttttgacttggcaaaattgccactgaatggagaatatcagatatttaatctcagggtggccatgggtatgttagactacttacaaatgaacgaacttattgatattaccaagaatgaagtaagtacgagattggcgaaggttgattggccaggaaggttatatcgtatggattatcgctttgacaaagtaagtaataggacagtgcctatattaatggacggtgcccacaatggctcagctgcagtagagttagttaagtacctaagaaaggagtacggaaaccagcctttgacctttgtgatggcagtaacgcatgggaaaaacttggagccgctgctccagccattattgaggcctatagatcaagtaattcttactcggtttaataatgtggaaggtatgccctggattcatgccactgatcctgaagaaataaaagatttcattttgactcaaggatacacaaaggagatagtgattgaaaatgatttacatcaggtattgccttctctggcgcatgtatcagacgagcaaagacggccaattgttgtatgcggttcactgtatttatgtggtgaattattacggattcacaatagtcacttgagaaactaa

SEQ ID NO: 78001 - DNA, 1107 bp, Saccharomyces pastorianus
atgtgtggtaggtttgccttagcttacgatagcggagatttgccgcaacttctaagagattggaacttaccggttaatacaccgaaggacgcctcatcgaacagccagcatccacatgacgaggaagacaccaaagatcagcctaccgttagtaaggatatcttcaaggcctcttacaatatttcccctacaaactactccgcggtatatcgtcctgatactaaagcaatacaatttatgagatggggccttgtaccattctggaccaaggacgtttcacaattcaagacctatcgtacctttaatgcccgtttagagaatttacaagagagcaaaatgtggatgagaccctgtgagaagaaaaggtgtgctgtgcttatgagcggatattttgaatggaaaaccgtagggaaaaagaagacgccttatttcatttctagacgagacggcagattgatgtttgtagcaggaatgtatgattacgtcgaaaaggaagatttatatacgttcaccataataactgcacaaggccccagagagttagaatggctccacgaaagaatgccttgcgtgctggaaccaggcaccgaaagttgggatgcatggatggatgtggataaaacgacatggagcactgaagaactggtaaagctgctgaagccggactacgatgaatcaaagttacaattctatcaagttaccgatgatgtagggaagactaccaacactggagagcggctgataaaaccgcttttgaaagaggattcggacatgttcagcgtaaagagagaaaaagaagaagccttgctcgaaaatgataacgaacaaggtattgagaatcgtggtgtaaagggtgacaaatcgttgaaaggcgaagatgttttcaatcaaaagaaaagcctcaaaagtaatacctatgatggattaaagaagaatgaagaacaagaggaaacaactttaccagaggaaggaagtataggtgaccgagtgaagagagaagaagctaatttgtcacccaaaagagagggaaacagagagaagagaaatatagtaaatatgttgggaaaccagaaagactccagaggcaagaaaaaaataaaaaaatga

SEQ ID NO: 78002 - DNA, 642 bp, Saccharomyces pastorianus
atgtcacaaaaggataacctactcgacaatccggttgaatttttaaaagaggtcagagaaagttttgatattcagcaagatgttgatgccatgaaaagaatccgacacgatcttgatgttataaaagaggaaagcgaagcaagaattagtaaagagcattcaaaggtttctgagtcgaataagaaattgaatgcggaaagaataaatgttgctaaattggagggagacttagaatatactaacgaagagagcaatgagtttggtagtaaagacgaactagttaaacttctgaaagatttggacggattggaacgtaatattgtgtcacttcgaagtgaattggacgaaaagatgaaattgtacctcaaagatagtgaaataatatccacaccgaacggttccaaaataaaagcaaaagtaattgaacctgagctggaagaacaaagtgcggtcaccccggaagcaaacgaaaatattctaaaattgaagctatacagatctttaggagttattttggatttagaaaatgatcaagtccttattaacagaaaaaatgatgggaatattgatattttacccttggacaataacctcagcgatttctataagaccaaatacatctgggaaagattaggaaagtga

SEQ ID NO: 78003 - DNA, 591 bp, Saccharomyces pastorianus
atgaaagcaaccattcaaagagtaacatctctatttggagttccccgagcatctgtattcgtgccaagaatcagcacaccatttattttgcataattatatctctaatggcagaatggtccttttttccaaagaattccacaatggccgcgtatccaaatctgatctttggtcaagcaacaaggaagaggagctcttagtatctcaaaggaaaaaaagaccgatctctcctcatttaactgtttacgaacctgaaatgagctggtatctttcctctttacatcgtatatctggcgttttactggctcttggattctatgctttcacaattactttgggtgtgacgacaataatgggaatggatacgacttttcaggatctaaacaagtggtatcacgaaaagatgcctaagtggtcccaatgggtggccaaaggctctgcagcatatctgtttgcattccattttggtaacggtataaggcatctcatctgggatatgggctacgaattgaccaaccgtggggttataaaaaccggatcaatcgttttagccggcacactcgtcttaggaacgtatttactggctcagtaa

SEQ ID NO: 78004 - DNA, 1875 bp, Saccharomyces pastorianus
atgaactcttccacttcttcagaaaatgtcttcataaattcatttagctatttgaatcaaacatcacaagccgtaatctcaggtaactccactttcgcaaatgttatcaactttccttatagacttggattatcctttattggggctgtgaacttgcagtacgagcaaaccgttaaatctgaagaaattcccccaactctaaggtctgtttttgatacaatagggttttttttcagcccgtacgccatattttgctttgtaatcgccattgtcctgaaccggttcgttgtattttacgccgtccttaacaacggttccagacgtactttaccgttatggttgagtaatgttttccatatatcagcagtagttgtattagcaatggtatccttaggtccgctgaccttgggtaaggatttcaaaatattaggcgaccctgcttttgcccaagaaaaatttttactgaatatattctacgctttcgcttactcttattgtgtcgaaaccatatttaccatcatgcggaattccagccctttggagggcactgactattcattgtttgaactttcgattcagttttatacaatgactaataataatactaaacttctagattctcctgattacattatagactgttctatggctattttgagcaggatattgatccatttggtggagattttcaggcttagaaattatcgtctactttttagtactattatgaacctctgtcatatttgttacttagggataagagttaagcagggcggctggaaaagccttccattttcggtgaaatttaggcacttcccaaaactgttttcagtctctattatttgcttatcattactgatttttaaattatcatgcttaattagatgggatccatttggaaaatcacgtaattcttgcgaacttttacagttttaccctctcagtagaaattggaaaaaatacttaaattacacgggagaagaagatttttctgctatggccactaaattcgcactattattatgctcaggaactgaactaatggaaaggggtatacgaagagaatttcccgctattaacatcccggataatgttaatgagaaattttttattagcggttatttaaatgaactttctaaaccgtataaagagaacacttccatcagcttcccaaagaaaaattcatcaatattaaagcaaagattttttttaatgtttccaaaatctataatatggatcatgaagaagctcgtaggccaagtattctttggcttcagagataacaaggacgaggacatccccgacaacgacccaccaaaaatgttaaagataactaaaacgaactctctcaataatagtgccggccacaaagaagatattgaacttgaactattgaacacatcagatgatgagtattctgaagattacgagccttctgaagttgagtcactgggggattctgatgaagaaaacttggaagaagattcactgattttcaacgaaacccgggatgccctactggatttattttcttccgaagataatgaagttcatactgattataattggatcatgtcaactagccgtatccttcaacaaaaattactgtcagataaaactttgacaagggcatctatcttagatacagagttaagtgaagtagatgagacttttggtacagaaagtgattttgatctatcttgcgccgtatgcaaagtcaatgaaagaaatacagtattatggccctgccgatgttttgccatttgcgaggattgcagaatttctttgggtttacgtgggttcagcacttgcgtatgttgtaggagtaaagttcatgggtactgtaaggttcatcctgtttcagatagtaaataa

SEQ ID NO: 78005 - DNA, 375 bp, Saccharomyces pastorianus
atgagacttttggtacagaaagtgattttgatctatcttgcgccgtatgcaaagtcaatgaaagaaatacagtattatggccctgccgatgttttgccatttgcgaggattgcagaatttctttgggtttacgtgggttcagcacttgcgtatgttgtaggagtaaagttcatgggtactgtaaggttcatcctgtttcagatagtaaataatagtttaagaacttttgcatggtatctaaaagaggtttttcgtttgggagctctagcattaattactatagctagagctttctgtgttggacatataaacatcataataataaatcaagttttttttctttgggaaatgttcgaattaaaattgtacttataa

SEQ ID NO: 78006 - DNA, 1779 bp, Saccharomyces pastorianus
atggccaattacacaaaaaccgcaatcctatccgtctatgacaagacaggtctacttgatttagccagaggcctcatcgagaagaacgttcgtattctcgcctccggtggtactgctcgtatgattcgtgacgctggttttccaatcgaagacgtttctgctatcacacatgccccagaaatgttgggaggtagagtgaaaactttacatcctgccgttcatggtggtatccttgctagggacatcgatagcgatgagaaagacttgaaggaacagcacattgaaaaagtcgattatgtcgtttgtaacctatacccattcaaagaaactgttgctaaggtgggtgtgactattccagaagccgtagaagaaattgatattggtggtgttactctattaagagcagctgctaagaaccatgctagagtcactattttatctgatccaaaggactactccgaatttttaagtgaattatccagtaatggtgaaatctctcaagatttgagaaatagattggcattaaaggctttcgaacacactgccgattatgatgctgcaatttcagatttcttcaggaaacaatactctgaaggtcaagctcaaattactctacgttatggtgccaatccacaccaaaagccggctcaagcttacgtcagtcaacaagacagtttacctttcaaagtcctatgtggttcaccaggttacattaatttgttggatgccctaaattcctggcccctggttaaggaattatccgcctcgttgaatttaccagcagcagcatcgttcaagcatgtatcaccagctggtgccgctgtgggtatcccattgtctgatgttgaaaagcaagtttattttgttgccgacattgaaaacttatctcccttggcatgtgcctatgctagggcccgtggtgctgatagaatgtcttcctttggtgattggattgctctttccaacatagttgatgttccaacagctaagatcatatctagagaagtttctgatggtgttattgccccaggttatgagcctgaggcgttggccattctatccaagaagaagggaggtaagtactgcatattacaaattgatccaaactatgttccagaagctgtcgaaagaagacaagtatacggtgtgactttggaacaaaagagaaacgatgccataatcaatcaatcgactttcaaagaaattgtttctcaaaataaaaatctcactgaacaagccataattgatttaacggttgccaccattgctattaaatatactcaatctaattccgtatgttatgctagaaatggtatggttgtcggattgggtgcaggtcaacaatctagaatccattgtacaagattagctggtgataaggctgataactggtggttcagacaacaccctagagttttggagattaaatgggctaaaggcgtcaagagaccagaaaaatctaatgctatcgatttattcgtaaccggccaaattccaacagaagaaccagaattgtctgaataccaatcgaagttcgaggagattccaaaaccatttactccagaagagagaaaggaatggttgagtaaattaaccaacgtttctttgtcatcggatgcatttttcccattcccagacaatgtctacagagcagttaaatccggtgtcaaatacattgccgctccatctggttctgtcatggacaaggttgtattttcagctgccgattcattcgatttggtttacgtagagaacccaatccgtttgttccaccattag

SEQ ID NO: 78007 - DNA, 615 bp, Saccharomyces pastorianus
atgggagcctacaaatatttagaagaattagaaagaaagaagcaatctgatgttttgagattcttgcaaagagtcagggtctgggaatacagacaaaaaaatgtcattcacagagccgctagaccaactagaccagacaaggctaggagactaggctacaaagccaagcaaggtttcgttatttaccgtgtcagggttagacgcggtaacagaaagagacctgttccaaagggtgctacttacggtaagccaactaaccaaggtgtcaatgaattgaaataccaaagatccttgagagctaccgctgaagaaagagttggccgtcgtgctgctaacttgagagtcttgaactcctactgggtcaaccaagactctacttacaagtacttcgaagttatattggttgatcctcaacacaaggctatcagaagagatgctcggtacaactggatctgcaatcccgtccataagcatcgtgaagctagaggcttgactgccacaggtaagaaatccaggggtatcaacaagggacacaaattcaacaacaccaaggccggcagaagaaagacctggaaaagacaaaatactctgtcgttatggaggtatagaaaatga

SEQ ID NO: 78008 - DNA, 375 bp, Saccharomyces pastorianus
atgctatgtcagttcggaggcgtgtttcgcaatcttcgcgttccagaacgcaccaacgcgttgttatttgcgcagcacaagggggacgagagacattctggccaacgtgtattcgacggaagtaaatttcggctggaggctaagcgctgctttactgcaatttgcatcattacggtggctcgcagggatagattgggcgtactggtttgtggcaaaaacaccgcctccacgctaccttatttgccagccaaccgcatattcaggttgccaaaggtacagatcaggaaaatgtttcctattggatgcgcaactttccttagtagggaatatataatcactgcattgctggtttcgtactgccatctttgcgtttaa

SEQ ID NO: 78009 - DNA, 255 bp, Saccharomyces pastorianus
atggccagcagtacttccacttccgcttccgcttcctcctccatcaaaactaacagtgccttagtttccaacaatgtcgttgccgcctcttccgtctctgctacttctactgctagttccagtgccgctaagaacactacttccagttcaaagaacgctgctccaggcatggttgcaaaccctgtttcctcgaagtacggtatcatcatggccgcatttgctgctgtttctttcgtcctaggcaccggtatttaa

SEQ ID NO: 78010 - DNA, 369 bp, Saccharomyces pastorianus
atggccaatttttttgttagactgtgggaaagtgtatttgaaccagggacctccccccagctgatcatcgccacacacgtatcttttgttgcactactactgaccctcatctggctcatctatgccacaaacgggaatatccacttctatgctcttttctgtatatcacttttactatggattacggttatctggtttataaacgaattatcacacgtcaaattgaaggataatgatgagctggataaagatgccaataaaaaggacgacagtgccatcaaggaagacagcgaagacaagcaagaaagcgggaaatccactagtactgccagacggactcaagcacaatctaggtcaagaaaagcatag

SEQ ID NO: 78011 - DNA, 1029 bp, Saccharomyces pastorianus
atgtccggattcgcaaaactcaagtcgtggttatacaaagcttcccttttcgtttctttgatacttttgattgggttttcagttgttttacccatagattccattgcacaagcttctaaatcagaaaacaatgcctttaatacgttcattgttgtaggcgctttagttgtctttggcgttttttgtatctttattattattggaagaatgctatttcataagagttgtttaaaagatataccaagaagatatattccgatcacacctgctgatctcccgcatcgttctagtagggaagcagtactgcagaacatggaaagatctaaagaattaacaattcttctcaaaaaacctaaagaccctgttattcacgacggacttgagcccccgaggagatgtgactacccattagatgaaaagttatttccagaatacctaaactatgctgattgtataaaaagtttaacagatagactgaaataccatggattgtttctgaacaatttagatgttagaatgaatctagaagatacgtttgccgacgtggtgaactcacaatttgttaatcacaacgccaataaaattcagttagaaaaggcgaaggagtttatcgatttatatgaaacaattagattttcagggaaggacgttactagagaccagttcataaagtttgttaagttttgtctctatttcggtgaagtgtcattaacaagagacacttcatttgcaaatttacataattttagattaaatggcagttcaaataacattggaagaactgaatcaaaatattcaataaacccatttgatgaaaacgaatacgcgcaggatgatatgcattactttcccgaaccgcctacacatttggttagagaaagtagcataagtactgtcgcaaggcatgtttcatcaggtgtagatctgactaattctgaagaacatcctttggatacggattctgattgtaacgcccttcgtctcaaactttccaaagcggatagttatagaagtgtaattcgtcattag

SEQ ID NO: 78012 - DNA, 1017 bp, Saccharomyces pastorianus
atggcaagatctttaggtcaatcactcacagcgactacccagaagctaaaaggaaagaagaatggtggaaaaggcaagaataagccctcagcaaaaattaaaaaaactcaaaaagagatgctgtatggaatactgaacgaaaggaacataagacagattcagtttggactgaataaaaaattctctacttggtatgggagcgccgtttatttcgatcctgaaacaaaaaggctagggtgctccgagaccaagggtcagctttcctctgtttctaacagccaatactggctagacactcttttcgtttgtgaatactgcttcaaatacacggatgatcagacgcggtttgtaggacatgttgcaagttgtccatttcaatatcgtgttccaggcaaaataaaatacaagagtcctgaatatacaataagaagagtaaaaggatccaagtatcaactcttttgccaatgtctttgtcttttcactaagctatatctggacaataaatccatgtatttcaaagtagatcattatgaattttacatagtttatgaaactggatcaacaaagccgatgggattcttttcgaaagatttagtgtcatatcagcaaaataatctagcgtgcatcttgatatttcccccatatcaacgacgcggattaggccttttacttatcgagttttcatacaaactatcccaattagaaggtgtaatatcagggccagaagtaccgttatcaccttttggactaatcgggtacttgaaatattggtcacagatactctgttggcaccttattgaaggtgacctcgcccattatgataaagtgaccctggaggatctttccatcgtgactggaatgagagtcaatgatgttattttgaccttgaagcacttgaactgtattggggagaataaccaaatttacttgcagtcattgaatagctggttgaaactacatggaagaaaacggaattggttcaaattaaaagatgaatatttgctgatagatgactag

SEQ ID NO: 78013 - DNA, 3804 bp, Saccharomyces pastorianus
atgggtacttacagaaaaaggtttaatgaaaaagccagatccggccatatggccaaattaaaagaactgaaaagaattaggaataagcagttcactagacaggatgaaaacgatgaaagagtagaaaacccagattcagctcccgctgagagttctactacggagccaaatgccaatgcgcaaatttttgaacctctcactgaagaagaaaagaaaatgaagaaaagaaaactacaggagttatttaccccaaaggaatcgaaagtttcgagattgaagaagaaaagactggataaatttattgaacatcaattaaaaagagaggaaagaaagacaattattggtaaacttcaagattataagatagatacaagtttgttgacaagctctaaaaggttaggagagggcaggcagactaaaaaggaagaattcaaagaagcactgagtttagaacgtcagggaagaggaaatgaacaaacaaaggaaatattatacgaagaatatgaacccaaagtttgggatgaggatggtgaaggagagagctctgaggatgatgacggcgaagatgatttcgaggcttcatttggtagtatgccgaaaccaacggacaatgaggagaagaaaacatcaggttttattgatcatagaccagcaaaatttggtggatctggtcttagctttgggtttagcaatataaaagtcataaacaaagaaagcaaaactccgaagaagaaatataattggagacaacgagtagaaatggaagaattgaagaagcatgggaaagaagatgaaatggatttcgacacgacatctgaagatgatgacgaagaggaggatcaggaagaagaagacaaaatgcatcctagtgaaaacccactcgaagaagttgaaagcgcagatagtgaaactggctcagaaaaatttgaccaaaatgatgttgctaacgaattcaaggattgggccaatcaagaaataaaaaaattggaaggtagagatcaagagctagttactcccactttgaacatcgattataaaccgataattagaaaggaagatttagatgatggtctccaagaagcttatgttccaataaacgagaattccacccgtaaagccttctatgttgaagttagcagatcagatgaaattcagaaagcaagaattcaactaccagtatttggtgaagaacacaaaattatggaggctattcaccataatgatgtagtgattatttgtggtgaaacggggtcaggtaagactacacaagtcccacaatttttatatgaggctgggtttggtgccgaagattctccagattacccaggaatggtgggtatcactcaaccaagaagagtggccgctgtgtccatggctgaacgtgtagctaatgaattgggggaccatggtcataaagtaggataccaaattaggtttgactctaccgcaaaggaggacacaaaggtcaagtttatgacagatggtgtcttgctacgagaaatgatgcacgatttcaagttgactaaatattcctccattatcatagatgaagcacatgaaagaaacattaacactgatattttgatcggtatgcttagccgttgtgttcggttaagagctaaactacataaggagaacccgatcgagcacaagaagctaaaactcatcatcatgtcagctacattaagggtatcagatttcagcgaaaacaaaacattgttcccaatagcgccccctgtcttacaggttgatgcaaggcagtttccagtctctattcactttaatcgtagaactgcattcaattatacagacgaggctttcagaaagacttgcaaaattcatcagaaacttcctcctggcgctatattggtgtttttaaccggtcagcaggaaattacacacatggtaaaaaggctaagaaaggaatttccttttaagaaaaactccaagtacaacaaagatttagaaacacccgtttctaaaatgggtatcaattcaaaaacaacagatttggaggctgaggatatagacttcagtgtacaagttatcgatcaagataagttcaagagcgcgataagatacgaagaagatgaaggtaacagtggaaacggtgaagatgaggaagacgaagaggaagaagggtttgaagaagtcctaactgaagggcaaacagctaacgatcctttatatgtccttccactgtattctctattaccaaccaaggaacaaatgagagtctttcaaaaacctcctcaaggttctaggctttgtattgttgcaacaaatgttgcagaaacatcgttaactatacctggagttagatatgttgttgattccgggaggtctaaagagtgtaaatataatgaatcaaatggcgtacagagttttgaagtgggctgggtaagtaaagctagtgccaatcaaagaagcggtagagcaggtcgtactggaccaggccattgttaccgtttatattcgtctgctgtttttgaacatgatttcgaacagttctctaaacctgaaatcttaagaatgccagtggagagcatcgtgttacaaatgaagagcatggccattcataatatcattaattttccatttccaactcctccagatagagttgccctttccaaggcaatacaattactgcaatatttaggtgctcttgataataaggagatgattactgaagatggtaaaaaaatgagcctgttcccactttcacccagattttccaaaatgttacttgtttctgacgaaaaagcctgccttccttatattgtagcaattgttagtgccctttcggtgggagatccttttatcaatgaatttgagttgggaataaacgaaatttctagaaaaccaaatccagatgaaaatctagatgataagattagagagcacgatgaatcaacaccaggtatggatcctgaactgaaaaaggaattgcgcagtaaattctataaaagcaggagtcagtttagtaaattagacaaatttagtgacgtattccgtttattaagtgttgtaagtgcaatggactacgttccaaaggaacaaaaagaaatattcatgaagaaaaattttttaagaggcaaactaatggaagaaatagtaaaattgaggaagcagttaatgtatatcatcaagtccaacacttcaaaagaaaatattgccgtagtaattaggaatgaagacttgaaaagtgatattccaagcgttatacaaataaaacttttaaaacaaatgatttgcgctggttttgtcgaccatgttgccgtaagagcagatgttttatttccagatgatgctaagataaccaacagaacttccataatcaacattccttatattcctgttttggccacgagaacaccaaatatcgaggactgctttgtctatatccatccgacttcaattttaaataatttgggggaaatgccacccaaatacatgctctattattccttgcaccttggtggaaataataaaacaaggatgaatactttatgtgacatcgcaagcacccccttagcgaacatagcaagaaagggtcttcttttgacatacagtaaacctctgactggtcaaggcttgaagaccgttaatttatcacctacggaacggtattgttatgtggttcctagatttggatccacagttgacaacgatctcaagattggttgggatttaaatcctatagcagtgcatcagaagaagcaaaaaggccagtggacagtcattaagtttatcaccagaaagggcttccagaccatcacaggtgaagagaaagaaaaaaaataa

SEQ ID NO: 78014 - DNA, 909 bp, Saccharomyces pastorianus
atgacctatccgaaaagaatacctataaatgcgtggtctgaagttcatagggtggcaaggccactaattattactttcgacgcatataatacactatacgccacaaaacttcccgtcatggaacaatactgcattgttgggcgtaaatatggtatcaaggcgaatccttcgactttaacaaacaattttccacacgtttttaaaaaactgaaggaagactatccccaatacggaaaatattctggtatcaagcccgaacaatggtggtccatcttgattaggaacgtcttcgcaccaaacgaaattcccgatgagatgataaatgaaatattaatgcggtttgagggcttcgattcgtattttgtttatccagatttgatcaaatttttaaaggatttgaagtcaagacatcctgatgttatcttaggaatagtaagcaatactgatccaattttttacaaattattaaagaatatcggattatttgagacattttccggtcacgtttatttatcatatgagcttaatctcgccaaacctgatagagcaatatttcaatatgcgcttgacgatattatatctaaacaacctcatttactcgaaaagtacaccagtgaggaaattctacagcattgctttcacatcggagatgaattaaagaacgatctcgaaggggcagaagctgccggttggactggtatactgttagatagaaatgataaatacgggtttctttcaaactcgattagtaaaccaatgcgggacgaatacaagctgtcaattgataaaatagataataattcaataaacacttgggaagccagtactaagcaaactgacacgttacagttgagtgaaagaaagtacgttgtttcgaatcttgaggttttagaggaactctttccctga

SEQ ID NO: 78015 - DNA, 627 bp, Saccharomyces pastorianus
atggtgtatttctatgaatcaaaaccaactgagtattcaacaccttaccaaattgtgatgggcaaagataagtttgaaaacgatctacttatcaaatggagctatagggagttaaactatgtttggtttcacgcggataagtactcaagtggtcatgtttatttaaagttacgcccaaatgaaaaaacaatcgatgacataccgcaagaagtgatatgtgactgtctgcagctatgtaaatcagaatccattcaaggaaacaaaatgccacaatgcaccatcttgataacaccatggcataacttgagaaaaaacaggtatatgaatcccggtgaagtatcatttaagtctctaagacaatgtagaaaaatggaatgcggagcacgagataacaaaatactaaacagactggccaagacaagggtagaactatttaataatgtggaagctacacttaacgaagcaaagaagaccaaaaatggtgatttttttgtaaactatattgagtcgaatagatcaaatcttattgaagaagaaaagctaaggaaagtagcgaaaaaaaaccaaaagaagaagaacaaacagtctaaagatgaggttactgacgatatgcaactggaagtatga

SEQ ID NO: 78016 - DNA, 1359 bp, Saccharomyces pastorianus
atgactatatctactcttagtaacgagaccacgaagagcggatcttgcagcggccaaggcaagaatggtgggaaagactttacgtatggaaagaagtgcttcacgaaggaagaatggaaggagcaggtggccaagtattctgccatgggcgagctatatgcaaataagacaatacattatccgctgaaaattcagcccaacagcagtggcggctcgcaggacgagggatttgctaccatacagaccacacccatagagcccacactgccacggcttctgttgaactactttgtttctatggcatatgaagactcgagcattaggatggccaaggagctgggatttatacggaacaacaaagacattgcggttttcaatgatttgtacaagatcaaggagcgtttccatatcaaacatcttattaagctggggcgtatcaatgaggcgatggaggagataaactctatcttcgggctggaggtgctggaagagactttcaatgctacgggaagttatacgggtagaactgacaggcagcagcagcagcagtttgacatagatggagatttacacttcaaactgctgttactgaatttgatcgagatgataagaagtcaccatcaacaggagaacatcaccaaggattccaacgactttatactcaatctaattcagtattctcaaaataaacttgcaataaaggcttcgtcaagtgtcaaaaagatgcaagagttagaattagcaatgactctgctgcttttccccttgtcagattcggcggacagcggcagcattaagctgcccaaatcgttacaaaatctgtactcgatatctctaagatctaagatagcagatctggttaatgagaagctgctgaagtttattcatccaaggattcaatttgagatcagcaataataattccaaatttccagatttgttaaattccgacaagaaaataattacgcagaacttcacggtgtataacaacaatctcgtcaatggttcaaatggtacaaaaataactcacatttcgtctgaccaacctatcaacgaaaagatgtcaagcaacgaggtcacggctgctgctaattcagtttggctaaatcaaagggatggaaatgttggcataggttcagcggcgacaacttttcataacttagaaaataaaaattactggaatcaaacttctgaattgctttcctcttcaaatggaaaggaaaaaggtttagaattcaataattactactcttccgaatttccctatgaaccaagattgacgcaaataatgaaactgtggtgttggtgcgaaaatcagcttcatcacaaccaaataggggttcctagggtcgaaaactga

SEQ ID NO: 78017 - DNA, 1683 bp, Saccharomyces pastorianus
atgcaagcccccaatatctaccccttctctcaaacacagccacaagcactgcccgggttcacatacggtcctccacaacttgtttttgaccattctgctccgagagtagatcctttgcattctactgtaactataaattctccattacccttgcagcattataatggaccgaatgcccatataaacagcgcaaacaacaactacgcatactactatcatcatcccaacaataatgataacaacaaccatagtaacaacactataaaaaataacaacattaattctgttcttcccgccgttaatattcaaatatccaacaactcacattatagaaatacacaccaaattccttctgctcctcagcggctggtcagcatcataccggatccccacatgccgcccaatatttctcactttcagctaaataatattcaccctcaaatgcatgctcctgttgctactgatattcatttccaacaagtaccagtttacaataaaaccaataatggcattggtattgataacattaataacgataaacccgtaaactcgaatcagaatgaagtgctggacaatattgatgaacgttcctgtcatgaaattaacagggtagtttcattttctaaacattttgaaaacaacgaacttaccactacagcaaatgatctaaacattcaatctactatggatgaattagctaaactgaaatctttatcaaattctacccatttcaggcagagtattgctactcagaatttccattctttacaaaatcatatcacaaccatcgaaaaccgtctggcttctttacttactgacagacaacaagagcagcaacagttgaagcagcaagagtctgaaaaggagagctcttcaccgttttccaataagataaagttaccttccttacaggaattaactgactccatctccacccaacatcttccaacattctatgacaataaaaggcatgcttcggataccgatttaaagagtagcaccttacatggtccattatatcaccgtcacgcttttctttcaacctcttcttcctcaccctcccccacggccggttccgtgcctcttcaaaagttacaggttccaagacaagacgatccaaacgataagaaaatgaatatttcatcatctcccttcaattcaataacctacattccaaacactacgttatctccaatggtgcaaacgcagttaaagaacttaaccacttctaacctcaacacgaaaaagaagaataacagaggcagaccaagagctattcagagacaacccacgctgaccacttccagccatttcatcaataattccaatcctggtgctgctgcagtttcaacgacaactcccgccgctaatagcgatgaaaagaatcctaatgcaaaaaaaatcatcgagttttgtttccattgcggggagaccgagactccagaatggagaaagggaccatatggcacaagaactttgtgtaatgcctgtgggttattttataggaaagtcaccaagaaatttggctcaaaaagcagtaatttgttgttaagatatagaagatctattgatttagccaacgatcgtagaattcctgattttatcactattccaaacaggtttattcatgatatggataatgatcaaacgttggactctgagtataatacgatattgcaataa

SEQ ID NO: 78018 - DNA, 1986 bp, Saccharomyces pastorianus
atgtcaaggaaatctatagtgcaaataagaagatctgaagtaaagcggaaacgaagtagcaccgctggcagtacaagtgaggggaaaactcttcataagaacacacatacatcctctaaaaggcagagaactttgacagaattcaacatcccaacttcatcgaacctacctgtccgttccagttcatattcattctcaaggttcagttgttcaacatccaataagaatacagagccagtaattattaacgatgacgatcacaatagcatttgccttgaagacactgcaaaggtcgaaatcaccatagatacagacgaggaagaactagttagcttgcatgataacgaggtcagcgcaatagaaaataggaccgaagatcgaatagtaacggaattggaggagcaagtaaatgttaaagtctctacagaagttattcaatgtcctatttgtctagaaaacctttctcatttagaattgtacgaaagagagacacactgtgatacttgcataggcagtgacccgagcaatatgggaacacctaaaaagaatatcaggagctttatttctaatccatcatctcctgcaaaaacgaagagggatatagctacgtcaaaaaaaccaacaagagtaaaacttgttttaccaagtttcaagataattaagttcaataatggccacgaaatagttgtggatggtttcaattataaggccagcgagactatctctcagtactttctttctcattttcattctgatcactatattggactcaaaaaatcttggaacaatcctgatgagaatccgatcaagaaaacactttactgttctaagatcactgcaatattagtaaatttaaaattcaaaattccaatggatgaaatccaaattttacccatgaataaacgcttttggataacagataccatttcagtagttacgttggacgctaaccattgccccggtgcaataataatgcttttccaggagtttctggcaaattcttatgataagcctataagacaaattcttcacacgggggattttcgaagcaacgccaaaatgattgagacaattcagaagtggttggccgagacagcgaatgaaactattgaccaagtttatttagatacaacatatatgactatgggatacaactttccttcacaacattctgtgtgcgagactgtggctgattttacattacggcttataaaacatggtaaaaacaaaacatttggagattcacaaaggaacctttttcactttcagagaaagaaaacattgacaactcatcgttacagggtcctatttcttgtgggaacatatactattggaaaagagaagctagccatcaagatatgtgaatttttgaaaacaaaattatttgttatgccgaattccgttaaattttcaatgatgctaacagttttacaaaacaacgaaaatcaaaatgacatgtgggacgaaagcttactcaccagcaatttacatgaatcatccgtacatttggtacctataagagtgttgaaaagtcaagaaaccatagaagcttacttgaaaagtttaaaagagttggaaacagactatgtgaaagacattgaagatgttgtcgggtttatacctaccgggtggagtcacaattttggtttaaaatatcaaaagaaaaacgatgatgatgagaatgaaatgagtggcaatacagaatattgcttagaactaatgaagaatgatcgagacaatgatgatgagaatgggtttgaaatctcgagtatattgaggcaatacaaaaagtacaacaaatttcaagtttttaacgtaccatattctgaacacagtagttttaacgatttagtgaaatttggttgtaaattgaagtgttctgaagtcattcccacagtgaatctaaacaatttatggaaagtgaggtatatgacgaattggtttcaatgttgggaaaacgttaggaaaacgcgggcggctaaataa

SEQ ID NO: 78019 - DNA, 576 bp, Saccharomyces pastorianus
atgggactactaagtattatcaggaaacagaagctcagggacaaagaaattcgctgtctgattctaggactagacaattcggggaagtcaacgatagtaaacaaactattgcccaaggatgagcaaaataacgatggtataatgcctactgtgggttttcaaatacatagtctgatgataaaagatgtgacaatatctctatgggacattggggggcaacgcacattaaggccattttgggataactattttgataagacacaagcgatgatatggtgtatagatgtgagcctttcaatgcggtttgacgaaaccttgcaagaactaaaagaattaatcaatagagacgaaaatcgaataggatatgagtgtgctgttatcgttgtgttgaacaagattgatttagtggaggacaagtccgagcttcatcggaggtgtttactggtagagagcgagttgaagtgtctgttcaagccggacatccgaatagagctcgtcaaatgtagtggcattaccggagaaggtattgatgacctgcgtgaccgtctggtggaatcctgccattttacccaataa

SEQ ID NO: 78020 - DNA, 1470 bp, Saccharomyces pastorianus
atgggtaatgttccaggaaaattagaccaggaagatagttttaatgatgtcaggccagattcctcatataatactacatcatcgaattctgtcatcaaacaatatgatgaagaagcctcttcaagggtgagaacgagacgcacgacgtctttggtcaataatattttaaatgggaataatgctcgtacaaaaactggttctcatctatccagcactagtagaagaaagacgtcacgggaaaaagagcttgctaaagaggcacatgctaaacaattggttgtgaggtgtagcgaaactgtagatggcgggtttttggccccatttggctgttattcttttgaaaagttggactatgatgctactgtcgttaaaaatttaataatcaaaagaaagttagcgccattttacactcctttgcaggattttgatgaaagttggactagagatgagttgataaaaattgttgacggattgcccttgcatgacacgttcgatgaaaatttggaagaattcgaagacgtaccgataggcaatttaaggaagtcaacatttaatgaattaatagacaaatctttatccaagaaggaacagagaagaatgcacgcaaagatttttagagcgagattgtataagaaaagaattttatggcaagaaaatgaaaatgagacgtttttggagagaaaattggaaatgaaaagaattggcagcaagtccagcaatgttgaagataataccagtaaccagccaaggaaaaattaccatttaccaagtgacgatttgaagtatactctttacaagaatgggtcggaatgccctatttgttttttatactttccagggcctttcaattattccaaatgttgtcaacagcctatttgtaccgagtgttttgtacagattaagagagctgaccctcacttccctcatgacgaagtagacccaactgaaccacaaactaatgacagtgaaaaggacccaaatcttcttacctctgagccagcaaattgcccctactgtgcaactgctagttttagcatcacttatcaaccacccacaaatcgtgaaactggtatagggggtatgccagccgactcatacgtgtataaggacgccgccatatcaagagctgatggcggtcagccaaacatatcagccattacttcggataccattcgtcctgattgggagattaaattgaacaaagaaagggcaaggttgatgaggagatccgcgaatgccaccgctatacatataagtaataggttgatcgatccaagccatagcacaaggagaaatacaagtcacagtataacccctattcatgatgaaagtacgtcagcttcaagatctcctgaaccgacaataaacgaacttgaagatcaaatggttagagaggctattaggttaagccttgaagatcaggacaaccgaaaaaaatcaaagaatagaaacacctctttgagaccatag

SEQ ID NO: 78021 - DNA, 309 bp, Saccharomyces pastorianus
atgtcacgcactgacacaagtgagaagagaaaagaagattttatatatgtgagtttgaatatatacctatgcgtacgtttatatataatgcatttgatttcttcgaacacgccaaaaagtcattgttcagtcggatttctgtgtttcttcctttcagcactagcaattacctcaaatcgaaatttctttagacctgaaaaaatgccaacaggaatattctgtaatgacacattgatggtatcgcccaaaactgaaaaatttctggaacggttcaccaaccaaaaattggctaagctggaggtgaggtag

SEQ ID NO: 78022 - DNA, 225 bp, Saccharomyces pastorianus
atgcacaatttacattgcctcgccatgctgattcctctaaatatctcaaggcatccttttagtgcaacccgcctatttataaactggtcaaagtgccaattatctcaaagaatgattcttttgatcttgatttttgcaacgtttcaaagacagcgggatctaattattccacggttcctactgttaatttacagtgttatccaatgcttgtttctacacagctag

SEQ ID NO: 78023 - DNA, 1044 bp, Saccharomyces pastorianus
atgaaggctatcaaattaacaggtcatgaacgtccattgactcaagtgaagtacaacaaagaaggtgatttactattttcatgttcgaaagatagctcggccagtgtttggtattcgttgaacggtgaaagattaggtactttggatggtcacaccggtaccatttggtctatcgatgtcgactgtttcaccaagtactgtgttacaggaagtgctgattacagtatcaaattatgggatgtgtcaaacgggcaatgtgttgctacatggaaatcgcctgtccccgttaaaagagttgaattttccccatgcggtaactactttctagctatcttggacaacgtcatgaaaaatccaggttccattaacatatacgaaattgaaagagattccgccactcacgaattaacaaaggtctccgaagagccaatccataaaattatcactcatgaaggtttagacgctgccaccgtggctggatggtcgactaagggcaaatacatcattgcaggccataaagacggtaagatcagcaaatacgatgtgtccaacaactacgaatacgtggattccatcgatttgcacgaaaagtccatcagtgacatgcaattttctcctgatttaacatactttattacatcatccagagatactaactcgttcttggtcgatgtatcgactctacaagttcttaagaaatacgaaacagactgtcctctaaacaccgccgtaatcaccccattgaaggaattcattattcttggtggtggtcaagaagccaaggatgtcaccaccaccagtgccaacgaaggtaagtttgaagctaggttctaccacaagatcttcgaagaagaaatcggcagagtacaaggccattttggtcccttgaacacagttgccattagcccacagggcacaagttatgcctccggtggtgaagatgggttcatacgtctacaccatttcgaaaaatcttactttgatttcaaatacgacgtggagaaggccgccgaagctaaagagcacatgcaagaagctaattaa

SEQ ID NO: 78024 - DNA, 672 bp, Saccharomyces pastorianus
atggcagccaggaatcgtagaaagaataacaagaaaaagtcccttttggtaacgagtgccgctcaagaaaagaatgcgacgtatgtgctcgttgcagaggaattacataaaaacacaatcgatctaaacatgggtactgaaacacctttaacggaaaaccacgagaatcctataccagcgaaagaattcaagcaccagcaaaaattagagccaatagacgaacatgatgatggcgaagacgaattatcgataaaatttaagtccatgacaaaaagctcggggcctattactgaggctgaagttcaaaagctgctcctaagctatgccttcacaagtgctgcaatacaggaggacgaaaacgagaaagaatcgcgtcactatcctattaaaccgccttcgccatcagcttcttctttgtccgcctattttcaatccttcgttgaaaaatgcaaacaggttttctacaacttcagtctgcaaacagtagaaaaattaaatgctctacaaaatagcttgtacgaagtattttggattatttttatttatttaaactactggttccccaatgtgggtgactatgtgaggtatgtctgtcgtagcttctcgcgccataacgaaattgcccaattactaacacgtatttttacttacaatatcaaccacctccactaa

SEQ ID NO: 78025 - DNA, 447 bp, Saccharomyces pastorianus
atggtttctaccgctacatttttcttttttgtttacttaacccttttcgtagtgataggtttcttctcctcattattcataatacccttattgggcatttcctttgtgtttgccattggcgtggtatcatttggcttctgcagcaacatgagtttcaaaatggcccaactcatttatgtccgagctgacgccttcttgaaaaaagtcctcgacaaaatggccctacaaacacagccggcacaactacaggaaccacaggagccactttccacattaaggccagtatctaatccaactattccaagcccattaagacaaacggcgcgcccttctaaattcgtcaccgaagaagatgttattttcgaacctgttagtgctcaaagcgccattgcccgttcattagagactactgctaataaagcgggtaataagttccagctctcttaa

SEQ ID NO: 78026 - DNA, 861 bp, Saccharomyces pastorianus
atgcaattcttcaaaacacttgcgaccttggtgtcgtgcatatcgttcgtcctcgcttacgtggcacaagatgttcatgtatcattcccctccaccgcaggaaagtctagggtaatgatcggtaaagttgaacccacaataggaatcgatgaaactgttccgactacaatcacagttgaagaccctaacgaggtgattcaagtaaatttcgccattgagtctaccaacaaacccttccagaacaccttattgataggcttacctaataagaacctagaaatggcttttgaacccgaaattaaggacaatggcaagttgtccatgtataaatacaggatagatttagccaagctggatgctgctttgttgcaagaggcttccagatcaccggaactaataaaggccactttgattctagcgtcatctaccgccaaaccaaaggaaaacttgttcagggaaattctgcaactcaacctgaacttcgatgtagatcactcagattcatctttagttggcaaattcggcattaagccagaaatccatcatatatttcatgccgagccaaagagagttgccaaaccaattgctgtgatttttgttttaattatcttcattaccattttatctttaatagtcacctggttgaattcttgtgccgccgcattcgataacatcccgaccggtgtcactgctgtatatttcctaggattcatcgccacgattgttgggtttgaagttatcttcgctaggtactacttggggaccagtatttttgaaactctattttcctctttgtacttgggcgctccaggcttactgacatctaccaagttcctgagatcttttggtcaaacaatctag

SEQ ID NO: 78027 - DNA, 573 bp, Saccharomyces pastorianus
atgacggttggtacacttcccatctggtcaaaaaccttttcttatgcaattaggtcattatgcttcttgcatataatacatatgtatgcatacgaatttactgagacgaggggagaatcaatgttgccaacactgtcagcgaccaatgattatgtgcatgtcttgaaaaatttccaaaatggtagaggcataaaaatgggtgactgcatagtagcactgaaacctactgaccctaatcataggatttgcaaaagggttacgggtatgcctggtgatctcgtgctcgtggatcccagtacgatagttaattatgtcggcgatgtgcttgttgatgaggagaggtttggtacctatattaaagtccctgaaggtcatgtttgggtaaccggagataatttgtcacattcattagattcaagaacatacaatgcattacccatggggctgatcatgggcaagattgtagctgctaacaattttgacaagcccttctgggacggttcgatacgcaatatttggggtttcaaatggatcaataatacatttctagatgtgcaggctaagagcaactga

SEQ ID NO: 78028 - DNA, 438 bp, Saccharomyces pastorianus
atgggaagtgtaccaaccgtcatccctggtattgtacactgttggatgattcactgtcttattggtccgtttttgtttgcaataatatactggagtatttttattgaaggaatgctttttccccagaaatacttagattgtcagagtgttataaatttgctgtgcggttcaaaccaacagaagagaatattcaaagaaaagctcagaatatatcaagtccatattcaagagaagataggttgcagtgaatttaacaccctactcttaatttatcaactgggctcacgacacaagatcaacagacaaataaacgacctactgtgtaatttatgcagtaaaaatcacatgatttatgctattatatgcagaaatcattatttactcttcttttcctttgtactgtcggcgacgattttcttaagaggatccctgctgtaa

SEQ ID NO: 78029 - DNA, 1428 bp, Saccharomyces pastorianus
atggcagaccttcaaaaacaagagaatagtagcaggttcaccaatgtttctgttatcgcgcccgaatcacagggacaacatgaacaacaaaaacagcaggagcagctggagcagcaaaagcagccaacgggactgttaaaaggtttaaacgggtttccgagtgcaccacaaccgctgttcatggaagatccgccttctactgtctcgggagaactgaatgataatccagcgtggttcaataatccaaggaaaagagccattccaaattcaataataaagagatcaaatggccaatctttaagccccgtacgttctgatagtgcagatgtacctgcgttttccaattccaatggattcaacaatgtcacttttggctctaaaaaagatccacgcatccttaaaaacgtatctccaaatgataataacagtgccaacaacaatgctcatagttcagatttaggtacggtagtttttgattctaatgaggcaccgcccaaggcctccttggcagattggcaaaaagaagatggtatattttcaagtaagactgacaatattgaagatcctaatttgtcttccaacataacctttgatggaaagcctacagccacaccttcgcctttccgtccactagaaaagacctccagaatacttaatttcttcgacaaaaacacgaaaacaacgccgaatactgcgtcaagtgaagctagtgcagggagtaaggaaggggcctcgacgaattgggatgatcattccattattatctttggatatccagaaacgattgcgaattctattatactccattttgctaatttcggtgaaattttagaggattttagagtgataaaagattttaaaaagttgaattcgaaaaacaagtcaaaaagtccgtcattgactgctcaaaaatatcctatatatacaggagatggatgggtcaagttgacttacaaatccgaactttccaaatctcgtgctttacaagaaaatgggattataatgaatggaacattaattggctgtgtttcgtatagtccggctgctctcaaacaattagcttccttgaagaaatcggaggaaattataaacaataaaacaagttcacaaactagtttaagctcaaaagacctcagcaattatagaaaaacagaaggaatttttgagaaagctaaagcaaaagcagttacttcaatagtgcgcaatgcagaattcaaggtttccaagaattctacttccttcaaaaatccacgcaggcttgaaataaaggatggtcgttcattatttttgagaaacagagggaagatccacagtggtgtcctgagctcgatcgagtctgacttgaagaaaagggaacaagcgagcaagagtaagaaaagttggttaaatagattgaataattggttatttggatggaatgatttgtaa

SEQ ID NO: 78030 - DNA, 336 bp, Saccharomyces pastorianus
atgctggaatcgcaccaaagcactacatttgggggtaaggtttttcattacaaatcattccatccaaataaccaattattcaatctatttaaccaacttttcttactcttgctcgcttgttcccttttcttcaagtcagactcgatcgagctcaggacaccactgtggatcttccctctgtttctcaaaaataatgaacgaccatcctttatttcaagcctgcgtggatttttgaaggaagtagaattcttggaaaccttgaattctgcattgcgcactattgaagtaactgcttttgctttagctttctcaaaaattccttctgtttttctataa

SEQ ID NO: 78031 - DNA, 2184 bp, Saccharomyces pastorianus
atgaatgattggcatgagttcaatgccgcgataaagtcaatatattgtaatgcagaaggtgactcaagcagtataattaatagattggttggcttggcaatgaaaagcgatgattccacttttattgaggccgttttagttttgaaagaaaatgcgtcgaaagtagataaacaattaagatttttatggcttacttcaactattaattcaaggttttatccctctatacctatctcagaagcctcaccggtttcttggaataaaaccgaatattgcgcacctggtactgaagaactacaaaggcgttatccagggagagccaagttacagaatgaagaagactattcaggcggaatagaacaatgccgagatgtgccagattgctcattagttgcttctctaattaatcttaggtctaagaacttgaatctccctctaattaaacaaatatcatcaactaaatatcacgtcaatttaagttttaacggaagcaacaaaaggctagtgacagtagatatttcgcagatcccaacctcagtggatggcaaacaactttctttaaagagtaacgatatttcggacaaaattggagagcttgcattactgcttgtttctaaaggaacatattccacggatggctcaaatattagtatagatacttaccgcttaagtggcttcttaccagagataacacaagtaaacagctatcctttcgaaaaattatggaagtttcacaaatctaatttatgtctgatgggcgctggcaccgggaatcgttccaatgacatgataaagcccctagttgagaaccatgattactctataattgatatcacatatgattctaggctagtaaaattgcgagatccgaggaactcggcactaaatgttgaaatcagctatgaacagtatttaaaaaatttcaaacaactttatcttaattggaaccaagaaaaattattcaaacgttctcaggtacttcattttcggtacgatacttcacgctacaataaattttccatcgttgcagataaacctttatttcacctggtaaacaattctaaagtgacagagacggtatggttattgctagaatcccatttgcaagatgaaggcagccaagaaaatcggtcagtttcctttttgaatgaggctcccgaatgcataatttgtccaattgaacctccagtagaatgcggtggcaatcgcattggactccagctggtaaagttgagattagatgctgagactgagaggttattgtattgttattcaacaacaaacaacaatttcagtattcactctttctcagttgtgaaggaaatatgttttcaaagattgaaagatacaaaaagtctttttgccaaagtccttttctcttttccttatgaaatagagggaaaagcctcatttgatacttgtaatttttttcaaaatccgacttttgagttggaagttcactctgaacaagattatcaagtacttatggacgccgcatgtatctcaactagctcacatgatttaattaacattcaagtatattactttaatgactatgaattgataaagccaataatgtttgataaccactatcagcccgggcagggccttaaacaagacgtgcccatcttaactaatgtcaaatatatgattgtttgctcaacttacggccctccagcctcaatggaatttgaattacttgcctcgatacggttatcctcttcatggaggttaatatctggaataactttacggagtgttaacttgatatacggtacttatccatatcattgtcgcaacaggttccattggaaggaaacttcagacaaacttaaaattcagatgactttgccaaccaaaaagtattctacgaacaaactttttatacgtgtagtacccgtggaatcatcagcacgattaaggatgcgatgtaatattttcgagcctgaatcagctctctgtgtttatgaatgtcaagagtataggacatgtccatctgggggcatcgttatacctgatctggaagtctctcgtattaacattgttgtattgatgatagaaagaagtgtacctatttccagttgtttacctacggaaggacaattggatgaattggagttgtttgttgggtccagtcaaaaaatcagaattgaaaaatactccgacgatgtgataccaaaataa

SEQ ID NO: 78032 - DNA, 1644 bp, Saccharomyces pastorianus
atggtaaagaaacaccaaaatagtaagatgggtagtacaaatcactttggacatctcaaaagttttgtgggaggtaacgtggttgcccttggtgctggaacaccttatcttttctcattttatgctcctcagctactgagcaagtgccacatacctgtttctgcctcaagtaagctatccttctctttaacaataggaagctcactgatgggaattttagcaggaatagttgtcgatcgaagtcctaaactgtcctgtctaattggttcaatgtgtgttttcatcgcgtatttgattttgaatttatgctataagcacgaatggtctagtacttttctcatatccttaagtttggtactcattggatatggttctgtctcaggtttttacgcttctgtgaaatgtgcaaatacaaattttcctcaacacaggggtacagctggggcatttcctgtgtccctatacggtttatcgggcatggtgttctcatatctttgctcaaagctttttggtgagaacatcgagcatgtcttcattttcttgatggttgcgtgtggtagcatgattttagtaggctatttctcattagatatattctctaatgcagaaggagatgatgctagcattaaggaatgggagcttcaaaaaagcagggaaacagacgataatatagtaccgttatatgagaacagtaatgactatataggttcacctgtgcgttcatcatcccctgctacctgtaaaacttatgcattgtcagacaattttcaggaaacgtcagaattttttgcacttgaggatagacagttatcaaatcgaccattgttatcaccttcttccccacacacaaagtatgatttcgaggatgagaataccagcaaaaatacagtgggcgagaatagcgcacagaaaagtatgagattacatgtattccaaagcttaaaatcttcaacatttattggttactacatagtattgggtatactacaaggcgtgggtttaatgtacatatattctgtggggtttatggtacaagcccaggtttctactccacccttaaatcaattaccaattaatgcagaaaaaattcaatcattacaagtaactctcctgtctcttctttcattttgcggcagattatcatctgggcctatatcagattttttggtcaagaaattcaaagctcaaagactatggaatattgtcatagcatcgcttttggtatttcttgcatcaaataaaatatcccatgacttcagcagcattgaagatccttctttaagagcctccaaatcattcaagaatatttcggtatgttcagcgatcttcggttattcttttggcgttctatttggtactttcccctccatagtagcagatagatttggcacaaatgggtatagtacgctgtggggtgttttaacgactggtggtgtattttcagtgagtgtttttaccgatatattaggtagagatttcaaggcaaatacaggagatgatgatgggaactgtaaaaagggagtgctttgctacagctatacttttatggttacgaaatattgtgccgcttttaatcttttgttcgttttggggataattggatatacgtactatcgaagaagagcaactgcaaattccctgtag

SEQ ID NO: 78033 - DNA, 717 bp, Saccharomyces pastorianus
atgtcccacaaattaacaatcctgccatttctgattaagttcacgcccaagtttccacaatccattgatcacgacgagcatggtctaaacgtttatgcctttgatctggaccatacaattatcaaaccaaagtcccccaatataagttttagtagaagcgcaagtgattggcagtttattaattttaactccaagaaatccaccctggattacctgtgtaatatcattgataatgatcccacggccgtcatagtcatattttctaaccaaggtggtgtcatcaccgtcccaagaacttctaaaagttgcaccaagtacactaataaaattttgctatttttaaaggcaatcaaaaacgatgagagaggagaaacgttatcacacaggttatggctatatgcagcacctaaaaggccgaaaacttttgcagcaaatcatagtaagatcacattcgcaagcttaggtgaaagttataacaatgatcctaacatattcgaaaaagttcgaaaaccaatgacaggaatggtagagttttttaaaagggacctggaaagcgcatacagggtttcagaacaaatttctcccatcaagttgaattggatatattattgcggtgacgccgctgggaggaaaaaggacttcagtgattctgacataaagtttgctgaaaacttgcacgttgaattcaagtaccctgaggaaatatttcacgggtag

SEQ ID NO: 78034 - DNA, 468 bp, Saccharomyces pastorianus
atgtcgttggtcaaacttgcgaatacgtgtgctcatttacagaactgctcgaaagttagagttgccttaacatcgatcccatatacgaaattgcagctacagtttgcgtataacctttaccaacaagggttcttatcgtctttacagaagggatcgactatgggaccagacaaagattttgttgaagtaacaccagacaatatctctactagaaggctttgggttggactgaagtatagagataacaaacctgtcctcagcagctgcaaattaatttccaaaccaaattcaagaatacacctgccaatggaagacatgaagaaactatgctctggcgtaactattagaaacatcaaaccactacaaccaggagaactgattctagttcgagctcataataacattatggacattaatgaagccatatccaaaaagttggatggagaagtactatgcagagtaaaatga

SEQ ID NO: 78035 - DNA, 321 bp, Saccharomyces pastorianus
atgcatcatttcgttccatctatttcgctgttcatggcttctgtctctttctctgtcttttttagccatctcgcaactagctgggaatgttcttttttcagatccgagagtttttgttgtaaaacattattttcaatggttccactaatcaattcgtcattcaacctttccgtattcttatttttcaacgcaataacttctttcaatcttcgtatttcttgctccttacttttcagttccttttgtagtattgccagtgtattcaataaagcatcgtcatggctgacaatgttgccaccaatggcgccactattatcttga

SEQ ID NO: 78036 - DNA, 453 bp, Saccharomyces pastorianus
atgggcaatttcattataacagaaaggaagaaagcaaaggaggaaagaagcaatccacaaacggatagcatggatgatttgttaattcgtagactaacagatcgaaacgacaaggaggcccatttaaatgagttgtttcaagataatagtggcgccattggtggcaacattgtcagccatgacgatgctttattgaatacactggcaatactacaaaaggaactgaaaagtaaggagcaagaaatacgaagattgaaagaagttattgcgttgaaaaataagaatacggaaaggttgaatgacgaattgattagtggaaccattgaaaataatgttttacaacaaaaactctcggatctgaaaaaagaacattcccagctagttgcgagatggctaaaaaagacagagaaagagacagaagccatgaacagcgaaatagatggaacgaaatga

SEQ ID NO: 78037 - DNA, 2451 bp, Saccharomyces pastorianus
atggatgttgtacagcagaaacaggataaacaattgcagcatcaaacacaagagcagcagcatatacgagaggaccagcaggaagtcccaccccaacgtccacgacaacaaaacagatggaaaccctggtggaattccactgccgacgatgagccaaacacgggaagaattgcagaatatcctaatggacaaggaaggagtagtccgacaacggattttcaagatagcgtgaactcgaataatgacaataaagggatatggtctaaaatcgcttcttttgcaacatccagatatagaagtgccccaattgttgttgatgataatacccgctactctcaactaaacactgaacaaatcaacttcttggaaaatgaggctaaggatataatttcaaaaaagtcgaaatcatggtgttggtacgaagcaattccacatatatcaaattcatcaaacataattgattccatagataccccaggaataatcagtgtctctggtacaggatcagccaaatgcccattgccattaaacaaatatcctggggagggaggtaaccctgggtataatgtatttattaatgattctttaatcctaccatcagacaaccctttgaattttctgcacgtccaaccactaagaactaaggtattgaatactatcaaaaattactataacttccctaatgagcaacatctctatttaagacaaaaaaaaaccgcattactgaaggataagagaattattataatatccgtcgtgggggatttaccagaaaagtatgagcagcgctcattagaatcacaaagatcggcttattatctttctagaaaattgtcacaaaatctagcgcaagaacaacctcaaagagtcttgaccctatcgttccagtgcccactgcataatcaagatttaatacctacatataaagaatgtgtagagttactgaaccactgggctcatcttttcaaagaggtagattcaattttttttgtgggcgtttatcacagcgttcccttaactttgctattagcgaaatatatcgtgcaaaataatgaagttctagagtttgatgaaaacactacagtgagtgtattgagtttccagtcatgtttacaaggctatcgattttgggaccacagcactgactttactagcaatagttataataacttgggttccaattccagtactaacgaaaatgatagtaatgatcatgattcaaataatgatttcacaacgaagagccaacaaatcaaagaaaaacagttatttcagggtattgacaaaaagcaacaagacacattatctaaaatcaaaaattataggcggatagattctagtgaatctaaactagttcaggatgcattggattggctcttgttcaattgggatacgtttcgactgacattttttggtaagctttatgataattttatgacaatttcagaaaaacttgctatagattataatcaccctaaaatcttgagaaatttatggtgcaatgggaagtacatgggcattgatttaaagaatgctaataatttaaaccttgataccgatgatgaagcaactagtaacattaatgacgtccatgtaaggacccctaattttgaatcgagattgaagattcccaccaacagacttttcgaaataaccttatgggatattttgatgataacggagaatttaggatataaacaatttattcccataattaatttactaagtcctttttttatttcaaggtcatttaatgattacacattgcctccaaatattaggaaacagtaccagaacagcaacaaaatctggcttcaagaaatggacagtaagtggaaaatgaatggtcatcaactcaattacgaccaaagggagggtgaaagtctcggttcatcatcggaatcattattgccagagaatatttctacggtaaaggattttttgcagtttgtgcagtatcaaaacgaaaaatcttcggatttcgtaaggatatattcagacatttatgatgacgataaagtctataaatgctttctgtacaatacaatattcacgaaaaacccattaagtcgtaagcatttacgtttaaacatcgacctcgacactcctacaagcatattgaatactgtcaatcaatatgatttggtatggaaaattcatgattccttctccaaattgattcaattgaaaaatttaccgcagcgagagataccacatgcgttgaggctctccatctcattaaactgcttcttggatagtaccacgagtacttctggccctgtttttcagagggacaccgtggaagctttgagaagattaacagagatttggcgaacttatcaggattggtctccaccaacaaggggtttgaaacacctacgtgatatcctgagcgttttagccatgtatgacaaccccaaaaacttgattaatgatgttcgacgtacatag

SEQ ID NO: 78038 - DNA, 675 bp, Saccharomyces pastorianus
atgtctttcactgaggatcaagaaaaaatcgcgctagaaatactgtcaaaggacaagcatgagttttacgaaattttgaaggtagataggaaagccacagatagtgagatcaagaaggcatacagaaaactagcaatcaaattgcatcctgataaaaactctcatccaaaagcgggagaagctttcaaagtaattaatagggcatttgaagtactaagcaatgaggaaaagcgcagtatttatgacaggataggtagggatcctgacgatagacaaatgccatccagaggtgctgcttcagggttccgaggaagtgcaggtgggtctccaatgggtggcggatttgaagacatgtttttcaattcacgtttcggtggtcaaagagctggaccaccagaggacatattcgactttttgttcaacgcaggcggcagcccattcggcgcttcaccatttgggccttctgcttccactttttcattcggaggccccggtggtttcagagtttatactaataatcgtggtggctcaccgttcatgcgtcaacaaccccgctcaagacagcagcaacaacaagcagaagaaaatgcagtgaattcgcaattaaaaaatatgctcgttcttttcatcatctttattgttcttcctatgattaaagattacctgtttagttaa

SEQ ID NO: 78039 - DNA, 4971 bp, Saccharomyces pastorianus
atgggcatagctgatgggcaaagaagaagatcttcatcactacgaacgcagatgttcaacaagcatttgtatgataaatatcgcggaagagctgatgatgagatagagttagaagatataaatgagagtaagacgttctccggtagcgataataacgataaagatgacagagatgaaacaagcggcaattatgctgctgaagaggattatgaaatggaagagtatggtagtcctgatgtgtcatgtagcattatcactaaaatacttgatactatcctagatcgaaggaggacgttccattcgaaagacggtagacatattccgattatattagatcataatgcaattgaatacaaacaagctgccactaaaagggatggtcatttgatagacgaaaggttcaacaagccttactgcgacaaccgaataacttcatcaagatatacattctattcctttttgcctagacagttgtatgcacaattttcaaagttagccaatacttattttttcattgtcgcagtattacaaatgatacctggatggtctacaactggtacttatacaactattatccccttatgtgtatttatgggtatatccatgacaagagaggcttgggacgatttcaggagacatcgtttagataaggaagagaacaataaaccagtgggagtgttggttaaagatggaaataatgacgcacaagaagtttatacactaccaagtagtgttgtctcatccactgcatatctaactaaatcggccgctgctgaaaataatccacctttaaacgatgatcggaactcctctcaaggacacttcttagacacgcacttcaataactttgaactactcaagaataaatacaatgttcatattcatcaaaagaagtgggaaaaacttcgtgttggagacttcgtacttctcacacaagatgattgggtacctgcagatctgcttttattgacatgtgacggcgaaaatagcgaatgtttcgttgaaacgatggctttagatggcgaaacaaatttgaaaagtaaacaaccccacccagaattaaataagttaaccaaagccgcatcaggtcttgcaaatattaatgctcaagttactgtggaagatcccaatattgatttatataattttgaaggtaatcttgaattgaaaaaccatcgcaatgataccataatgaaataccctctgggtcctgataatgtcatttatcgtggtagtattttgaggaatactcaaaatgttgttggtatggtcattttcagtggtgaggaaacaaaaatcagaatgaatgctttaaaaaacccaagaacgaaagcccctaagctacaaaggaagataaatatgattatcgtgtttatggtgtttgtcgttgccacaatatctttattttcttatcttggccatgttttgcataagaaaaagtatatcgaccagaacaaagcatggtatctatttcaggcagatgctggcgtagcacccacaataatgtcttttatcatcatgtataacactgtgattcctttgtccctatatgtaacaatggaaattatcaaggtagtccaaagtaaaatgatggaatgggacatagacatgtaccatgcagaaacgaacacgccatgcgaatcgagaactgccaccattctggaggaattggggcaagtatcttatatttttagtgataaaaccggaacgctgacggataataagatgatatttcggaaattttctttatgtggatcatcttggctgcataatgtagatctcggtaattctgaggataactttgaagacaacagagacaatacgaactccttgagactaccaccaaaagctcacaacggctctagtatagacgttgtttccattggagatcaaaatgttcttgatcggttaggattttcggacgcaccaattgaaaaagggcatcgtccatctttagacaactttcctaaatctaggaattctattgaatataagggaaattcatcagcaatttatacaggccgtcccagtatgagatcactttttgggaaagataattcacatctaagtaaacaagcttccgttatttcaccctccgagacattttcggagaacattaaaagttcgtttgatttaattcagtttattcaaagatatccgaccgccctgttttctcaaaaggctaaatttttcttcttatcattagctctttgtcatagctgtcttcccaaaaaaactcataacgaatcaataggagaagactccatagagtatcagtcttcatctccagatgaattagcactagtaaccgctgctagagaccttggttatattgtattgaatagaaatgcacagattttgaccattaaaacttttccagacggttttgacggtgaagcaaaattggaaaattatgaaattttgaactatattgacttcaattctcaaagaaagagaatgtctgttcttgtacgtatgccaaatcaaccaaatcaagttcttttaatttgcaaaggtgctgataacgttattatggagcgtttacatgatcgcgaattggctgccaaaaaaatggcagacatatgcaccagtaccaaagaacgtaaagacgcagaagcagagctggttctccagcaaagaaagtctctggaaagaatggtagatgaagaggctatggccaggacctcattgagaaattctttgtctagcgtaccgagagcaagtttatcattgcaggcagtgagaaaaagtctttcaatgaagaacagcaggacccgtgatccagagaaacaaattgactccattgatcaatttcgagaaacggtcaagaaatctgatcaggagattggcagcgttgtaaataaaagcaggaagtcactccataagcaacaaatagaaaaatatgggccgcgaatttcgatagatggaacacattttccgaacaacaatgtcccaatagacacaagaaaagaaggactacagcatgattacgatacagaaattttggagcacattggaagcgatgagttaattttgaatgaagagtatgttattgaaagaactttgcaagccatcgatgagttttcgactgaaggcttaagaactctggtctatgcttacaaatggatcgatattgggcagtatgaaaattggaataaacgctatcaccaagccaaaacctcccttactgatagaaaaatcaaagtcgatgaggcaggtgcagaaatcgaggatggtttaaatctgttaggggtaactgcaatcgaagacaagttacaagacggcgtttcagaagctatagaaaagatcagaagagccggtataaaaatgtggatgctaacaggggataaaagggaaacggctataaatatagggtattcgtgtatgttaatcaaagattattctacggtagtcattttaactactactgatgaaaatattatatcaaagatgaatgcggtttctcaagaagttgattccggaaacatagcacactgcgttgttgtaattgacggtgccacgatggccatgtttgaaggaaatcctacatacatgtctgtatttgttgagctttgcactaaaacagactcggtaatatgttgccgtgcttcaccttctcaaaaagcccttatggtttccaacataagaaataccgatccaaacttagtcacgttggcaataggtgatggtgcgaatgatattgccatgatacaatctgccgatataggtgttggaatagccggtaaggagggattgcaagcatctagagtatctgattattctattggccaatttcggttcctcttgaaattgttatttgttcatgggcgttataactatattcgcacctccaagtttatgctttgcacgttttacaaagaaattacgttttactttacgcagttgatatatcaaagatatacaatgttttcaggctcctctctatatgagccgtggtcattgtccatgttcaatactctattcacatcactaccggttctatgtattggtatgtttgagaaagacttgaaaccaatgactctactaacagtccctgaattatattcgtacgggcgcctttcacaaggttttaattggttaatattcatggagtgggttatcttggcaactacgaattctcttatcattacatttttaaatgttgtaatgtggggtatgagttctctttcagataacactatgtatcctctaggcctcatcaatttcacagccattgttgccttaattaacgttaaatcccaatttgttgaaatgcacaataggaattggctggcttttacttctgtagttctatcctgtggaggttggttagtgtggtgttgtgcccttcctattttaaataatactgaccaaatatatgatgtagcatatggcttttacaatcattttggtaaagacattacattctggtgtactagcttggtgttggcactgttacctatcactttggatatagtttacaaaacattcaaagttatgatatggccatcagattctgatatttttgctgagctggaacaaaaaagtgatatcagaaagaagctggaactaggggcctatagcgaaatgaggcaaggatggacgtgggataaagatcccagtactttcacaaggtacacagacaaagttctttcaaggccaagaactaattcacgtgcaagtgcaaaaactcataacagcagcatatattcaatgtcaaatgggaatgtagaccattcctcaaaaaaaaatttctttggaagctcttctaaaaagagctctgaacgatacgaggtattacctagtggcaagttaatcaagcgaccatccttgaaaacacaaagcagtaaagacagtattggcggcaatataactactaaactgacgaagaaactgaagcttccatcgaggaatgtggaagatgaagatgtgaaccagattattcaggcaaggctaaaggatctggagtaa

SEQ ID NO: 78040 - DNA, 2118 bp, Saccharomyces pastorianus
atgacaacaaactcacgtccatccgccttgcaggctcccggtttacagattttttccatgctgaaatcaagcgaagaggatggattcatgagttctagtctaacccttgatagtgataacataataggtgtcaccgagaacaatcatcaagaattttactctacgtggcgaaaaccgtccctattaagcagccgcagcgtattacatgaatactcccctacaattgtgggatctaatgactctactttttcacctataaccgtaggaaaaacaacgaagttttttaattgggatgatattatttcaagaattttcatgcaacagccattcggtgtaacacaccaattctttgaagaatttcggtattcaatcattacttctcattttttgaatgatatgaaccattacaggttatcactacatcttgatcaatctattatgaactttcataaaagctcaactttgttaaagaatgtacctcccaaatctgtaccatttatggcgacaaaatatggtaaattggcggtagtagaggacaaaaaattatatttcagacaaaatttcaactacctttcgatgataataacctcttatcgagtacttacacagttgaaaaaatactgtagaaaaaaaaatagtccaggtctgaagagagttgtaattttaatactcgtagcagtgtatttatcaattcagcaagaatactttcgaagacatttgatttgctataaaaccttattaaaggtacggaaagtgctcgaatcattacaacaagtggacgtaatgattcataaatatcatcttcgatttaaagaaataaaaaatcatagtttcatatcaagagtgtctcttatttcaattgctgacgagcactcatctgtgataaaagagctcctagtattctcaagtgatgcactgttttataaactcaaatcaatcattccagatattgtcatctttagcgatacaagtgagctatcgaaatactgtgaattatacggtatcgatgtaccaaatctttactataataatactaccacagtaaaagaccttgatggtaagctttatcgtctcaaactgctaaagaaatttatgctctgttgtttgctgtctttagatatgacaggaaacgaaaatctttcaaatgtaaacatgagaaacgcactaaacaaaatctttccagattacatggcaagggtgcaactcaaaaaaaaatataatccgataggtacattccaaaatatagtcagtctattaagaggattacattcactactctccactgtcctggtgtctttgaatgaccataagcaaatattgtatgcatttcctgaagaaacatcaactaatactggttgtgaaagagccaatgtatgttcattttcaaagaatgataaattgtttcaggcacttaattatttaaaaatgatcgagaacaatctattagctattgacattcgaaatggcataacagagaatgataggaacatcattgaggataagttggaggagctcattactttctggaaaacctcgaaaatttgtggcaatatttccaggatacaaaaggtatccccaaccaatacaatcaaccatggtttccatctggatatcctcaaaggcagaaagtcaccccgttcttcgtcagtacaaggtcttagcttagagaggaaagttgacttcattgatgttgctgaatcggtgaatgactcttttgaaaacgacaccgaactagaggaatatgaagactacgactgtcaggagggatgttctgccggttcacgccaaaatcaccgcgtagattttatcggaaaggataattgtaggaaaccagatttcaagcaactttctgacaacgaattacgacgcaagttagatgaaggaattttgaaattggctcaagaaaaccgtgaaggcagggaaaggctaagaactgcaaagtcctttgaattgctaagaaaagctcaggcttccatgtccgtaaagtttggctttcaaaaaccattaagagacgatgcctttcttgagagcaggcctctcagcaaatgcaaagtatcttcagaagaaactatcccatttttgtatgaattaaaaggattactaggaaatcattcatga

SEQ ID NO: 78041 - DNA, 2241 bp, Saccharomyces pastorianus
  modified_base (1795)..(1887): a, c, g, t, unknown, or other
atggataacacgaccaatattaatacaaatgagcgctctagtaacacggattttagctcagctcccaatatcaaaggtttgaatagccatactcagttgcagtttgatgcggattctcgagttttcgtttcggatgcaatggctaagaactctaagcaattattgtacgcccatatttataactatttaatcaaaaacaattactggaactctgccgcaaaatttttaagcgaagctgaccttcctttatctagaataaacggatctgcttcgggtgagaaaactagcttgaacgccagcctgaagcagggattaatggatattgcatctaagggtgacattgttagtgaagatgggctattaccttcgaaaatgctgatggacgctaatgacacgtttttacgggaatggtgggaaatctttcaatcattgttcaatggagacctagaatctgggtaccaacaggatcataatcctttaagagagagaataataccaattttgccagctaattctaaatctaatatgccttcccatttctctaatctcccaccaaatgtgattccaccaactcaaaatagttttccagtttcagaggagagttttaggcccaatggtgacggtagtaactttaatttaaacgatccaaccaatcgaaacgtctccgaaagatttctatcgagaacttccggtgtctacgacaaacagaatagcgctaattttgcacctgatactgctataaacagtgatattgctgggcagcagtacgcaactataaatctacataaacacttcaatgatttgcaatcaccagcacagccccagcaatcatctcaacagcagatccagcagcctcagcatcaaccccagcatcaaccgcaacagcaaccgcaacagcaacaagaacaacagcaacaacagcagcaacaacaacagcagcaacaacagcaacagcagcaacagcaacagacaccgtatcctattgtcaacccacaaatggtccctcatattccatcggaaaattctcattcaaccggacttatgccttcagtgcctcctacaaatcaacaatttaatgcacaaacccaatcttcaatgttttcagaccagcagcgcttctttcaatatcaattacaccaccaaaatcaaggacaggcgccatcttttcagcaaagccaatctggtaggtttgatgacatgaacgctatgaaaatgttttttcagcagcaagcactacagcaaaattcactacagcaaaatcttggaaatcaaaattatcaatctaatacacgtaacaatactgcggaagaaactacgcccacaaatgacaataacgcaaatggcaatagtttattgcaagaacacatacgagcccgcttcaataagatgaaaacaattcctcaacaaatggaaaatcaaaacactgtcgcaaagccggttgttagtgatataacatctcaacagcagtacatgcatatgatgatgcaaagaatggcggctaaccagcaattacaaaatagtgcctttcctccaaacactaatcgtatagcgccagctaacaacgctatgccattacaaccaggaaatatggggcctcctgtcattgaaaatccaggtatgaggcagactaatccatccggacaaaaccctatgatcaatatgcagcccttatatcaaaatgtttcttctgcaatgcatgcgttcgctccgcaacaacaatttcatctaccacaacattataaaaccaatacttcagtaccacaaaatgattctacctccgtctttcctttgcctnnnnnnnnnnnnnnnnnnnnnnnnnnnnnnnnnnnnnnnnnnnnnnnnnnnnnnnnnnnnnnnnnnnnnnnnnnnnnnnnnnnnnnnnnnnnncccacagtatcacaaccatcatcaaaacgtacttctagctccagcacaactcctaatataactacaaccattcaacccaagcggaaacagagagtgggtaaaacaaagaccaaggaatcaagaaaagttgctgccgctcagaaagttatgaaatctaagaaactggaacaaaatggtgattcagctgctacaaacttcatcaatgtcactccaaaggacagtggcggtaagggtaccgtaaaagttcaaaacagtaactcgcagcaacaactaaatggctctttttctatggatacagaaacattcgacatatttaacattggtgacttttctcctgatctaatggatagctaa

SEQ ID NO: 78042 - DNA, 1107 bp, Saccharomyces pastorianus
atgaactcatggaacctgagttcttcaataccgataatacatacgcctcatgaccatcccccgacatcagaaggaactccagatcaaccaaatagtaaccgaaaagatgataaactgcacaaaaaaagaggcgattcagatgaggacttaagccctatatggcattgtgtcgtctccggtgggattggtggaataataggagattctgcgatgcattcactggatactgttaagacaagacaacagggcgcacctaatgttcaaaaatacaggaacatgatctctgcatatcgtaccatttggctagaagaaggcgtgagaagggggctatacggcggttacatggctgacatgttaggctccttcccgtcagcggcaatcttctttgggacctatgaatatactaagagaacaatgatagaagattggcagattaacgataccatcacacatttgagcgctggatttcttggcgattttatctccagttttgtttatgttccatcagaggtcctaaagacaaggctacaattgcaaggaaggttcaataatcctttctttcaatctggctataattattcgaatttaagaaatgccataaagacagttataaaagaagaagggtttcgctcattattttttggatacaaagccactttagccagagatttgccatttagtgcattgcagtttgccttctacgaaaagtttaggcaattggctttcaagattgaacagaaagatggtagggatggtgagttgtctatacctaatgaaatattgactggcgcctgtgcaggtggactggcgggaatcattaccacaccaatggatgttgttaagactagagtccaaactcaacagccgcccagccaaagcaacaaatcatactcagtaacacatccacatgtaacaaacggcagaccggctgcactttccaactcgatttcgctcagccttcggacggtctaccaatctgaaggtgtgttaggtttctttagtggcgttggccctagattcctctggacaagtgttcagagcagtataatgttgcttctgtatcaaatgaccctacgtggattaagtaacgcatttccaacggactaa

SEQ ID NO: 78043 - DNA, 1827 bp, Saccharomyces pastorianus
atgtttaaccgtaccactcaactgaaatccaagcatccctgttccgtgtgtacgaggcgaaaagtcaaatgtgatcgtatgataccgtgtggaaactgcaggaagagaggacaggactccgaatgtatgaaatcagcaaaactaataacggcttcatcttccaaggaatatctccctgacctattgttattctggcaaaattatgaatattggataacgaatattgggctgtacaaaacaaaacaaagagatcttactagaacaccagctaatttggatactgatactgaagaatgtatgttttggatgaattatcttcaaaaagaccaatcattccaattgatgaactttgctatggaaaacttaggtgctttgtattttggttccattggagatatcagtgaattatatttgagggtggaacagtactgggatagaagggcagacaagaatcacagtgtagacggcaaatactgggacgcactaatatggtctgtctttaccatgtgcatttattatatgccagtcgagaagttagcagaaatattttcagtatatcctctccatgaatatttgggtagcaacaaaaggctcaattgggaagatggtatgcaattagtcatgtgccaaaagtttacacgctgctcattattccaattgaaacaatgtgatttcatggcgcatcccgatataaggctcgttcaagcatatctgattttagccactacaactttcccctacgatgaaccgttgttggcaaattcgctcctaacacagtgcatccatacctttaaaaattttcatgtggatgactttagacctttacttaatgatgaccccgttgaaagcatcgctaaagtaaccttgggaagaatattctatcgcctgtgtggatgcgattatcttcaatcggggccacgcaaaccaattgcacttcatacagaagtatcctccctattacaacatgcagcatatctgcaggatttgcctaacgttgatgtttatagggaagaaaacagcacagaggtcttgtattggaaaatcatctcattagacagagatttagatcaatacttgaacaagagttctaaacctcccttaaaaacattggatgctataaggagggagctcgatatttttcaatacaaagtagattcgttggaagaagattttagatcaaataacagcagatttcaaaaatttattgcactttttcaaatatctactgtttcatggaaattgtttaagatgtatctcatttattatgataccgcagattcactactaaaggttatacattattctaaggtaatcattagtcttattgttaataacttccatgcaaaaagtgagtttttcaacagacatccgatggtgatgcaaaccattacgcgcgtggtctctttcatctccttttaccaaatttttgtggaatcggctgctgtcaaagaacttttagtagatctaactgaacttactgcaaatctgcccacaatattcggttcaaaactagataaactagtttacttgaccgaaaggctcagtaaattaaaacttttatgggacaaggtacagcttctagattcaggtgattcgttttaccatcctgttttcaaaatactacaaaatgatattaagataattgagttgaaaaatgatgaaatgttttctctcataaaaggactcgggtctttggtaccgttgaataagcttagacaagaatcgttgcttgaggaagaggacgaaaacaatacggaaccaagtgacttcagaactattgtagaagagtttcaatccgaatataacatttctgacatactttcctaa

SEQ ID NO: 78044 - DNA, 1521 bp, Saccharomyces pastorianus
atgcctaccttgtatactgatatcgaaatcccacaattgaaaatctctttaaaacaaccgctagggttgtttatcaacaatgagttttgtccatcatcagatggaaaaaccatcgaaactgtgaacccagctactggcgaaccgataacatccttccaagcagctaacgaaaaggatgtagacaaagctgtgaaagctgccagggctgcttttgataacgtttggtcgaagacatcttctgagcaacgtggtatttatctttcaaacttattaaaacttattgaggaggagcaagacacacttgccgctttagaaactttagattctggtaagcctttccattccaacgctaaacaagacttagcccagattatagaacttacaagatactatgcgggggcggtcgacaagttcaatatgggtgaaaccattccattgacttttaacaagtttgcatatactctaaaagttccttttggcgttgttgctcaaatcgttccatggaattatcctctagccatggcttgtagaaaaatgcaaggtgccttagcggccggtaacacggttatcatcaaacctgctgagaatacctctctatctctactttattttgctactttgattaaaaaagcaggttttccacctggtgttgtcaatgtcattcctggttatggttccgttgtggggaaagctttaggaacccacatggatatcgacaaaatatcttttacgggaagtactaaggttggcggctcagtattggaagcttccggccaatcgaaccttaaggatatcacactagaatgcggtggtaagtctcctgctcttgtatttgaagatgcagaccttgataaggctatagaatgggtagcaaatggtattttttttaattcgggacaaatctgcactgcaaactcaagagtttatgttcaaagttcgatctacgacaagtttgttgaaaagttcaaagagactgcaaagaaggaatgggatgttgcaggaaaatttgatccgtttgatgagaaatgcatcgttggtccagttatatcaagtacacagtatgatcgcatcaaaagttacatagaacgtggtaaaaaggaggaaaagttggacatgttccagacctctgaatttcctgttagcggagctaaaggctacttcattcccccaaccatcttcactgatgtaccagaaacatctaagttgctgcgtgatgaaatatttggcccggttgtggttgttagcaagttcacaaattatgatgacgctctgaagctggctaatgatacttgctacgggctcgcctctgcggtcttcaccaaagatgtcaagaaagcgcacatgtttgctcgcgatattaaagcaggaactgtttggatcaatcaaaccaatcaagaagaagctaaagttccttttggcggatttaagatgagcggtattggtagagaatcaggcgacaccggcgttgataactatttacaaataaaatcagtccatgtggatctttcattggataaataa

SEQ ID NO: 78045 - DNA, 1521 bp, Saccharomyces pastorianus
atgcctaccttgtatactgatatcgaaatcccacaattaaaaatctctttaaagcaaccgctagggttgtttatcaacaacgagttttgtccatcatcagatggaaaaaccatcgaaactgtgaacccagctactggcgaaccaataacatccttccaagcagctaacgaaaaagatgtagacaaagctgtgaaagctgccagggctgcttttgataacatttggtcgaagacatcttctgagcaacgtggtatttatctttcaaacttattaaaacttattgaggaggagcaagacacacttgccgcgttagagactttagacgctggaaagccttatcattcaaatgccaaaggtgatttggcacaaattttacagcttaccagatattttgctgggtccgctgataagtttgacaagggtgcaaccataccattgacttttaacaagtttgcatatactctgaaagttccttttggtgttgttgctcaaatcgttccatggaattatcctctagccatggcttgttggaaattgcaaggtgccttagcagccggtaacacggttatcatcaaacctgctgagaatacctctctatctctactttattttgctactttgattaaaaaagcaggttttccacctggtgttgtcaatatcgttcctggttatggttcacttgtaggccaagccctagcatctcacatggatatcgacaaaatatcttttacgggaagcaccaaggtcggtggatttgtgttggaagcttccggccaatcgaaccttaaagacgttacactagaatgcggtggtaagtctcctgctctcgtatttgaagatgcagaccttgataaggctatcgattggatagcagctggcattttctacaattcaggacagaattgtaccgcaaactcaagagtttatgttcaaagttcgatctacgacaagtttgttgaaaagtttaaagagactgcaaagaaggaatgggatgttgcaggaaaatttgatccgtttgatgagaaatgcatcgttggtccagttatatcaagtacacagtatgatcgcatcaaaagttacatagaacgtggtaaaaaggaggaaaagttggacatgttccagacctctgaatttcctattggtggagctaaaggctacttcattcccccaaccatcttcactgatgtcccgcaaacatcgaaactgttacaggatgagatatttggcccggttgtggttgttagcaagttcacaaattatgatgacgctctgaagctggctaatgatacttgctacgggctcgcctctgcggtcttcacaaaggatgtcaagaaagcgcacatgtttgctcgcgatattaaagcaggaactgtttggatcaattcatctaacgatgaagatgttaccgttccttttggcgggtttaaaatgagtggtattggtagagaactggggcaaagtggtgttgatacctatcttcaaacaaaagcagttcacataaatctctctttggacaactaa

SEQ ID NO: 78046 - DNA, 1653 bp, Saccharomyces pastorianus
atgtcattcaagtttctgatagaatcgctgcttctcggttcaataagcggacaaatacggtgtggtagatcttcggtgatcccccgtggcgatgtatcttatgggggagacgatactgacgaacttaacatggatataatgttgtttgcgtttggaaccttaatcgtggtctacatcgtcatctgtatcgtttatttttttacaaaacagatagctacgcggcttataactgcatattataatgagcatggccctggccaaagaatatctttattcagcgattatgacgaaaataatgcacacgttcatagcagaaggttaatggaaaacatgagtttaaggtggcccagcaatcttgacgatgctgatgaagtaagagataagctggcacagttgtcacctgaagagcagttttattataagcaaggtgaggagtatatcaagcagaacccaccatttctgcttaaccagggacttttacaacagtccgaagatagcaatcgagatgccacccgtgaagaccctattatgaacgagcaaacaaggcaatatattcaagaagagggggcttatgcatgggagtttagcccaaatcctgatatgccaaaccatactgtcatagtggaaaataaaacagaggtttcttttctaaattataattatgatgcttctatatccacaaatctacccattccgtgtataaataaagtatattattgtgaattcaagatatttgaaacggatggcccactaaacagtgatgaaaatgtatcgaaaggtgtcatctcatttggtctttccacacagccttatccatatttcaggttaccgggaagacaccaccattcgatagcatacgattctaacggcgccagaagatttaatgactccttcaagctaaatgagcaattaagaacgttatttccacagtgtgaaaagggagacattgttggcattggctataggtcacgtagtggaacagtatttttcaccaggaacggaaaaaaactaaatgaaaaatctgttggtggtcatatccgcggctggaaattccaatacctatacccgatcattggctccaacgtaccttgtcaaattcatgtgaatttcggcacttatggctttgtttatatagaagcaaacgttaaaaaatggggatacgcaaaatcaaacggcatcaaattacctcctccttcttacgaagactacggtaaagataccctattagaaagcggtggtgaagacaatgatttcgacgaagatttttcagacggtgatagcgacaatattgcggctggtagtactacaaatctcaatgatgatataattataagaaacggtgaaatattaccgacaccacctggatttgaattcactatgtcccctcccactggaaagaagatcattaatgaggaaattaatctagattccttacctatgctaccaccaagttactcggacgatgaacatcattcgaaaaatgataaatcagcaataagcggacgaattattggaacgagcagaaatttaattactgatgaagcatctttcgatagtgttgataatgataacgaagatgaaaatgatcacgagagagatcccgaacaattttcagaatttgatgattacgaaagcaggatgcatggcatataa

SEQ ID NO: 78047 - DNA, 1008 bp, Saccharomyces pastorianus
atgggtttatttgataaagtgaagcaatttgctaacagcaataataacaacaatgattctggcaataacaatcaaggcgattatgttaccaaagctgagaatatgatcggcgaagatagagtcaatcaattcaaaagcaaaatcggagaggacagatttgataagatggagtccaaggttcgtcaacaattttctaatacctctataaatgacaacgactccaacaacaacgactcatatggttctaacaacaacgactcatatggttctaataacaacgattcatatggttctaacaacaacgattcatatggttctaacaacaatgattcatatggctctaacaacgatgattcctacggttcttccaacaaaaagaagagctcttatggttccaacaacgatgattcatacggctccagcaacaacaatgactcttacggctccagcaacaacaatgactcttacggttccaacaatgacgactcttacggttcgtcaaacaagaataagagctcttacggttcttctagcaacgatgattcttacggatcttccaataacgacgactcttacggttcttccaacaagaagaagagttcttatggttccagcaacaacgattcgtatggttctaacaatgacgattcatatggttctaacaacaacgattcatatggttctaacaacaatgattcatatggttctaacaacaatgattcatatggctctaacaacgatgattcctacggttcttccaacaaaaagaagagctcttatggttccaacaacgatgattcatacggctccagcaacaacaatgacttttacggctccagcaacaacaatgactcttacggttccaacaaagacgactcttacggttcctctaatagaaacaagaactcctatgggtcttccaactacggttcatccaacaatgatgactcttatggttcatctaatagaggcggtcgtaatcaatacggtggtgacgacgattactaa

SEQ ID NO: 78048 - DNA, 207 bp, Saccharomyces pastorianus
atgaatacagaccaacaaaaagtgagcgaaatatttcagagctcaaaggaaaaattgcagggcgatgcaaaggtagtgagtgacgcttttaagaaaatggctagtcaagacaaggacggcaagactaccgatgctgatgaaagtgaaaaacacaactatcaagagcaatacaacaagctcaaaggggcggggcataagaaggagtag

SEQ ID NO: 78049 - DNA, 240 bp, Saccharomyces pastorianus
atgtctaacatgatgaataagttcgctgaaaaattacaaggtaacgatgattcccatcagaagggaaagaacgccaaatcctccaacaaggaaagggatgatatgaacatggacatgggtatgggtcatgatcagtccgaagggggaatgaagatgggccatgatcaatctggaacaaagatgaacgctggcagaggaattgcgaacgattggaagacttacgaaaacatgaaaaaataa

SEQ ID NO: 78050 - DNA, 4236 bp, Saccharomyces pastorianus
atgagtgggcatgattctgttacaaaaatatctcatatcctgaatgaaccggttaacgaaaaggtaatggtacaaaacgggttccatgaaaactctaaaattgcagacatcgaattagagatacaggagcgaccttcgattaaacaatgggaatcgccggggagtgctgtaattcctacttcaaatcataattttagcccatttctctatacgcaatttaaatctcgtggtgcagcaccgtttgcacctgaaacaataaaatctgtagatttagttgagctaccggaggatgtacccgcaagagtgtttcatgaaaagacgggtttattttatcaaatatccccacactctattccaacatttattttagccaaaaaagaactcccggaccccataaaattttatgagttagtggaagacttagggtcagtttatggatgtgttaagttgaaaattataccagatgctgacaaatttactcaactaaatgttgatgtagatcgcctctggtttaaagcaagaaaacaatctttcaattcgaatgaatttcaaagaaccaagatagttgatttttatgcgaagttgtataattttcacaataaaatcaaaaagagtactctcacaaggatcccaagtatcgataaacgcaccttggatttatatagactgaggagttgtgtgaagttgaggggaggcttcaatgctgtttgcgaaaaaaaattatgggcgcaaattggaagagaattaggttattcgggcaggattatgagttcgttatcaacttctttaagatctgcctatgcaagaattttattagactttgacatatatgaagaagaagagcaagctgctcgtaataacgaaaaaaatgaagacatggtggaatctgaaatatttcgtcactcaaatagcagaagtagggacgaagaggagccacttcataaaaaagccaaaatacaccgcgatgtctttagagccggatcgattaatcatgaatttaaaagaatgcgggacataaagcacataaaagggtttccgacttattttaactcgttaactgagtttaaactaggctatacacagtcaacagagaccacattaccgggctatgattttactttctgggagaatggtatggaaatatacgataaaagcaaatacgaaaccaaaacctctccagtatacaatttgagacagtattacgaaaaaagtctggctgttttcactgctattgtagcgaaatttgggagtagctatcctgatttgtttacgaaacacacaacattacctcaaaaggaattcgagaggttatactttcatttgctatcggagcactttatagatttcgaaattgacaccggtcttggactaccctgttccatgagatcaccaggaaacaactcgtccaatgaaaagttcgccattaagaatattctagaccagtggaatttagacaacattcctctcaatgaactatcgcttttacaacaccttgatctggatatggccaattttacgagaaccacttatgatattggaatgttattttcttgtcaaggttggtctgtttcggatcattttttaccttcaattgatttcaatcatttaggttctaccaagttggtgtacagtattgcgccgaaggatatggaaaaattcgaagctttaattgctcgaggaaaaaaagaatgggatacaatccaatcaaggccgcgctactccacctccgatgacgaattaaagagctttatagaaacagatttctacaagtcatttttggatgcagaacaatctgctgactattcaaacactggagataattcaaaaaattcatttccagaagataagatagcaggaaacactctacatgatgattcacaaagcgacttcatatttgagcctaatttcatcttagccaatggcataaaactttataagacgacacaggagcagggctcatacatttttaagtttccgaaagccttcacatgttctatcggatcaggtttctatctatcacagaatgcaaaatttgcgccaagctcctggttgagcttcagttccaaggcagcaaaatggacatctaagatggggtttcttcccggtttagatgtaaatcaattacttatcaatgcgctactaaactccaataacccagttttaaggaaaaaatgccgtgatttaataagtaactacgtcgttgaggaagcagaaaacagcaaaaaattaggggagttgattggcactgtagatgtcgtttataataaattgaattatatttcagaaattagtttagagtcaactggtctttcaaaaatcgttgttacacacggtgcattgcaacgtaatttatctctgaaggaattcgtggtattgctagaaaaaccagaaaacggtgctcatagtatatgtggcatcccaatacgtgatcaatctggtaatctcaatgtttgtttgcactcatactttgatagcgcaagcctaggaattgctctcgatggcttggacaagcctccgacttcttatctgcttgttcacaatgaagattttgaaaaaaagtgggacgtgttaatgacttctacttttacaaatagaactgtgccattaaatataatacagtatttgatctctcatactgatagtaatactgagtttaatcgaatgttacgctccaattttgatgattcattactacttattgagaaatgtagaaagtttattaagaccttcgtggatgtttcctgttctgttaaagatgtagatttcggaaacggtttcaatttacgtcatctaccgcttaagttttctgacaacatggctgataatttggagagcttgtatgaaagtgtgcggaagtgctcaattgaattttcagaaaagccgacaattatcagactgtatcacgtatctcggcagtttcctatcgataatagagatattattgatggcaataatctagatttgcttaaggaattatatcagaaatcgttaaccatcccgttgaaggtttcttattggactaagttgaccagaaaaatatgtaggcttgaatggttatccgtttatgaacatatattcattgagcgatgtgatattaagagtgaagatcctgcgaaatattcacttccactgttatattcttacttcgaatttggtttgaaatattgtgattcggaagatatagataagttaggggaagtgagaaagctgattttaaaatatcaggacatgatgcagaaagttcgagtttttctgaaaaaggatccaccctcaaaaatatcgctaagtgatttagaagacgttttattagatatagaagaatatcggttacccatacaaagtagttttttcagtgagcttgattatgttattagagaaattgaaaatgcaaaaaaaatgaacgatgtgaatattctttataacactgataatattgataaaatagacgaactcatcaggaaaaatgatcctaaatttgtgaagtttgcgaaccagtttaatggttcgagattagataagagaccgctggccagtgataattcaggatcagttaaagccaaacaggagttaaaagttttcaaattatggaaccagcacttggatcaaataatgcaaaaaaataaatttattgagatactgccgtcgatttttagatgtttagatttgaagtcagacaaatacattcctttggaaagtagttctaagcgccaaacgaaatattgcttttgtagaagggttgaagaaggtactgcaatggtcgaatgtgaaatatgcaaggagtggtatcatgtggattgtattagcaacggtgagtgggttccacctgatgatccaaacgttttatttgtctgctcgatatgtacaccaccctgtatggccgttgacaatatcgaaggtgtgacttttgagcttgacgacttgaagaggatcttagtagaatctttgaagctaagtttaattccagatccccctatcttgaagaatctctttgacgtttttgcgtttgctttgaacttcaaaaatgaaatggaaaaagaactatttactaacggttatgtaaatcaattgtcctctacgcacaagatcaagtattacttgagaaagttaaaagggtcacaatgcggctttactaatctgacggatcccttaaggaaacattgtcaggtgaaagatgcagaagcaattaaatggctcacagataatggaagaaccataatcacaggaattccaaattga

SEQ ID NO: 78051 - DNA, 1533 bp, Saccharomyces pastorianus
atgttaagaatctgcgtaaaaaggccctgtataaagatcgttctttcacaagtacgtccagcattactagtaaggaaggagaatctccacataagtactggagtaaaagttgaaaagagcagtataataaaccaaaaggaccctaataaagtacgcgttgagataaacgagttaaagagacaagctgaaattgaaaaggctgcaataaaggaattggagaaaaatcctcaataccaaaaattagctgaagcattcaacagtcatgatcatgttcatttacgtgaatcagagaccgagcaaaacgacataatttcattgggcacgatacgagactacaaaagcagtaaatgtgagcaagctgataagccttcgtcgttgaatctgcattcgcatacacattctcatggacatacgcattctcatgctgctcacaatccattattagtacttagtactgagcaaattaggaaaaatgcaggcgtaagaatcacatgggtcggcttaggtgtaaacgttggtattgctataggtaaattttttggaggtatcgtatttcattcacaagcgttgtttgcggatgctatccacgcaataagtgacatggtttctgacttgttgactttgctttcggtagggctagcagccaacaagccaaccgctgattatccatatgggtatggcaaaattgaaactgttggttccttggcagtttcaacaatattagccatggctggtatatctataggttggagttccctttgtgcactcgtagggcctgttatcccacatacaatcattgacaccataggaaacttaggtcatgctcatacttattctgaagacattattgaagacgttactgatatcaacgcagcctggattgccgccgcttccattgcggctaaagaatggatatttagagccacaagaaagattgctatcaacactaattcaaatgtactaatggcaaatgcttggcatcaccgtgttgattcattaacttctcttgttgctctggttgcaatcagtactggttatttggttaatatacaatcattagacacgattggtggtttaattgtttctggtttgattatcaaggctggtggcgagggtatgtgcatcgcaataaaggagttaatcgatcagtcagtttctcgtgatgatccacgctacctagagatagaaactttggttaaagatacgttgaacaaactgatctctaataataattctcagaaaccctatggattgaaagaactgacgttactgtcctcaggaccgaatttacgcggacatttaaccttggaagttcctttacaaaaatggggcaatattttaggtgttaacgagtttgaaattgtgacacatcatttacgtaatgtgctaaccaatgaagtatcgaatttgagaagactggatattgaatacgtggaagaaaaaaatggtgaggaaaatgagcatatcaagggacaacaaaactacaaagaagatgttcttattaagcacaaccatacgaatactcatatttga

SEQ ID NO: 78052 - DNA, 825 bp, Saccharomyces pastorianus
atggtgaaagtaactgcagcttgtatcataattggtgatgaagtgctgaatggaaaagtagttgatacaaattccactttttttgcgaagtattgctttgatcatggaattcaattaaaagaaattgcaactataggggatgatgaaacccagatcgtagatactgtgagaagattagtcaaaaattatgattttatcatcagtacaggtggaatcggccccactcatgacgacatcacttacgaatgtatggcgaaaagctttaatttgccttgtgaactagatgaagaatgcaaagaacgaatgaggcataaatctgaccctgaagcaaggcttgatgcagatgctctaaaggcgcattaccaaatggcaaccatgccaaaaggcacaaacgtcaaaaattattatgtgtgtgatgacttgtgggtacctatttgttctatatctcacaaaatgtatatactacccggtatccctcaactatttgcaaggatgctgaaagcgttcactcccacgttgaaaaaaatatataatttggacaaggatccacgtgaatatgttcgttattttgtcagaacacacctaactgagtctcaaatttctaaagagctaaagttgattcaggatgaatcaacaaaagtttcagaagccattaaaataggctcatacccacattttggtatgggattcaatacaattagtattttgggtgaaaagaaagacgattcatatctgaagagtattgtcaatagagttgttaataacctcgagggagaagtaatttcttctgaacttgaaaacaagttctcgaaccaggagagctga

SEQ ID NO: 78053 - DNA, 2277 bp, Saccharomyces pastorianus
atgtctgaactctctcaaatgacattgaagatcctttacacattggataatggatccaatggtagttatttagcccgctcaagggctccaaaacaggtaagagttgctaatattcctagtccattcccgacagattcgaatgagcaaacggagttgcgaattggcgccatccatttgaagactatactgcatgaaatatacttaaattcacctgaagtgttagaccatgacactttaaaagatggatatgattataacttgtattatcgtgacatatgtgaagtggatgagccattagtaagccttggtcttctttccgggcttcgaaaaaagtttcataagaatagcccctaccagtatacagaaaacaatattggtgaagaagaaagtgaagagagagatgaggtaactgaagaagagtatgaagatgaatcttttatagttactggaagggtatgctcgaatgtttcggctttactacgaagatcatatagcaacatctcgaataaaaagggaagggtcgtaaacaaccaaattccggaagaaactttggaggttaaactaagattcacaaaagttataaccaatttaaggacgtctggtaacaatactacaaattctcggatatcgtgtcttcaaatgccgtcttctttaccatcatcaacacttccgtttgccccaaaatcgcaatctcttttcaagacaaaccaaataaaaaattcaaggaatgcaaggaccacgataacaataaataatactaatagcgggactgtgggaagaagacagacgaatcctatgcctgctccaaaagctgtcagaactcagtctttacccatctggaatcttaaaccaaatatagcgaatactggtttcccaagaaattcaattgcgcacaaaatctacttagcagatagaaaaacagaagccaatcaacaaaacaaccagcatcaaaacatagcttacgaaataaatactttgcaaaacgataatactattcagaggaccaagatcgatgattcggtaagcaagaggttcgattttatgctcaacaaaagaaagtctacgaaaaaagtgtcacctggtatagcaacgatagcaaaaaaaccagcttcaataaacataaatccaaagcaaccgccgaagactagtggtgaaaaaaaagcaaatgataagcaaacgattgtcaaagttaagaattcgaattccaaaaattcggctaagtctacacaagcaggatgtaggcgatcatcagtggtagaacatttaaatgatcatgacgattcaattttaagtgacattctatcggaaccaggcattgaagggcagaaattgcagcaaaaacaaaaggggcgtaagatatctttaactagtgaaaatgataaagaaaatattccaccccaaagcataactagtaaagagaacaagcttgaaggtgacttggattttaacgctgagttccccatgagtgacttttcggatgtagtatttaaagatgagatgggatggttttccaatttcaattgcaatttttttgaatcaccaacttctgcaagtgcatcacaactcaatcagcaaaatttgaagccttctataacactcaacgatccaaacacctgtaacaccattgctctcgaaaatgaagatgtcagtgaattggaaacagcgcaaaataataaaatatctttgcctagcgatgttgacaaaacctccccaatagactcgttgtctatacctttaattgaacttacacattcaagctcgacaacaaacatgcagcgtatatccattaaagaaggatcgacactaaatacaacagatagtaataatgccaccccatgtgataatgatataaaagatagaaaggcatctgtaatagattcggacaatacaaaacctcaggcagggcttataaatttctctactccagctgaccagccagcttctgataataatgttacagcttcgaaaaagcttactagcatgctggaaactcagcaaagtaagagatctcatgaagaagttttggatgaagaggaagaggaggaagccctcaaaaagcaaaaggcaataccgtcttcaccatgtgggatgttcaattatcatcaacccatggaattatctgaggacatagttgaagaagagcaaggacacaatatcggcgatgataatgaaagcgataagaccaacgatttattctcaacattcgtccattccggaagaagagtaagtcaggtagtaacaagtcccatcggtgaatttcagtccataaaacactga

SEQ ID NO: 78054 - DNA, 963 bp, Saccharomyces pastorianus
atgtctgaccaacccgagactccttccaatagtagaaattctcatgaaaatgttggcgcaaagaaagctgacgctaatgttgcctcaaagttcagaagcttgcatatctctgaaaccactaagccattaacatcaactagagctttatacaaaaccacaagaaataattcaagaggtgcgacagaattccataaacatgtttgtaagttagcatggaaatatcttgcttgtattgataaatcgtcgatatcacacattgaaatcgaaatgaaatttggtgttataacagacaaaaggacacatcgcaggatgacaccacacaacaagccctttattgttcaaaacagaaatggccgcttagtgtctaacgttcctgagcaaatgttctcgagtttccaggagctactccgctcaaaatcggagaatccaagtaaatgtgccccaagagtagtaaaacaggtacaaaagtatacgaaagattctatatataactgcaacaatgcctcgaaagttggcaaattaacttcatggcgttgttcggaagaccttagaaacaaagaacttaaacttacttacatcaaaaaggtccgggtcaaggattttctcattcgctatcctcaaagttcattagacgctaaaattagcatcagccttgaagtgcctgaatacgaaacttctgccgctttcaggaatggctttattttacaaagaaccaaaagccgttccacctacacctttaatgataaaatgcctttacacttggatttgacaaaggtcactaccacgcgaaggaactcccatcaatacacgtcccatgaagtggaggtagaaatggatcctatattcaaggagacaatttccgctaatgatagggagaagtttaatgagtatatgtgctcgtttttgaatgccagcgaccttatacgtgaggctgcagaacgcgataacatgttaacgacatga

SEQ ID NO: 78055 - DNA, 465 bp, Saccharomyces pastorianus
atgactccacttttgcaggcggaagcaaaaatgaacacaagcctctaccttacggaaagcatccaacaacatgaattcaacctcaccagccctcagtcattctattcttctccctcggtacccaatagtaaaaataactcgggcattttcagctataacactgccaacaacagtagggtgagttctagtgatgaattcactacccaacaagatggcatgaacaccataatgtacaaaaacaacatcagtaaaactttcgaagacgacatcttttattgtccaagaagtttgctcaccccagaagaacaagtggtataccaggaaattgacaagtattacatggaacaagcactattgacccagttacaaatctcccaaacgtattcctccactcctaaagaggaaaagatagttaagttcaatccctacacttcgaagagtttcagtccagcttcttctgaataa

SEQ ID NO: 78056 - DNA, 636 bp, Saccharomyces pastorianus
atgagaggaaaacaaccgaaaaggaacaaagacaacgcttctgtcaagagaaattatagatgcgtgggatatcctgattgtaacatgagtttcaatagggccgaacatttggctagacatatcaggaaacacacaggggagaaaccattccaatgcaatatctgccttaaattcttcagtagaatcgataacttaagacaacatcaatcttctgttcactcggacgttgatttgatgtccttacgtagactgcagcagtccgcaaatagcactgcgaacgaccctaacgcaacaagaatgttcccgcaattacgcccatatggaattgttgtccagcccgcgcctgttccatacaatctgcccatatcaactcctgctagcccacaaaacactatatctctttacgcaccaccatacttccctcatcctatgccatctgctcccataccattgccgcatcagcctcctccactgccaatatacagctatatgcaaccactcttcctgaaccacactcccatacaaaaccacaacattgtagagctccctccagatagcagtgacactccagcatcgccgtctaaggtgcaaagttttgaccaggccaaggacgcttcaccaaacgcaaaaaaataa

SEQ ID NO: 78057 - DNA, 87 bp, Saccharomyces pastorianus
atgagaaaaccgagtgcgtttcatgcatgtgacatgatatttcttcccctcgttaagtgtgcatcagcaaccataatgctgaattaa

SEQ ID NO: 78058 - DNA, 597 bp, Saccharomyces pastorianus
atggctattaaaccaaccaaaagttttcagaattgtctagaagctgaagtgcctggttataacgactgtccgacagttttgttttctatcgaccctaatagcggacctagatccaaatctaaacaaagaacgaaatcgaaaagatgtgctagcggcagacttgccacagaagtgttagatctttatgggaacactaaaacagctactacgccgccaccagttttgaagaggccatctgtaactgctgctcaacaagaatctgcctgtgaaggtgtgctcgtaaaagaccaaggcgatagacagctccagccgatattatgcagtaaagaagaattagtgactaagatcaacgacctctgtgtgtgtggctcgaagctctcttcgaaggagttggaattttacaagaaaaaattagattcaaacattaccaagattttacaaaacgagcacaccaaaacagtactatcccagattttcaatgaaaaagacaaaaatatggccgtgaaaaccgttaaacattggatggttactgacacaacaatctcaaattggtgtcccgcattcttaaaaatttttgaaaatgcgatgcctaattaa

SEQ ID NO: 78059 - DNA, 1296 bp, Saccharomyces pastorianus
atgaccccacctcatttttttttatctctcataaaaaaaagatgcatatgctggatatgtttggaagaatccacatatgactctacatggctacagcacacgtgcggttgcaacttacaaattcataaacgctgctatataagatggctctatcaaatgcatgttgaactttttcttccgaacacagtggacctaccaaaggatgctgatttacctataatcacctgtttaaaatgtctcgttgatgggcaccatgattttatgacgactttctctcttacagaaatatgggaaactcgtcccatttgggggcaaaaatcagtaccgtttcaaaatgactacgtgttcaatctaatgtctctttataccaaacgggataatcatccaccttatgtgttagtgaaatttggcgaatgtcctcaatgcaagaaaacaaattttataaaaagacctacagtaaccatccagtctcctgtactatccttgttttatcagtggcaaaaaattacacgatacgtgataccattagggataactagtttatttcttttaaaccctgaaaagacaagttttgacattggactatggcaactacgctgccttttccctgagaatgttctacgaaatatgttaaacatcagcactaccaaggcattggacgtatatgcgcaaactgaacgtggcttattaagcattcctttaacctcctcgatcataatatatgggttcatacattatcttagcaacatttctaacgtcagtgctaatgcaatactctttaagtgggtgtatctcagtattgtaaaaactgctggaaacaaatattacaagggtataggtttacctaaaataattttgtactctaacttggctacattttgctataattttacctttaaaagattggttgacttaatttacaggaggctgatcaataaaggaggtaagtatttgtatcacggaaattttgaaaactctagtaatagcgttccagctgaggaattttttatcaggcggaattggtatgctattcttgcagaaaagatactatggccctttgttggtaaatgtacaggaggtcttctattggatgcttttctatggatacagagaaagtttaaaattgaatggacgccgaattgctccccttcggaatttagaatgattttcaatattataggttgtggtactgctgctataggctggtcaagtctgaagctctatgccagttacaaaagatgtcaggaacttgaaaagatcaatgaatttattgaacaaagttgcaaaggtgagtaa

SEQ ID NO: 78060 - DNA, 681 bp, Saccharomyces pastorianus
atggctcgccaaaattttttaggcttggtcgtctcccaagggaagatgcaaaagacggttaaagtacgtgtagaaacaaaagtctttaataagaaaatcaacaaggagttatttcatagaagagattatttagtgcatgatgaaggtgaaatatcaagggagggtgatttagtaaggatagaagcgacgaggccgctttcaaagaggaagttttttgccattgcagaaattattagaaacaagggtcaacaatttgcattatacgaatcagaagctcagttaagcgttgcaaaagaagaagcccaaaaggcaagagaatttttggataaaagatcagtgagggagaataaactaaatgaaaaaacgacccttttacgtgatattaggaccatccaagatgctttatctagcgggtcaacgccgaaagagttattggagattaaacaaaggtacggcattcaagatttttcacaagaaacagtgaggcaacttttacagttagacatctctggattggaggttaatttggagaaacaaagaagtctcattgatcgtattcaaacgcgattatccgaattgttgtcgaatggtgttgaggatcctttgaccttgaaaaaaaacatccaaaaaaatttgttaagaaagcacgtcatgatggatatgcaacaaccaagccagtaa

SEQ ID NO: 78061 - DNA, 1377 bp, Saccharomyces pastorianus
atgatcacccagcctgctatgtgccctctattgatccgtatatcagcttttagatcaggctcgagtttcttgttatatgtgcattgcaaaagcataaacaaatcctggcagccgaagccgggcaatccacttcgaaacgcacggctgaactatataaatataaaggacatgtggagagaagcttctcttccttcacatttcgcatttcatgatctaaagtggttctttcacaatagaagagcaccaacacgaaatatggctgtcggtggtaataactggagcatgtggctgcgaatgtcacgggtccacctcaggcagatcacgaagtctctggaccgaacgctgatcagtttaagccatgggaatttttcccaccaatataatcacaatatttttatcacttggtggaagagcctatttgaggcttctacagcttttaggagggcaagtggtttaactgtatctcctctcacgaggagaggaatcgcaaggtttgaccatttcagacctgttgccaatgtcagtaaatttgcttcttttcccagagtgcccaaaggagccccaaggggcctttttaccaactggaatatgactacatcaaagagattattagggcagagagcttattcgacttccagtatcaaatttacccaagaagccgtgaataacatgactatatctttgaggtgttttttcaactcactaggcggattagatcagtgctcccactctaattcctgcaaagcttatcagaatgcgtctaatgttacctctaaacagaatcacgtccaaccagttgcccttaagaagttatctcaaaaggatatcaatttcattcgtgatttagaactatttaagataatgaagacccagaatgaagtcgttgatgaaacaagcgcatattacatggaaaaaccaggttcctatattgaattcaccatttcagaatttaacgttaatgggacattctccgtacctttgtcatttttagatccttctttgttagcggatttggatgaaatgattagaaattacaaatacgaattaaaaccaatatacagtagtgttgacatgatcttgcagaattatggatcattgccgataacttttcatcgaaataagattcgaatacattttccaaactcaactgtggtggaaacagaaaaactaattgcaggtctgaatattgctacgggtgttatttacgcagatacgtctcccgatatcagtctagaaggtacaaatttgaatgctctggttaatgttgacaattcaggaagcgtatggtcttttgttaatgagccctcgtttccctctaggagcgctttttcacctattttatcagatgcatcctatgatacttatgaattggtctag

SEQ ID NO: 78062 - DNA, 2163 bp, Saccharomyces pastorianus
atgaattcgaatgaagatatacatgaagaacgcattgaagttccacgaactccccatcaaacccagccagagaaagactctgatcgcatcgctctcagggatgaaatatcagtaccagaaggcgatgaaaaagcatattcggatgagaaagtagaaatggcaaccacaaatgcatccagtaactttggctcaaatgaaagtgcaaaagacggcgaatcaatcggcgccttttcaaatccccatgaggctctgatgcagtcaaaattgagagaagaatcccagagtaaaaccatactaccatccgatgacctcagccagcaattagaaaccgaagaatccaaagttgaagaggctctaaaaagaataacctcacccccattaccaccgagggctgactgcatagaagaatctgcatctgctcttaaatcctcattgcctccagtgctagcaggaaataaaaatgatcaaggcccccttgaccgaccacagttacctccgaggcaggtagttaatgcggaaactcttcatttgaaggcgccccatggtaatgcgaccccctccaaatcaccaacgagtgctgtaggtaattcttcttcatcgacccctccaaccttaccaccacgccgtatagaagatcctttagacttggctgctcaaaaacatttcctagcgagtacatttaagagaaatatgctcttttataaaagtgaagataactctatcaaatgtgatttggataaaaatatactaaatttaaaagaagattcaaaaaaaattaacaacaatgaaattcctgaagaggttagttcattttggttaaaggttatcggcgactatcaaaatatcttaataaacgatatcgaaaccttacatttccaactatctcgaggtataccagccgcttatcgattggtagtctggcagttagtaagttatgcaaaatcgaaatcctttgaccctatatatgaaacgtatctaacggaaatggcaccttttgacgtccaggaatttgaaaatcagctgaaaatgatggacgaagttccctctgaaaacgtaaaacgcataagtaatgtgttaaaggcttatttactttttgacccagagtgtgagttttctaccgacattgcttatattatcaatatgattcttgacgtttgcgaggaggaggcaaatgcatttggtctacttgtacgcctaatgaaagtttacggtttaagactcttgttcttaccaagtgcttctgagatcgatattctttgctataaatttgatagacttgtagaagaattttatcctgaaattcacaaccacatggttgaaaaaggcgtccgttcttccatgtttttgcccggtttcttcacgacactgtttcaaaagaaacttcccactgaaattcaaccacgtatcggtgatatggtatttttagaaggtattgactctattatgagaattttagccacacttttatctaattcccgagaccatctgttaaaaatgggttttgatgatatgctggagctattgaaatcaggtctgttagatgcttatattaagcagaatgatggtacacgcggtgacactcttctctcaaatgaatgtatggataaattactacaagactctatgatgaaagtagcaataaccccaaagactatgaagaaatattcttctgaatatgaggaaattcacagattggacaatgaaaaagaagtgcaatataagtctatcacggaaaaaaatttacatttacaaaagcatgttcgtaaattagaaaacgactacacatctttaaatagagagcatgtgacaattgcgaacgagttagtgaaaaatcggcttaatatcgagtctgtattaaatgaaaataatggttacaaacttcaaattttagatttgaagaaaaagttggattcagaaaaaaagaagcaagttttaggtgtatatgtgcccaatgatttaaagaaagatttggaagagacaatgaaaaagaatacccaagtaatggacgaaaatttgaaattgcaggataggatttcagaactagaaaggcttattgaagaaataaaaactgcaaacaaaaatggtacgttattcgaatattctaattctaaaaataatcctttgggagccggttggtcaggatttaaaaaggtttttaaatag

SEQ ID NO: 78063 - DNA, 777 bp, Saccharomyces pastorianus
atgcaaaaaattttcagaccattccaattaacgagaggctttacctcttccgtaaaaaacttcaggcaatggagactgattgaaacaaggaagattgccaaacaaccgaactaccaagttggtgatgctaaacctttacatatgccaaaagaaagaaagaaatttccagattacaagtatggggaatctaatatcttcaaacagagtaacaaaggtctatatggtggatctttcgttcagtttggtaacaatatttctgaaagtaaagccaaaacgaggaagaagtggttgccaaatgttgtcaaaaaaggtctctggagtgagactctgaacagaaaaatcagtatcaaaatgaccgctaaagttttaaaaacaatcagtaaagaaggagggattgacaactatttaacaaaggaaaaatctgcaagaataaaagaattagggccgaccggatggaagcttcgttatagggttttaaaaagaaaagatgaaatagagaatcccccacataaggatgcacctatcatagaaatggctggtggtaaaaaggccaaaatttactatgatgaaatagtaaacggctcaccaagaaaaatatcagttggaagaagaagattgatgtcatttttatatcctttagagaaattggaatataggtcagtagggaaggacctgaaccacaaaaaatttgtcgagttatttgccgacgttccagtcaaggatatcctagctagattagaggatcataaattcgacttatccaccatcaccgtataa

SEQ ID NO: 78064 - DNA, 225 bp, Saccharomyces pastorianus
atgttgcccgtcgctaatatttggcgacttttgcacgtgaacgacgtccccacaataaatttcgcaaggagcgggcgtgcgttgttaacgtcatccgttagcgagacttttacggatattacttttcacccatggggtgtatatgagagttcagaagagggtgtggagagacagaatattactgttctttttttccaagatattgagcgtttttttagttgttga

SEQ ID NO: 78065 - DNA, 381 bp, Saccharomyces pastorianus
atgtcttcaaactatgccactcctttagacgatgaggtgtttcccttatcttttgccaattatcaatttaccgagcatgtgtcacttggtgagcattattcactcaatacttcggaagatgccaaatataatttgaatggtcctttcgtggtaccgagagacaccgggaagttcgatttgaacacaagttctgcctcggacgagactgtgttctcgttagataaccctcaagaaaacaactacaaacaccaagccatgaataatgtccaggattgtcgcatgaccgtcgcggccaaaactacccagtcgtgtgataaattgaccgatctttatgccaatgccgcccaacaaaactacagattgtggctgtcttcattttag

SEQ ID NO: 78066 - DNA, 3267 bp, Saccharomyces pastorianus
atgaacaagctaagagacaaatttgtagattctacagtagaagaagaaagattgcgtgaaaatcgaaatcatgagaaaaactggtatcgttggggtccctacttgagtgaaagaagctgggcgacagtccgtgaagattattctttaaacggtgatgcttggagcaattttcctttcgaacatgccaatgcaagagtattccgttggggtgaagatggattatttggtgtctcagataacaaacaattggtgtgtatgaatgtcgctctgtggaacggtaaagatgaaagattgaaggaaaggttgttcgggttgactgggccacaagggaaccatggtgaggatgttaaggaattgtacttttacctggacaatactcccactcattcatatatgaaagctttatacaagtatccctttaaaaaggcctttccatacaaagaattggtgcaaaagaatggtgaaaggggatacgaggataaagaattcgaagtttacgatataggtgggctataccgtgatagtgaaaccggtgacaacccttatttcgatgttttttttgaaatggcaaaggatgacgaaaaccctagtgaactgaactttcggctaactatacataatcgaagtaaaatcgactctggtgagctctacatagctccccaacttttcttcagaaatacttgggcttttgacggtactagaacaaaggacaagcccttgcttgaaagagatgcagaagcagcgaacttaatcaatatgactcacaagaaatatggtaattgccaaatggtctttcagccatccccaggtgggttctcttccggtacaaacgaggaagaggaagatgaagaggtagaagatatagatcctctactgctatttaccgataatgagtccaatttagtaaaactatttaacgaagaaaagaatccttccgagtacacaaaggatgcttttgaagaatatcttgttcaaggcaaaaccgatgctgtaaatcctgaaaataaaggaacaaaggcctgcgcagtatatcacttcaaaaatattccgcccggagagtatgttactgtgagatacaaatttacaaatgacccaaaaaactctatctttaaggcacaaaacctggctgtcgtagatgaagatgagtttgatttgattttcgataacagagaggaggaagctgataacttctactggaggattacacctttgccaatcagtgatgaattaagaaaccttcaaagacaagctttttctggtttgctatggactaaacagttctacaattttacatatgatgcttggtataatggtgacgccaatgttaagcctcgccctccccctaatagagctaatggcaggaacaagaactggaagcacctttacatcgaagatatcttatcaatgcccgacaaatgggagtatccattttttgcttcatgggatactgcgtttcactgcattcctttagctatgattgatccagaatttgcaaaacggcaattggatttattaaccagagagtggtacatgcatcctaacggtcaaattccggcatacgaatggaacttcaatgacgtaaatccaccagtccatgcatgggctgtgtatcgtgttttcaagatcgaaagaaacatgtacaaccgtgaagatcgtacatttttagaacgagttttccagaagcttttgttaaattttacatggtgggtcaacagaaaggatactgaaggtaaaaatgtttttgagggcggatttttgggtcttgataatattggcgttttcaacagatcagaaccactacccactggcggtacgcttgaacaggctgattctacaggttggatggcctttttcagcctgcaaatgctaaatattgcattagagctcgccaaagaaaacccggtttatgaagatattgcctctaaattttttgaacattttatcttaatcagtgactctatgtcctttgaatacgctactgatattacaggagagaaatgtaaagaagttatcaaacaaaacctatggaatgaagcagacaaattttattacgatgccatctcttggggtgaccacaaggtgcaactaccaataagatctctcgtgggattgatcccactatatgcttctatgactttagagcctagtatcataaaacaattccccggtttcaagaagagggttgattggtttgtgaacaaccgtccagaaatctttgatagaaacattgcgtccatgtcaaaaaaaggagtgggagaaagactacttttatccctagttactaaggaaagattaacagccatactgtcacgtttgctggatgaaactgaatttttgtcaccatatggtattagatctctttccaaatatcatgagaagcacccattcgaaatgaatgtaaatggtgtcgaatatatggtcaaatatttgccgggcgaatcagactcgggtatgttcggcggtaattctaactggagagggcccatttggtttcctaccagctttttaataatggaagcattacaaaggttttacctgtactacggttccgacttcaaagtagagtgtcccgtaggttcaggagattatttgaatcttgctgaagttgccgaagaacttggatatcgtatgattcacttatttgttccagacgaaaacggggagcgcgccattcattatggtgatcactctaagtttctgtcttctgatccatatttcagggattatgtgccattttttgaatactttgacggtgatactggaagagggcttggtgcttcacaccaatgtggttggactgctcttgtggccaaatggataagtgatgtaggtatatcctgtgtaagactacctcgtacgccaagatcatctgtggcaacgaccgcttcaacagagagctctgagcaaggtcccaaaatgaagagaatggcaagacgtaagagtgcaaagtctttggtaaactacactgccaccattttggacttaaccgaagaagaaaagcgccatcataggatagggggcacccattctgggttgacaccacaaagcagcaattcaagtgacaaggctagacatttgatggaggaaatgaatgaagaggaaggtattcacgaaactgtggtacctgaagatcgtcacaactttgaaaccaagcttataggcaagctaaaagataaggtgaaaaatatgaaagtaactgacaaggctaaagatgaggctatagacccaatggacccgatgagtccgttgaataaggatgtgtcttga

SEQ ID NO: 78067 - DNA, 654 bp, Saccharomyces pastorianus
atgagttccctattaatatcatacgaatctgacttcaaaacaaccttagaacaagccaaagcgagcttagcagaggccccctcacaaccgttatcacagagaaatactacactgaagcacgtagaacagcaacaagatgagttgtttgacctgctagatcagatggatgtagaagttaataacagcataggcgatgcctcagaacgtgctacgtacaaggcgaagttaagagaatggaagaagactatacagagcgatatcaaacgaccactgcaatccttagtagactcaggcgatcgtgatagactttttggagatcttaacgcatctaatattgacgatgaccaaaggcaacagttgttgagcaaccatgcaatcttacagaaatcgggagatagactaaaagatgccagtagaatagcaaatgaaactgaaggaatagggtcacaaataatgatggatttaaggtcacagagagaaactttggaaaatgcaagacagaccttgtttcaagcggattcatatgtggataaaagtataaagacactaaaaacaatgactagaaggctagttgctaataaattcataagctatgccattatcgcagtccttatattattgattttgctagttttgttctcaaagtttaaataa

SEQ ID NO: 78068 - DNA, 1785 bp, Saccharomyces pastorianus
atgaataactccaaaattcctaaactttcctttcatagtgatccaaacaacgtcactcgagactttccaaagacaaaacgacagaaggttcagaaaagagaaatggatatgatactaactcctaataacaacaagctaaatatattgcacagctctggatctggtatacggcgctgctacactgatgacacctccgctacgtatactaagaaactaacctttgggggggaccccaaggttattgaaagggttaagaacaatgaacgtaaggttagaaaagacatagattcactactgaatgctatttctgaaattgaaaaggaatccgttcgtattcatgccagggaactacctgcaataacattagaattagatgcaaaagtcaaagcgtgcagggagctacaaaatgagattgatggactatcaacggagatggacttgaaggataatcaatgtgatcttcaaagaaagaatgttgagctatcatcaaaaaatatagtgtctatgcatgcagtaaaagtacaagagttcgaaaacgatttagaggaagagctatcgaatgccaaaagggagtggacgtataaattaatggaagtagaaaatttgaaacctgacgaaaggttaactgacgaaatgcgacagcttaaaacagaattcgaggaggtcaataggaaactattcattctacagaatgaaaatgagaacgagtgtaaaaactacaaaaaagaattggacaagaaattcgagatattcaagaaagttaagaacgatgctagaattgaattagatggggagcaagaaagactttcgaaagttttaaaagacctacaagacacccatggtgaactgaaagaaaatattaagacgtgtagagatgagtttaacgattttgaaaaaaggattggagaggcagaagtgaacttccatagcatggaacttgccgttgttcctctcaaaaagaagcttgcttctacatcacaagcattgacgcaagtgcaggaggagaagaagcaagtcgaaggagaagcaaacaattggaagaagaagtacgttaatgaactagaaaaggttcaacaggaattatacacacgacaaaatctggccacttcaattgaagaaatcaaaggatacacccgatgctttgcgtatgccaatgaacgacaaatgcctgatgaattccatatcaactatgtggatcggtgcatttgcgagaatagtggagaaaaacgggtacaagtatttgatagagtagttctcgaagaaatccataaggatcacaaacgcttatataacgaatgcattccgttcctggaaaaatacatcagcaagttaattaactgcagcattatagtggtttcgcagcaacccacagcaccaatgaaaaagactttgctaaaacagttaattgagcagtacggtgagaattataagatgacattgaacattttgcatcttgacggaagtattaaacacagtgacgttggattagataacccaacagaaattagagatctgtcacaagatgaagaatgcatgaacattttaactttagataccaagttgagaaaagatgaagagtcccattcaatgaatatatatatcggtagtatgtccacggtacagctgaatagagagcttgatgatgctccctcagtcctttcgcatattctcactaaaacaaagcagtgctttgtcttcaagattaacgctggtgaaaacatcgagaaggctctagccttagcgggaaagctgaaaagaacaataacattacctcagctagattaa

SEQ ID NO: 78069 - DNA, 1641 bp, Saccharomyces pastorianus
atgaaccactcagaagtgaaaactgggttaattgtcactgcaaagcagacatattacccaattgaattgtccaatgcagaactactaactcattacgaaaccatacaggaatatcacgaggaaatctctcaaaatgtgctggtccaatcttccaagacaaaaccagacataaaattgatcgatcagcaaccggagatgaatcctcatcaaactagagaagccatagtaacatttttgtatcaactttcagtgatgactagagtaagtaatggtatcttcttccacgctgtcaggttctacgatcgctattgctctaagagagtagtgttaaaggaccaagctaaactagttgtaggtacctgcctttggttagcggccaaaacttggggagggtgcaaccatattataaacaacgtctccatccccacaggtggtaggttttatggtcccaatcctagagctcgtattccacgcctttctgaattggttcattattgcggcgggtccgatttattcgatgaatcaatgttcattcaaatggaaagacatatcctggatactctgaactgggacgtttatgagcccatgattaatgactacattttaaacgttgacgaaaattgtttgatacaatatgaactttacaaaaaccagttacaaaataacaatagcaacggcaaagaatggtcctgtaagagaaagtcacaatcttctgacgacagtgatgccacagtggaagaacatatcagtagttcaccgcaaagtactggactagatggcgatacaactaccatggatgaagatgaagaactaaattccaaaattaaattgataaatttgaaaagattcttaattgatctgagctgttggcaatacaacttgcttaaattcgaattatacgaaatatgcaatggtatgttttctataataaacaaattcactaatcaagatcaaggcccttttctctctatgcccattggtaatgatataaactcaaacactcaaacgcaggtattcagcattatcatcaatggcatagtcaattctcccccatctttagtcgaagtttataaggagcaatatggtatagtacctttcatattacaagtaaaagattataacttggaattacaaaagaaactgcaactggcctctacaatagacctaaccagaaaaattgctgtcaattatcgttactttgaccaaaatgcctcttcatcatcagtttcttctccaagcacatattcttcgggaaccaattatactccaatgcgaaacttcagtgcacaatcagacaacagtgttttcagtactaccaacatcgaccattcatcgccgatcacccctcacatgtacacttttaatcagtttaaaaacgaaagtgcttgtgacagtgccataagcgtaagcagtctacctaatcaaacccaaaatggtaacatgccattatcaagcaattatcagaatatgatgctagacgaaaggaataaagagaatagaattcccaactcatcatccgctgaaataccacaacgtgccaaatttatgacgactggtatattccagaacacaggggaacttactaatagagcgtcttcgatatcgctatcgttaaggaaccacaatagctctcaactgtga

SEQ ID NO: 78070 - DNA, 771 bp, Saccharomyces pastorianus
atgtggtcgaaaaagtttacattaaaaaagctaatcttaggcgggtatttgtttgctcaaaaggtctattgtgaagacgaaagtaactctatatacggtacctggtcatctaaatcaaatcaagtgttcacgggaccggggttttatgatcccgtagatgaactattgatagaaccttcattgcccgggcttagctattcgttcactgaagatggttggtacgaagaagctacttaccaggtaagtggcaatcctcgtaacccaacttgccccatggcttcgttgatttatcagcatggtacatataacgtttcagaaaacggtacgttagttctgaatcctattgaagttgacggtagacaactattcagcgacccatgcaatgatgacggagtttcgacttattctagatataaccaaacagaaactttcaaggaatatgccgtaggtatagatccttaccatggtatttacaccttgcaattgtaccaatatgatggtactccaatgcaaccactatatttggcttatagaccaccaatgatgcttccaacagaaactttgaacccaacatcgtcagcgaccagcactgacgacacatcctctaataagaaaagatcactgagaagtttagtgaggaggagcctggaaaacagacacaagacgaatgccattaaaagacaaaatacctcatttttaacctccaatgccatttggtatatttctgcgggtatgctaggtgtaggttcattattatttttagcattttag

SEQ ID NO: 78071 - DNA, 1200 bp, Saccharomyces pastorianus
atgactcccgaacaaaaggccaaactagtatgtgtgaaaatgattctgtgtttgtattttaaccgtgggtttctttttactaacaatttaacgatgagatgggctgtgcaggaggctaacaggaaattagcaatagaacggttaagaaaaaggggaatactgagtagcgaccaattgaatcgaatagaaagtaggaatgaacctttaaaaacccggcctctcgcagttactagtggcagcaatcgggatgataatgcagcagccgcagtacatgtgccaaatcataatggacaaccgtctgcgcttgctaacactaacactaacactacttcactttatggtagcggagtagttgatggaagtaaaagggatgcgtcggtactcgacaaaaggccaacggatagaatcagacctagcataaggaaacaagattacattgagtacgattttgccaccatgcagaacttgaatggtggttatatcaaccctaaggacaagcttccaaattctgactttaccgatgaccaagaatttgaatctgagtttggatctaaaaagcagaagacactacaggactggaaaaaggaacaacttgaacggaaaatgctgtacgaaaatgcacctcctccagagcatatttcaaaggcgccgaaatgtattgaatgtcatattaatattgagatggatcctgtgctacatgatgtgttcaagttacaagtttgtaaacagtgttctaaggagcatccagaaaagtatgcactactgacgaaaacagaatgtaaggaagattactttttaacagaccccgaattgaatgatgaggatctctttcatagactagaaaagccgaaccctcattcggggacatttgcaagaatgcaactatttgttagatgtgaagtggaagcctttgcgttcaagaaatggggtggggaagaaggtttagatgaggaatggcaacgtcgtgaagaaggaaaggctcacagaagggagaaaaaatacgaaaagaaaatcaaggaaatgcgactgaaaacaagagctcaagaatatactaatagattaagagaaaagaagcatgggaaagcccatattcatcattttagtgatccagttgatggaggtattgatgaagacggttatcaaattcaaagaagaagatgtacagactgcgggctagaaactgaagaaattgacatttaa

SEQ ID NO: 78072 - DNA, 669 bp, Saccharomyces pastorianus
atgaagtttttcccactccttttgttgattggtgttgtaggctacattatgaacgtattgttcactacctggttgccaaccaattacatgttcgatccaaaaactttgaacgaaatatgtaactcggtgattagcaaacacaacgcagcagaaggtttatccactgaagacctgttacaggatgtcagagacgcacttgcctctcattacggggacgaatacatcaacaggtacgtcaaagaagaatgggtcttcaacaatgctggtggtgcgatgggccaaatgatcatcctacacgcttccgtatccgagtacttaattctattcggaaccgctgttggtactgaagggcacacaggtgttcactttgctgacgactattttaccatcttacatggtacgcaaatcgcagcattgccatatgccactgaagccgaagtttacactcctggtatgactcatcacttgaagaagggatacgccaagcaatacagcatgccaggtggttcctttgcccttgaattggctcaaggctggattccatgtatgttgccattcgggtttttggacactttctccagtactcttgatttatacactctatatagaactgtctacctgactgccagggacatgggtaagaacttgttgcaaaacaaaaagttctaa

SEQ ID NO: 78073 - DNA, 1263 bp, Saccharomyces pastorianus
atggttttatcaaggggagaaacaaagaaaaatagcgtgagattaacggcaaaacaagaaaagaaacctcaatctacgtttcaaactttaaaacagtcacttaaacttagcaacaataaaaagttgaaacaggattcgacccaacactcaaacgatacaaataaatctgttaaagccaaaaaaaatggcacgtcctcgaagaaaaccggaacacaaaggaaaagaatatcaactcagagattttcattgtttacctatggcaatgttcaggttatgaattcattcgttcccattcataatgatattccgaatagcagttgcattcgtagaaattcccaagtatccgcaaataatgtcactgaaagtagtggagtattcttcaatgatacgcaaagtcaagacagtcaaaacactattaagttaaaacctacatctttaatggcaaaaggacctattgaaatatatcagatatgtacagggtttgataagttaaaggaaaatatagcgccctttcaaaaatctagtaaagctagtagtcatgatgggcatgtagtaaactatttatcgataggacgacatggtgatattgtgcatccagtactacccaaactacaaataacaaggctaaatggcgcaggtttcaaatactttattagcttttataatccggaacggtactgggaaatcgaatttctacctttgattagtcaatcccaatcagagttggaaaatagtgtgaaagcttttgaaaacgtcattagcaaaatttgccaattttcgcatattaatgaaggagctactattgggaataatgagtctttgagcgataaattcaaactgccgcctacttcggacatagagccccccaatactgaaataattaataatgatgatgataacgatgatgatgatgataattatgatgatgacgaccttaattacttgctggatgaagaatacgaacaaggatgtacagataatagcttctccgtgatatcgaacacttgctctaatctaaatgcaagctttctctatccgagggaccctaccgatgccgtgtcaatctccataaatgaagctttcaaaaatgctatcagacgaaccgctcctgtactgaatattccaatagcagccccaagtattcattcgaaacagcaaaacaaaagatatagttcatacccttttatcgactctcccccgtatctgcaggacaggcatagaagatttcagaggagatccatatctggtcttggcgacctttga

SEQ ID NO: 78074 - DNA, 2880 bp, Saccharomyces pastorianus
atgactgttactactccttttgtgaatggtacttcttattgtaccgtcactgcatattccgttcaatcttataaagctgccatagatttttacaccaagtttttgtcattagaaaaccgctcttctccagatgaaaactccactttattgtctaacgattccatctctttgaagatccttctacgtcctgatgaaaaaatcaataaaaatgttgaggctcatttgaaggaattgaacagtattaccaagactcaagactggagatcacatgccacccaatccttggtatttaacacttccgacatcttggcagtcaaggacactctaaatgctatgaacgctcctcttcaaggctacccaacagaactatttccaatgcagttgtacactttggacccattaggtaacgttgttggtgttacttctactaagaacgcagtttcaaccaagccaactccaccaccagcaccagaagcttctgctgagtctggtctttcctctaaagttcactcttacactgatttggcttaccgtatgaaaaccaccgacacctatccatctctgccaaagccatcgaacaggcctcaaaaggcaattgccgtcatgacttccggtggtgatgctccaggtatgaactctaacgttagagccatcgtgcgttccgctatcttcaaaggttgtcgtgcctttgttgtcatggaaggttatgaaggtttggttcgtggtggtccagaatacatcaaggaattccactgggaagacgtccgtggttggtctgctgaaggtggtactaacattggtactgcccgttgtatggaattcaagaagcgcgaaggtagattattgggtgcccaacatttgattgaggccggtgtcgatgctttgatcgtttgtggtggtgacggttctttgactggtgccgatctgtttagatcagaatggccttctttgatcgaggaattgctgaaaacaaacagaatttccaacgaacaatacgaaagaatgaagcatttgaatatttgcggtactgtcggttctattgataacgatatgtccaccacggatgctactattggtgcttactctgccttggacagaatctgtaaggccatcgattacgttgaagccactgccaactctcactcaagagctttcgttgttgaagttatgggtagaaactgtggttggttagctttattagctggtatcgccacttccgctgactatatctttattccagagaagccagccacttccagcgaatggcaagatcaaatgtgtgacattgtctccaagcacagatcaaggggtaagagaaccaccattgttgttgttgcagaaggtgctatcgctgctgacttgaccccaatttctccaagcgacgtccacaaagttctagttgacagattaggtttggatacaagaattactaccttaggtcacgttcaaagaggtggtactgctgttgcttacgaccgtatcttggctactttacaaggtcttgaggccgttaatgccgttttggaatccactccagacaccccatcaccattgattgctgttaacgaaaacaaaattgttcgtaaaccattaatggaatccgtcaagttgaccaaagcagttgcagaagccattcaagctaaggatttcaagagagctatgtctttaagagacactgagttcattgaacatttaaacaatttcatggctatcaactctgctgaccacaacgaaccaaagctaccaaaggacaagagactgaagattgccattgttaatgtcggtgctccagctggtggtatcaactctgccgtctactcgatggctacttactgtatgtcccaaggtcacagaccatacgctatctacaatggttggtctggtttggcaagacatgaaagtgttcgttctttgaactggaaggatatgttgggttggcaatcccgtggtggttctgaaatcggtactaacagagtcactccagaagaagcagatctaggtatgattgcttactatttccaaaagtacgaatttgatggtttgatcatcgttggtggtttcgaagcttttgaatctttacatcaattagagagagcaagagaaagttatccagctttcagaatcccaatggtcttgataccagctactttgtctaacaatgttccaggtactgaatactctttgggttctgataccgctttgaatgctctaatggaatactgtgatgttgttaaacaatccgcttcttcaaccagaggtagagccttcgttgtcgattgtcaaggtggtaactcaggctatttggccacttacgcttctttggctgttggtgctcaagtctcttatgtcccagaagaaggtatttctttggagcaattgtccgaggatattgaatacttagctcaatcttttgaaaaggcagaaggtagaggtagatttggtaaattgattttgaagagtacaaacgcttctaaggctttatcagccactaaattggctgaagttattactgctgaagccgatggcagatttgacgctaagccagcttatccaggtcatgtacaacaaggtggtttgccatctccaattgatagaacaagagccactagaatggccattaaagctgtcggcttcatcgaagacaaccaagctgccattgctgaagctcgtgctgccgaagaaaacttcaacgctgatgacaagaccatttctgacactgctgctgtcgttggtgttaagggttcacatgtcgtttacaactccattagacaattgtatgactatgaaactgaagtttccatgagaatgccaaaggtcattcactggcaagctaccagactcattgctgaccatttggttggaagaaagagagttgattaa

SEQ ID NO: 78075 - DNA, 942 bp, Saccharomyces pastorianus
atgctgagtagcagtagcaatagacccatatctgcccatctaaccatccattacaaggctattcaggaggaagagggggaggatatgagaagcggtgccggaagtggtggccatcatgacgactattttctggagagtaacagatctcccactcctaataagaaacatgagttcattaaaacggtgctcaatatcaacgataacgactctgaattttcggaatcgtgctcaccaagagagaagttacataacgaggggccttgtaatacagacctgttcggggacttcatgtctaaaagacaacagaggctgtctaattctatgaacatttacgacctttatcagtgtgtacataacctgtcgcctagcaacaacaaccatcagttcatagcaagaaggttcagtggttctcatattccctccttgcatcaccgccagcagcaacagaaggtaacaacaaaaaactttgtacagcccacgaaggacattcaaaggatcgcctcgtacgctgcggattcggaccagagagttaagtatttaccaaactatcaccagtctgctccttctactgcactgtctgcggctgaatcgaaagcggctgtaccaagaaagctccctgacagagacagtacacaaaattacgtactaaaattgcaactctcgtcacccaactctcaaccaatgtcaccaaggactcgcccgggctaccgcccctcttgctcttcttccaattgctcgtcatcttcctcatcatcagcatgttcatccgtttccatctcagatccgaacaacataacagcatacgaaacgaataatgtcaaccctcagttccccagtaaccagccattagatatttctagtccttgtgcaaggcatcaccatagaagaaattctattgctgtaaaatttgacaaggctttatataagaaaacaacaggatag

SEQ ID NO: 78076 - DNA, 1332 bp, Saccharomyces pastorianus
atgtcattaccgttcttaacttctgcaccgggaaaggttattatttttggtgaacactctgctgtgtacaacaagcctgccgtcgctgctagtgtgtctgcgttgagaacctacctgctaataagcgagtcatctgcaccagatactattgaattggacttcccggacattagctttaatcataagtggtccatcaatgatttcaatgccatcaccgaggatcaagtaaactcccaaaaattggccaaggctcaacaagccaccgatggcttgtctcaggaactcgttagtcttttggatccgttgttagctcaactatccgaatccttccactaccatgcagcgttttgtttcctgtatatgtttgtttgcctatgcccccatgccaagaatattaagttttctttaaagtctactttacccatcggtgctgggttgggctcaagcgcctctatttctgtatcactggccttagctatggcctacttgggggggttaataggatctaatgacttggaaaagctgtcagaaaacgataagcatatagtgaatcaatgggccttcataggtgaaaagtgtattcacggtaccccttcaggaacagataacgctgtggccacttatggtaatgccctgctatttgaaaaagactcacataatggaacaataaatacaaacaattttaagttcttagatgatttcccagccattccaatgatcctaacctatactagaattccaaggtctacaaaagatcttgttgctcgcgttcgtgtgttggtcaccgagaaatttcctgaagttatgaagccaattctagatgccatgggtgaatgtgccctacaaggcttagagatcatgacaaagttaagtaaatgtaaaggcaccgatgacgaggctgtagaaactaataatgaactgtatgaacaactattggaattgataagaataaatcatggactgcttgtctcaatcggtgtttctcatcctggattagaacttattaaaaatctgagcgatgatttgagaattggctccacaaaacttaccggtgctggtggcggcggttgctctttgactttgttacgaagagacattactcaagagcaaattgacagtttcaaaaagaaattacaagatgattttagttacgagacatttgaaacagacttgggtgggactggctgctgtttgttaagcgcaaaaaatttgaataaagatcctaaaatcaaatccctagtattccaattatttgaaaataaaactaccacaaagcaacaaattgacgatctattattgccaggaaacacgaatttaccatggacttcataa

SEQ ID NO: 78077 - DNA, 1374 bp, Saccharomyces pastorianus
atggttagctcactggcatcaaatataattctagcccttgtggtagtcctgatgacactgctaaggcaaaataagccgttgcagaggtggtttgtatcatatgttgaaaagctattatcaagaaaatcaaatctggcccaaaaagtcagcgttttatcgccctccttaaaattggttgatgttgagaaatcaatatctgccgatcaatcgaatctttctaaaattaattatcagattcccactcttcctgatcttacggggaatttgatccgtttacatgagtatcgagcaagaggagaaggctataatggccttttatttcggagagcaagacaattaaatggaatttcagaagatcagttgcaaaaattaggctacttcaccaaattaatgaaaaataatgagggtatccgagaaaacgcaagagttattgacaagataattgagttcactttagggaaattgattcattccaacgaacacgatgaagaatttacagaggaaattgaaaaaatatgcgcggaacacggctataagattaaagatggtcaccttattcaattgaatcctgacttcgtatttccaatagtttcgtctcgaggcagccaaagtgtggtccatgaagcattagcacatttgtgtcgtgatttcagctcttactatagtgtggaaagagatcctttacaaaattttatcattagtagaatcaaccatcatgtgattagtgccggggacatgaaagagaaaattcttatcgtgaccccaggggctggtgtgggtggcctatcccatactcttgccaccactttccccaaaatacaggtggactccatcgaattatcagccttgatgtacatatgtaacctatttgcactcgaatataagcatgacgttaagatacgtccttttgtacaacaatattcatgccagacagtgtttgataatcagttgagaagtttatcggcagatttgagcaaagttggccaccgcagtaatctggacccactatggggggacttcacacgatattctcccatttccaaagactatgataaaattatcatttgtagcgcatatttcatagataccgcggaaaatatgtttgaatatctatccagtattgaagcactaaagaaatactgtaaagagctgcattgggtcaatgtaggtccattaaagtatggcaccaaacccttggtccaatttacaggagatgaattaagtcggctgcgtaaaattcgcgggtggaaggaccttgtggaggaatatgaagttgatagctcaaagggattgaatggctatttaactgattatgagtcaatgtatcagggatactatggtctgcttaaattttattctgtcttcgaaagctga

SEQ ID NO: 78078 - DNA, 1350 bp, Saccharomyces pastorianus
atgcgtctaaaagaattgttacctaattttttgatcgttcatcaagaggtccctgaggatcctattgcattcaagtccaccgataaacgagagaatgaaaataaagagatcaccatccctgagctaatagatactaaagttcctgaattagctgacggtgctactgacactttatatggtttactggtcaatggccatttacaaactgcatatggttcctttagacactttgacaatatatacaaagttcaatataaaagaatgataatcaaatacccacatgggggagaagggactgtggattttgctgtaaatggtagaagtaccaaaagaagaaaagtggaaaaagaatacgtgccgacaagtcaaccggtatttaacggaaacttgaaacgaagatattcgtactattcccctgatgatcctaaattgaactcagacgatgctaagcctatgcttattattctccatggattaacagggggttcgagggaaagctacgtgagggcaattgttcatgaaatcaccacgaagtatgactttgaagcatgcgtgtttaatgctagaggatgttgttattctgcaattacaacgccgctattatacaacggtggttggaccaatgatataagatattgtgttaatgacttgaggaaaagatttccgaatagaaagttttatatgatgggattttcgttaggcgcatctataatgacaaattacttgggagaagagtcagatcgtactaaaatcgaatgtgctatttccgtgagtaatccatttgacctgtacaactctgcatattttattaacagtacaccaatggggtcacgattttattcacctgctttgggtcacaacttactacgcatggttcgaaaccatctctctactctggaagaaaaccctgatttcaaagatgttatcgagaagcatttaaaaaagattcgcactgtgaggcaatttgataacttgttgacaggcccaatgtttggatataaaaatgcagaggagtattacaagaatgcttcatcatataaaagaatacccgggatcagaactccttttatagctttgcatgctcaggatgacccaattgtcggaggtgatcttcctatagaccaaataaaatccaatccatacactttgcttctagaaacttcgacgggggggcatgttggatggttcaaagacagatccggcagaaggtggtacgcagaacccttatgcagatttttgaaaatatttcacgacgaaattactgtaaagggcttaaaacctgacttggaaaatgttcaactcccagatcctaattgcgaacccatagccacaacctttcgcgcgaattag

SEQ ID NO: 78079 - DNA, 1428 bp, Saccharomyces pastorianus
atgcatgaagtagtaacgatatcggtttcgcagagagcaaaccatttgactactcaattcttcaatatacaagagggctatttacaattgtctaaagaacaacaagtcaatgactccaaaatttttctgaattcggttgtagataaagtttcaaaaacaatttcatatgcaccacgtgccttactttgggatgcccgtacaggtaatggttcactaggaacatatcaatattcagaaagccaagactatcatttcggcaatgaagacaaattcaaggagcaaacagttataaagactcatccaagaatacctaaatccgaatatcagagttctctagatgcaggagcaccgctgccttgtttgaacagagaaaatacgatgtattggtctgactattctaaacttatctatggtcattcaagtttcaatattttgagaaattggtaccatgacactgaaaatccaaaccaacctgactttcaaaacttgggggagcgaaagtttgacaggtattccattggttatgacgaatttaccgaaaattacttgcaagagttttttgatggaaatttgcatagagaattggaaaaatgtgacaccctgcaaggcttcaatcttgtaagtgatatggagagtggatggggcgggttttctagtgctctactggtggaattaaggaatgaattacctaaaaaggcggtcttttcatggggacacaatgaagatgatccattcacagatgacttccctatgaaaagactttcaaagaaatggctcccgatcatttcgaacaaattaagaagcacaataaatatgatgcaagaatccgatctttacttcccattgtatgctgctcctggactaactaattgggaaactgctggaaagagctgtaggatatttgattcaataaatgcgacaatttcccaaagcaatcttgaacaaagaaagacaatggattatctaacaactgccattaccttaggatattcgtcgcgaaatatggtcactggcatggttatcggtgacaccgattactcattctgttctcgagtacttcctttcaagaatagccacaaaccaaattctactcacatattttcaaaaagtttcattgatagaggaaatcaaacgcataaacatcattccgaacctgattcacggagtaagatgattgaaatgtatacacacaggtattttccatctgatacgataccgacagaattttccaatgatcgtgaatttgttttggaattagaatcatctgaaaaaaatcgagatatattcaaacattggaatgagtttgtggtaaggtacttcaaaaatgatagtgacagagaagaattgaaaaatgaactttccgattacgcctcagcgtacgaatctgggtggtatgaagacgaagattctggtgatgacgatatgtga

SEQ ID NO: 78080 - DNA, 2349 bp, Saccharomyces pastorianus
atgcagttgtctatgcggatgatgttcacaccaaaacatcagaaactggtcaatcaatgttatcctacgggaaggaccacagataagaagcctaaatcttcggaaacttcatatttgctatattacgttaactcgaggcgtagtaaattggagaaagttagcacttacctgattaagcgttccacttccgacttgaaccatcggcgcatagggaacatagccgttacattggatttaatgaacaaaattgtgttgcattgtaaggagaatttgaatgtatttgttaaagattttttgtacattatgaacaaagttctttccaacaacaattttaacaatgatgtatctgttgttgaattaatagaactggcatttagtagtatatgccagaacttggacgacgtcttgtgtaacggtgacatggaattcgtccagttataccagaactttgttgatcttttttttaaaatagttactgaaagaattcataatgatgacatgcttctgaaatgctgtattgatatatcaaacacaaatagtgtttcaagcaacccacaactaaaccactttgtttccaagtctgttgcctatactatttcaaagttccaagagagaaatccgaaatttaaaactttgtcgctggaagcagctctggagagcaatttaggaaaaaggctaagtcgaacacaaactcgtacaattgggttagataaggccgccgaagataatcatgacctttcagtaaaagcattgcaatcctattttaacacaactgagacagacaaattgaatttgtctattcgtactctgttgcgctgtctgcaaagtacacctaataaggaactgctagagtttgtatgcaatggtatacctgttcagttacgatatattgttatacttcttttggtcagacaactaagcgacaaggataaaaatgtaaatccaattgtttccttgaaattgatgtcgtcattacttgtttcagatgtcagtatagtggggttgagtgttcttgatataatgagaaagcttttaaatttccagttgaaaaatgcaactaataaagaagttgtggcacagtcttgtatcaccatgacagaccttaaccataaaacttattacgctgaacagacctcagatatgttatatgaactactattgaaattgaaaagtgacaccgtcaaggatgttgaaaagaatgcagttgtggaagatattgatttcctcgttgaacatattacgcagccaagtatcagtttggaattattcatcgacttggcgcattacatgaaaaaccacattatatgtttatttaacattgttgaaactgaggttccaagcagcattctcttttcaaaactgtactcattattacgtgaactggattcacatggtgtgcaaaaagaaatgatggaagagatctttgacaagtatggaaaaatggcactattatccggtttgaattattttctagagaacgtttctgagcctgagtatacctattattcgtaccatttacaagcagctaactttttaaaactcaatgactacaagtcacaaactgagtacaaaatgcaaactagaactttgtttaccaaggaagatttattgtcatactattctgatactggatcaaataaatacagcaagaagggggcgcagattttattgtctcgtgataatcaaatttctacttctgatttactgtcggactctcaagttcgtactacacctctggagtacaagaatgtccctaatgctattttttcaaatgggaaagcagtgtatgataacaacgattttgcggccaagcaaaataaattcgacaacagcatagatgacaatatagaagaagctaacgatactgtaatttctgatgctaatgcaaaaggtagtatctataggtttgttgctgaggacgcaagatcatggaaaacaatgagagccaccgcaccaaaagttagcgatttgaaaaaaacaatgaatgaaaagaatattccaaataatatgaaaagagatggctcttttcggggttctcaatcagtgaaatctcgtgtcactaatatcacatttttattaaatgaattgaaaactttttcagatgacgcgaataaaatcaaagatcctgatgaggagaatattgttggcttggataaaatcgacgttgctagatcaaattctctgcgacttgcaccaatatctagtctttctgatcgcagtagcattggaaatagaaaattctttttgcaaaaaacagcaactggtgaaaatcaaaacgatgactttaaagacgcaaatgaagatttacattctttaagttcaagaggtaaaatattctcctccacttga

SEQ ID NO: 78081 - DNA, 1773 bp, Saccharomyces pastorianus
atgccccccgtaccaatatacgtgaaaggcggtgtatggaccaatgtggaggatcagattcttaaagcggctgtacaaaaatacggaactcatcagtggagcaaagtagcatcccttttgcagaaaaagactgccaggcagagtgaattaaggtggaatgaatatttaaatccaaagttgaattttacagagttctcgaaggaggaggatgcccaacttctagatcttgcaagagagctgcctaatcagtggaggaccatagctgatatgatggccaggcctgcacaggtctgcgtcgaaagatataataggctattagaaagtgaagacagtggaggggctgcgttaagtacaggagttactgacttgaaagtcggggatattaatcctaacgctgaaactcaaatggctagaccagataatggtgatttggaagatgaggaaaaggaaatgcttgctgaagctagggctcgtctgttaaatacccaaggtaagaaggctacaagaaagattagagagcggatgctcgaagaatcaaaacgcattgctgaactacaaaagaggcgtgagctaaagcaagcaggaattaatgttgccattaagaaaccgaaaaaaaaatacggcaccgacattgattacaatgaagatatagtatatgaacaagctcccatgccaggtatatatgacacgtccactgaagaccgccagataaaaaagaagtttgagcagtttgagagaaaagtcaacagaaaaggtttggatggtaataaggataagccaagtaaaaaaaataagggcaaaaaaagaaaacacgatgagaacgaacacgttgagaaagcagcactgggtgaatctactacattgacggatgagtataaaaaaccaaaacttatactatctgcaccaggaacgaaacagggaaaagtcacctataaaaaaaagctagaaagcaaaagacaaaaactaatcgaggcacaagcaactggcactgtgttgacaccaaaagaactactaccccacgactccggccaagaagataatgaacgcagtaatataaagagtggtaaacagctaaaatcacgcatacgaaaatttttagtgcaaatgttcgcatctttgcctagtcccaagaacgatttcgaaattgtattaagtgaagacgagaaagaagaagatgcagagatagcggaatacgagaaagaatttgaaaatgaaagagcgatgaatgaagaggacaacttcatagaaccaccatctcaaaatgatgcgccacgcgtctcattagtagccgttccattagcttactcaacgctacccataccagaattcaaaaacaatccgcagtccgcgattgacaataagtacaacttgctagtcgcgaacgccataaacaaagaacctcacatggtaccagaagatacggcagattttctcaaagaggtggagtcgcgtatgcagcatataacccaagggcgcacttccatgaaaatacaattcaaaacagcaatgcccccaactgaggttcttctggaatcgatccaatcaaaagtggagtctattgaacagttacagcgtaaactacaacatgtgcaaccactggaacaacagaataacgagatgtgcagtaccctctgccatcacagcctgcccgctttgattgaagggcaacgcaagtactacgctgattactacgcctaccgacaagagatacgatcgcttgagggtcatagaaagcgtcttcaagccatgctaaattcttcttcttccatatag

SEQ ID NO: 78082 - DNA, 1215 bp, Saccharomyces pastorianus
atggtaataagatgtagtactgacaaaacatggtggataggccagaagagcgtgcattggctggcgaaaagatcgaggacaatgattccaaaattatatatacatttgatactatctttattgttgttgccgctaattttggcgcaggattattatgcaatactagagatagacaaagatgccactgagaaggaaatcaaatcagcgtacagacaattgtctaagaagtaccatccggataaaaatgctgggagcgaagaagcccatcaaaaattcattgaagtcggcgaggcatacgatgtattgagcgatcctgaaaagaaaaagatttatgaccagtttggtgcagatgctgtaaagaatggcggtggcggtggcggtccaggaggccctggcgcaggtggattccacgatccgtttgacatattcgaacggatgtttcaaggaggtcatggaggtcctggcggcggatttggccagagacagaggcagcgtggtccaatgatcaaggtccaggaaaaactatctttaaagcagttttattccgggtcctcgatagaatttactttaaacctaaacgatgaatgtgatgcatgccatggtagtggctctgcagatggtaagctggcccaatgtcccgattgtcaaggtcgtggggttataatacaagtgctgcgcatgggtattatgacgcagcagattcaacagatgtgtggtaggtgtggtggtacgggacaaattatcaaaaatgaatgcaaaacatgtcacggcgaaaaagttaccaaaaagaacaagttcttccacgttgacgttccaccaggcgcaccaagaaactacatggacacaagagtcggcgaggctgaaaaagggcctgactttgacgccggtgacttggtcatagaattcaaggaaaaggatactgagaacatgggttacagaagaagaggcgacaatctgtacagaacagaagttctttctgctgcggaagcgctatacggcggatggcaaagaacgatagaattccttgatgagaacaagcccgttaagttatctagacccgctcatgtagttgtctccaatggcgaagttgaagtcgtgaagggattcggcatgcccaagggtagcaagggttacggtgatttgtacatagactacgtcgttgtcatgccaaagactttcaaatctgggcaaaatatgctcaaagatgagttgtag

SEQ ID NO: 78083 - DNA, 1575 bp, Saccharomyces pastorianus
atgcaactatctaaaagtatactactggcagcattagctgctacaccatctctggtgaatgccatgctccccatccatatcaagaattataggttcattaagccatcctctgccacaaatagcgaatccgataacgaagttttttttgtgaaaggtgtcgactatcagcctggtgggtcgtctggttacgatgctgactctgatacagatattctttctgaccctgaagtgtgtgccagagacgcctacgctttccaacaacttggtgtcaacacagtgagaatttactccctgaaccctgacctaaatcatgacaagtgcatgactatcttcaacaatgctggtatctacgccattttggatgttaatagtggtaattacggggagagtttgaaccgtgctgacccatctggaacatatgactctttgtatttgtcaagagtcttcaaatttattgacgctttcaagaactaccctaacgtgctaggattcttttctggcaacgaagtcataaatgatcaaagcgactatgcaaaaattgatcctccatacatccgcgctgttcaaagagatatgaaacagtatatttcaaaacatgcgaacagaagcatcccagtcggatattctgctgctgacaatactgatttgaggttagcaaccttcaagtacttgcagtgtaattcgttggatggaaacaaagtcaatgatgatttggacatatctagatctgatttctttggcctaaatacttatgaatggtgctctggcacttctagttgggaatcttctggctatgacaagttaaactcaactttcgaagatgctgttattccgttgatattttctgagtatggttgcaacaaaaatacaccaagaacttttgacgaagtctctgagggtttgtatggtggtttaaagaacgtcttctctggtgggttggtatacgaatacactgaagaagctaataattacggtttggttaagcttgatgatagcggttctttaacttataaggatgattttgttaatttagaatcacaattgaagaacgtttcattgccaacaacaaaagaaagcgaaatatcttctgactctatctacaagtgcgataacagtgccatcaccaatatttattctggctttggaacgaacaatttcactttgccttctcaaccagcagaaattgccaatatgattgaatacggtgttaatggcaccaacaccggtaagatattgactgattatgctgttccaactacttttaactatacaattaaaaacaataaagatgataccatttcagctactatttcatacgacaaagctaactcactgaacgaactagacgtcacagccacaacggtcgcaaagtcagcttccacatcacaatcatcttctcactccttaacttcaagcaccagtccatcttcaagcactggctcatcttcaagcaccggttcatcttcagcttcaagcagctccaaaagtaaaggcgtcggaaatattgttaatgtttcctttagtcagtctggataccttgcattatttgcaggtctgatttctgctctactctga

SEQ ID NO: 78084 - DNA, 2229 bp, Saccharomyces pastorianus
atgggttcatcaattaactatcctgggtttgtgactaaaagcgctcatttggctgacactagtacggatgcgagcatttcatgtgaggaagcaacaagctcgcaggaagcgaagaagaatttctttcaaagggattataacatgatgaagaaggcgcctgctccaacgaagtctaaactgtctttggccttgcagacttccaagtcatcctctagtgccaacggtactgtacaagaggatacttcctcgaagacagaagatttttctacaaagagcattaagaaaaaaccagatagcggcgttgaatcgcatgtgtccatccaatcggattcggggccacaatcagactcagatttggattcagattcctctatctcatcatgtgacgaaaggaacgaagagtctttgaaagattacaggccgggtgggtaccaccctgcctttaagggcgagccctataaggatgcacgctacattttagtaagaaagctgggatggggccacttctccaccgtttggttggcaaaggatatggtaaacaacactcacgttgctatgaagattgttcggggcgacaaagtttacactgaagctgctgaagacgaaattaagcttttgcaaagagtgaatgacgccgataatacaaaggaggattccatgggggctaatcatattttgaaattgctagatcatttcaaccataagggccccaatggcgtccatgtggttatggtatttgaagtcctcggcgagaacttactggctttgataaagaagtatgaacataggggcattccattgatttatgtcaagcaaatatcgaagcagttactgcttggtcttgattacatgcataggcggtgtggtattatacacacagatattaaaccagaaaacgtgttgatggagattggagatgttgagggtatcgttcaaatggtcgaggcactggataaacagaagagagaggcaaaaaggttgcagaggcacgtttcgcggtcttctgatattaccgcgaacgatagcagtgatgagaaatgggcagaatgccaaacaagtatgccctgcgactcaagctcaaattccaaatctcgttctatagagaaggacttgtcaaaaagatgctttagaagacctagacgtcatacaattatcacagggtcgcaaccattaccttccccaattagttcatcaaatttctttgaaatgagggcgcacttttgtggtagtagtcacaatagcttttcctccgtatctgggaataggaacattccatcttccatcaataataacagtattaataatggcataggcattaagaatagcaacaatagtttcttaaattcagtatcacattctgtgaccaggatgttcataaatgaagacagtaatgataacaacaataatgataatagtaaaaataaaaataacaacaataacaacagcaacaacaataataacgaggacataatgaacacgcctttgcatgaagagcagctggcagactctttatctacatttgatatttccaatatatcacaaagctccgatacaaatggtccatatatttctaatactatggattcaaattcaaacgtcagtaccgatatcaactccccagaaaatttgattcagatcaagattgctgatttaggtaatgcttgttggtatgacgaacattacacgaattctatacagacaagagaatatagatcaccagaggtgttactaggcgccccttggggttgtggtgcagatatatggtctactgcttgtctaatttttgaattgattaccggagattttcttttcgaaccggacgaaggtcattcctacactaaggatgatgaccatattgcacaaatcatcgagttattgggagaattaccatcataccttttgaggaacggcaaatatacaagaactttcttcaattcaagagggcttttaagaaatatctcgaaattgaaattttggcccttaaaagatgttttaactgaaaaatataagttttctaaggacgaagccaaggaaatatctgattttttgtcgcctatgttacagctagacccaaggaaaagagctgatgcaggtggcttggttaaccatccatggctcaaggataccttgggtatggaagagattcgggtacctgatagagagttgtacgggagtggttccgatatccccggatggtttgaagaagtccgcgatcataaaagacattga

SEQ ID NO: 78085 - DNA, 1578 bp, Saccharomyces pastorianus
atggctgccggtgaacaagtttctaacatgtttgacactatcttagtgttagactttggttctcaatactctcatttgattaccagaagattaagagagtttaacatctatgctgagatgttgccatgcactcagaagatctctgagttgggctggactccaaagggtgtcattctttctggtggtccatattccgtatacgctgaagacgctccacacgtagaccatgctatctttgatttgaacgttccaatcctaggtatctgttatggtatgcaagaattggcttggattaatggtaaacaagttggtcgtggtgacaagagagagtacggtcctgccactttgaaggtgattgacgattccaactctctattcaaaggtatgaacgactctactgtctggatgtctcacggtgataaattgcacggcttgccaactggttacaagaccattgccacctccgataactccccatactgtggtattgtccacgaaactaagccaatctatggtatccaattccacccagaagttacacattctacccaaggtaagactcttttgaaaaacttcgccgttgatttgtgtcacgctaagcaaaactggactatggaaaactttatcgacactgaaataaacagaatcagaaaactggtcggtccaactgctgaagtcattggtgctgtttccggtggtgttgattctactgttgcatccaaattgatgacagaagccatcggtgatagattccatgccatcttggtcgataacggtgttttgagattaaatgaagctgctaacgttaaaaagacccttgtcgaaggtttaggtatcaacttgatggttgtcgatgcttccgaagaatttttaagtaaattgaagggtgtcactgacccagaaaagaagagaaagattattggtaacacatttatccacgtctttgaaagagaagctgaaaaaattaagccaaaagatggtaaggagattcaattcctgttacaaggtactctttatccagatgtcatcgaatccatttctttcaaaggtccttctcaaaccattaaaactcatcacaacgtcggtggtttactagagaacatgaaattaaagctaattgaaccattgagagaactgttcaaagacgaagtcaggcatctaggtgaattattaggaatccctcatgatctagtctggagacaccctttccctggtccaggtattgctattcgtgttctaggtgaagttactaaggaacaagtcgaaatagcaagaaaagctgacaacatttacattgaagaaatcaagaaggccggcttatacaaccaaatttcccaagcctttgcctgtttgttgcccgttaaatccgttggtgttatgggtgaccaaagaacctatgatcaagttattgctttgagggccattgaaactactgatttcatgactgctgactggttcccattcgaacacagtttcttgaagaaagtcgcctcaagaattgtcaatgaagtcgatggggttgctagggtcacttacgatataacttccaaacctcctgcaactgttgaatgggaatga

SEQ ID NO: 78086 - DNA, 3309 bp, Saccharomyces pastorianus
atggataaagaaatatattgtggatcggttcctgtcagctattttgacccgtttgatttatttgagagtctgaggccagagtttcagcagattttaccgttagacaatatacattggaaggcatttgacggaactgtacgaacggttaacagacttccaattgaattgattccagaaggtagaggggaggcagacaagtctaatgatgaacagccgtttatcagatttttgatagtgaactgtatctctatcgaccaatacagggccaaagtacggcctcttgtgagacagtggctaccaaatctggaatctgtatcttcatcgacaggagaaaaaatgatttataaaccaattattttactgtatgccaattctgaagtagtggactctaacctattcaaatcggtatccctaatggagaaatttggcaaagactttccgcatgtacaaactttggaagttcgatcggtttatagatctcccaaagacaggcaggagttttggaaccaatttagccaacagattaaagcctccgtactgagcatctttcaaaaacgattgacacatttgcgacattcgttggccaatttacaaaaaggaaataactttgaggaacagcttttgacaagagaaaaattgtacgagttatatgtggtattcaatattttggaagatgccagcctggaattgcaaaaaatcaaaaaagaaatactccgtagaaacatgaatatgccggatggaaaacttcaggtaccttttgaatcatcttctaaatcagatgaatctctgggctccataataatagaaggtacacttgataagttccaattgcataagtattttttcattagaaggttaagacttctaaaactagaggaccagacgttgaccgcctttgtaggagcatttcaactaatcaagaattttattgaatccatatcaatagaatatagaaagtctgtgagattattggaatttaagcactattttataacttcgatgctgtcatattttgaatttgagaatgtctcaaatcctctcttgtgtgaaatcaaagctgagttattaatgttgaagcgcgacaactgggtgcaaggtgttatggctacaagtggttatagactaatggacaaaaactaccctaatagtgacgttaaatacaaatttgatctattaaaagaaacttgtgttgatgaaactgtcttccaggaaaacttccttattctcaccaaagaaattctttctctcttcaacaaatgtgaagggaagcgtcaaaggatagtagatattttatccattgagataggtttgctttactatcagggaaagaaatatgaggaggcagtctcgcttttcctttcctgttacgaatattatactcaaacgaactggaatagcattggtttgaaaatattgcaagttttcattgattccttgagccactgccccaaattagacgtcttacagattgatggggaatcagtttctgcatcggccgttttaactaatgcatttctcaatatacttaagttatgcaaagataacgatagcaaggaaatttggtggaaaaagttcatggacttacaaatgaaaaataacatccatctaatgtatcccttagatgggctattcgaaataactttgaattctaaagttcatctggcaagagcgaatgttagcgctattgaagttaacttgaaaagctacggatttccggaggatatcagtacaaaaacaatgagattatctttgaaaaatatggggggagacgtgatagtttttgaagccagtgattttcttttgaagaaaggtgaaaataaactaatattggagtgtagagatatcatgtacggtgaattttctctgctttctttcgaaatcattgttgaggggattacttttgtaaaggagtttccggagaatcaagatgagtttattgtagtgccagaaatatattgtaaggaaagtactaaggttctggtgaagcaggcgcataatttaaacttgggagagtatgcacttgaattgacaagcgtgcaatctgacgctttagaatctttgcaagtagaggttgaggtgcaaaaaaatattggaaacatgaaaaatttacctgttagtttttccatggatgaaattcaggcaaggaagcgatataatactccattcgagaacgttaggctggagtactatctgttagaccaaataaccgccttcgacttaataattaaaacatccttcaccaaaaaaaatgatcaaggcacctttggtgagaccaagaaggtccgcattcaatgttatttacaactgtctgtttcagtggaagacatttttaaaaaagatatatttttcttcaaatttcttctaaactcttcagtcagggaagagccagtaattttatatagttcagaattatcagcaccagatacacgaaatgattacaacatacgtggtgactacatcgcaactacacctgcgttaattactttcgatgggaatgagagtttcattaattgctacgaaatcacagccaataataacttcgattcaaaagacatctttaatctgaaagttagatacaacacattaaaagaacagctagattgctttattacagacgccgtgcttattgaaggtgatgttgaatggtttattctgtttgaaaagtggaaaacattttgggaattagaaattttgaaaaagttgaaatacgattatgatgcattcaaagaaaacaggataattagattattaaagacttcaatagacctgaataaaacaaagtcgaagatacgtaacctatgcattgaaaaagcggtccttgacaaaatattgatctgcttgaataaagtgagtagaggaattgcagtatgtaatactgatatggatgagtatgtgagaaatctggtaccgaaacagttaactgttccggtacaactaccaggttttgaacaattctttcatgtacaattcgagccaatggaaactagccacgatgcgctacacgatactatagctaccataggcaatcctctttcctatactgtaattgtggaaaatctcagtggacaatgggggcaagatgttatagatgacggaggatatatttttgaaattttgagcagtaatgaatggttaattcatggccagaaacgttgcgcaataaaagagaaaagaaaggagtttgaagtccatttgattcctttaaaaaagggctacttaaattttccgcgtgttgaaattaccaacataaatggtaaaagttgtagagttgatcactctaatgcatttgagtcaattttaattttttaa

SEQ ID NO: 78087 - DNA, 1356 bp, Saccharomyces pastorianus
atgtcagagttgagagccttcagtgccccagggaaagcgttactagctggtggatatttagttttagatacaaaatatgaagcatttgtagtcggattatcggcaagaatgcatgctgtagcccatccttacggttcattgcaagggtctgataagtttgaagtgcgtgtgaaaagtaaacaatttaaagatggggagtggctgtaccatataagtcctaaaactggcttcattcctgtttcgataggcggatctaagaaccctttcattgaaaaagttatcgctaacgtatttagctactttaaacctaacatggacgactactgcaatagaaacttgttcgttattgatattttctctgatgatgcctaccattctcaggaggatagcgttaccgaacatcgtggcaacagaagattgagttttcattcgcacagaattgaagaagttcccaaaacagggctgggctcctcggcaggtttagtcacagttttaactacagctttggcctccttttttgtatcggacctggaaaataatgtagacaaatatagagaagttattcataatttatcacaagttgctcattgtcaagctcagggtaaaattggaagcgggtttgatatagcggcggcagcatatggatctatcagatatagaagattcccacccgcattaatctctaatttgccagatattggaagtgctacttacggcagtaaactggcgcatttggttgatgaagaagactggaatattacgattaaaagtaaccatttaccttcgggattaactttatggatgggcgatattaagaatggttcagaaacagtaaaactggtccagaaggtaaaaaattggtatgattcgcatatgccagaaagcttgaaaatatatacagaactcgatcatgcaaattctagatttatggatggactatctaaactagatcgcttacacgagactcatgacgattacagcgatcagatatttgagtctcttgagaggaatgactgtacctgtcaaaagtatcctgaaatcacagaagttagagatgcagttgccacaattagacgttcctttagaaaaataactaaagaatctggtgccgatatcgaacctcccgtacaaactagcttattggatgattgccagaccttaaaaggagttcttacttgcttaatacctggtgctggtggttatgacgccattgcagtgattactaagcaagatgttgatcttagggctcaaaccgctaatgacaaaagattttctaaggttcaatggctggatgtaactcaggctgactggggtgttaggaaagaaaaagatccggaaacttatcttgataaataa

SEQ ID NO: 78088 - DNA, 1515 bp, Saccharomyces pastorianus
atgaccagtacaagaacgttgagatacgcacaggttgcctgtgcttgtatctggtgtcttttttcagctggtattatctttggatttgctgctttgaaacctattttaatttcagaaggtgtataccatgaattgtgtgatcctaaggatggtgatagattattatgtactgcacaggatctgaaattaaattttatatttgctctcagtgctactgtaacaaacatcatggcccttcctgtcggtaagattttggatatgtatggacctcgtgtctgcggaataataggatcatgtctcctgttcctagcaagcggtaattttatttctgccaagcatctagtgtccctttgggacccatatcttgtcggttacacgcttttggcagttgccggtccgttcgtcttcatttcatgttttcaattggcaaatagcttcccacaaagatcaggaaccgtattggccctactaacaggatcatttgattcgtcatctgcgctgtttctgttatataggttgttatatcaaaactggtttcctaccttgaacgtttccagatttttcaccctatatttgattgttccagtgtttattcttgcctgtcaactcacgataatgcctcattcttcctacaaaactgtcaatcacattgctaagatcgctgtggaaggtttagatgaaaacggaagactcatcgagggtgatacaggctccggtatcatccctgatgaacaggaacgtcaatcgttgattgcaatcgagcgtgaagaagatagtatcccatcaaggccgcagagaaggaaatcggtattggaaacttacgttgaagataagttgcagaaaaagtcaggcggcatattcggagtcttgcatgggaaatccgcttatgaacaaataaagagtccgtggttttatttaatgcttttatttgcgcttgttgccatgctgaggataaactattttattgctaccgtcagaacacaagaagaatacttattaaatgatcctgatttagcactaaaattgaattccatttttgatatgttacttccacttggcggtgctgtttccataccatttattgggctgctcttggaccatacagatactttgtccactctcacaatattgttcaccacttctaccgctataggtgtttttggcttgattccaaattcattcacttggaacttaataggtatagtacttctagtagtgtacagaccattttattacacagttgtttctgattattcttcaaaagtttttggatttgacacatttggtactgtttatgggttattgtcctgcatttgtggtattttcaacatgagtcaaaacttactggacaaatggacacatactactttcaacatgaatccattcccaataaaccttacactggtaatcctcacagtcgttttttcactaactttaacattttacatacgatctcagattttgcccaagcccgtgaatgaaagaggattgtcctccaactaccaaactatctga

SEQ ID NO: 78089 - DNA, 672 bp, Saccharomyces pastorianus
atgacgaagaatgtattgatgttacatgggcttgcgcagtcaggtgactactttgcctctaagacaaaggggtttcgcgccgaaatggaaaagttaggatataaactctactatccaacagcacccaatgaatttcccccagctgatgttcctgatttcttgggtgaggtaattgctgatgcacctggggatggtgagaataccggtgtgcttgcgtggctagagaatgacccttccaccggtggctatttcataccgcagacgacaatcgactatttacacaattatgtccttgaaaatggtccatttgcaggtattgtaggatttagtcaaggagccggtgtagctggatacctagcaacggatttcaatggtttgttgggccttacaacagaagaacagccgccgctagaatttttcatggcggtcagtggtttcaggttccaaccacaacagtatcaagaacagtacgacctgcatccaatatcggtcccatctctacatgttcaaggagaacttgacactatcacagagccggccaaagtgcaaggcctatataactcttgtacggaagactctcgcactttactaatgcactctgggggccactttgtgccgaactcaagagggtttgtgagaaaagtggctcaatggcaccagcagttggcctga

SEQ ID NO: 78090 - DNA, 1416 bp, Saccharomyces pastorianus
atgagcatttgtccacatatacagcaagtatttcagaatgaaaagtctaaagatggggttctaaaaacgtgcaatgctgccaggtatatattaaatcattccgtacccaaggaaaaatttttaaacaccatgaaatgtggtacatgccacgaaataaactctggtgcaactttcatgtgtctacaatgtggattttgtggatgttggaaccattcgcattttctctctcacagtaaacagattggtcacatatttggtatcaattcaaataatggccttttattttgcttcaaatgtgaggactatatagggaatatcgatctgattaacgatgctattctagcgaagtattgggacgatgtgtgcacaaagaccatggttcctagcatggaaagaagagatgggctttctggcctgatcagcatgggatccacttgtttcatgagtagtattctccaatgtctaatccataacccttactttattaggcactcaatgagtcaaattcattctaataattgtaaagtgcgttctccagataaatgtttttcatgtgcactcgataaaattgttcatgaactttatggagcgctgaatacaaagcaagcttcttcgtcatctacatctactaatcggcaaaccggattcatatatcttttaacttgtgcctggaaaatcaatcaaaatctagcagggtattcacaacaagatgctcatgaattttggcagtttataattaaccaaatccaccaaagctatgttcttgatttgccaaatgccaaggaagtcagcagagcaaataataagcagtgtgaatgcatagtgcatactgtgtttgagggctccttggaaagttctattgtgtgtccaggctgtcaaaataattcaaagacaaccattgatccattcttggacctttctctggatatcaaggataagaaaaaactttatgaatgtcttgacagtttccataaaaaagaacagttgaaggatttcaactatcattgtggggagtgtaacagcactcaagatgcaataaagcaactaggcatacacaaattaccatcggttttggttttgcaattgaaaagattcgaacacctacttaatggaagtaacagaaaactagacgattttattgaatttccaacttatttaaatatgaaaaattactgttcaacgaaggaaaaagataagcattctgaaaatggcaaggttccagacattatttacgaattaatcggtattgtttcccacaaggggacggttaatgagggacattatattgcattttgtaaaatttctggagggcaatggtttaaattcaatgattccatggtctcctctatatctcaagcagaggttttaaaggaacaggcatatttattattctacaccattcgtcaagtaaattga

SEQ ID NO: 78091 - DNA, 2079 bp, Saccharomyces pastorianus
atggactatcctgatccagacacaataaggattttaattactacagataatcatgtgggttacaacgaaaatgatcccattactggcgatgattcttggaaaactttccatgaagtcatgatgctggccaaaaataacaacgtagacatggttgtacagtccggtgatctttttcacgtgaataagccttccaagaagtcactctaccaagtactgaagactttgagattatgttgcatgggtgacaagccttgcgagttagaattattgagcgatccctcacaagtttttcactacgatgaatttaccaacgttaactatgaggaccccaactttaatatttctattcccgtattcggcatatcaggtaatcatgatgatgcgtcgggggactcactgttgtgtcctatggatatacttcatgcgactggtctaataaatcatttcgggaaagtcatcgaatctgataaaataaaagtcgtgccattattatttcagaaagggtccactaagttagcattgtacggattagccgctgttcgtgatgaaaggttatttagaacttttaaggatggtggtgtcacttttgaagtaccgactatgcgagaaggtgaatggtttaatttaatgtgcgtccatcaaaatcatacaggtcacacgaatactgcatttttacctgaacagttcttgccagatttcctggatatggtgatatggggtcatgaacatgagtgtattccgaatctcgtacacaatccaattaaaaattttgatgtattacaaccaggttcatctgtagctacttcactttgtgaggctgaggcacaacccaagtatgtctttatccttgacataaagtatggagaagcaccaaaaatgacacctattcctcttgagactatacggacattcaaaatgaaatccatttcgttacaagatgttccccatttgaggcctcacgataaagatgctacgtctaagtatcttattgaacaagttgaagaaatgatccgcgacgctaatgaggaaactaaacaaaaattagcggacgatggtgaaggtgacatggttgcggaattaccgaaaccattgatcagattacgtgttgattatagtgcaccctccaatacacaatccccaatagattaccaagttgaaaacccgcgtagatttagcaatcgatttgtgggacgtgttgctaacggtaataacgttgtgcagttttataaaaaaaggtcacctgtaactagatcaaaaaaatccggtataaatggaacaagcatcagtgatagagatgttgagaaacttttcagcgaaagtggcggtgaactagaagttcaaactttggttaatgatctcttgaacaaaatgcaactatctttattaccagaagttggtttgaatgaagcagtaaagaagtttgtagataaagatgagaaaacagctcttaaagaatttattagccatgaaatatcgaacgaagttggaatattatctacgaatgaagaatttctgagaacagatgatgcagaggaaatgaaagcgcttataaaacaggttaagcgtgctaacagtgttaggccgactccccctaaagaaaatgatgagacaaatttcgcattcaatggtaatgggctagattccttccggtctagcaatagagaagtaagaactggatcttcagacattacccaatcacatgttgataatgaatctagaataacccatattaatcaagcggaaagcagtaagccaacgagcaaacccaaacgagtgcgaactgcaacgaaaaagaaaattcctgctttttcagactcaactgtcatatccgatgcagaaaatgaactcggtgataataacgatgctcaagatgatgttgatattgatgaggatgacataattatggtcagtactgacgaagaggacgctagttatggtttacttaatggtcgaaaaacaaaaacaaagactcgttctgctgcgagcacaaaaaccgcttccagaaggggaaaaggaagagcatcaaggacgccaaagacggatattcttggaagtctccttgctaagaaaagaaaatag

SEQ ID NO: 78092 - DNA, 804 bp, Saccharomyces pastorianus
atgtcccaaggtagaaaagctgtagaaagattggctaagaagactgtcctcattacaggtgcatctgctggtattggtaaggcgaccgcattagagtacttggaggcatccaatggtgatatgaaactgatcttggctgctagaagattagaaaagctcgaggaattgaagaagaccattgatcaagagtttccaaacgcaaaagttcatgtggcccagctggatatcactcaagcagaaaaaatcaagcccttcattgaaaacttgccacaagagttcaaggatattgacattctggtgaacaatgccggaaaggctcttggcagtgaccgtgtgggccagatcgcaacggaggatatccaggacgtgtttgacaccaacgtcacggctttaatcaatatcacacaagctgtactgcccatattccaagccaagaattcaggagatattgtaaatttgggttcaatcgctggcagagacgcatacccaacaggttctatctattgtgcctctaagtttgccgtgggggcgttcactgatagtttgagaaaggagctcatcaacactaaaattagagtcattctaattgcaccagggctagtcgagactgaattttcactagttagatacagaggtaacgaggaacaagccaagaatgtttacaaggatactaccccattgatggctgatgacgtggctgatctgatcgtctatgcaacttccagaaaacaaaatactgtaattgcagacactttaatctttccaacaaaccaagcgtcacctcatcatatcttccgtggataa

SEQ ID NO: 78093 - DNA, 1773 bp, Saccharomyces pastorianus
atggctgttataagaattaaaaaacccagagggccaggagagaaggatcaaccattagaaggcgagcctaaactaaagagaattcgcataaagacaaaggtaactgatgaagatatcaaaccaaagcctaaattaaagataaacctaaagaaaaagaaagagagtgctgacggcaaagagaagaagaattcattgaagttaaagttaaacttgaaaaaaaatgaagaaccagttaagaagatacacaaggcgccaaagctacgtctcaaacctattagaattcctggggaagcgtacgactcagaagcctctgatattgaagatgaccctctcatagagagtggtgtgatattaaggatacttccagacatacagttagagtttgtaaaaaattcgttagaatcaggtgattattctgggataagtatcaagtggaaaaacgagagacacgctgtcgtaacaataaacgatgtaatgtatggtgccattctagtagatttgcctacagttatagaagtgaacaagagcgtcgatagaaaaaacctcctgaagacatttgacgtatcacaaatgctactatgcataagacctatacaagaagaggaagaagtatatgccctagaagcccctgatacagaagatctggttgttaagcattttgaagatatagaggatgaaatttgggagaataaagaaaccttcttaaaaggatacaatggtgcgcctttaagtgatatggaggctaaacatttgaaagaaatagctttgaagggctatgactacaaacatggaatatcaccacctttgtacaatgttcgaaatagacgatttagacggaaaatggaccctaatgaaatagactatgtagaaaaagtggttgatatgcttttgaagcaagataaacaggcagaagaggtcagctatgatctggttgataaaagtgaactgcaagcgaggcaagagcgtgtttctagttgggaaaatttcaaagaggagcctggagagcctttatctagacctgctttaaagaaagaagagatacacacaattgcttcggcagtaggaaaacaaggtgcagaagaagagggagaagaaggaatggaagaagaagaagaggaggatcttgacctaggcgctgcttttgaaagtgaagaggaaggtagcggtgccgagggagacaaggagcaacaacaagaggaagtcggtgatgaggtggatcaagacacaggcggagaagatgatgacgatgatgacgacggtgacattgaagctgctggtggggaaagtgaatctgatgacgaaaaagacgaaaacagacagcacactgaattacttgcggacgaattgaacgaactagagaccaccctggcccataccaagcataaattaagtaaagccacgaatcctcttttgaaaagcaggttcatagatagcattaaaaagctcgagaaggaggctgaactaaaacgtaagcagttacaacaaaccgaagattctgtccagaaacaacatcaacatcgctctgacgcagaaactgcaaataacgtcgaggaagaagaagaggaagaggaagaagaagaggaagaggatgaagtggacgaagacgaggaggatgacgaagaaaacgatgaggacgaggataatgtgcatgaacgggaacacatacaagagaacaaggtggtgcgcgaacttgatgaagcccccgcagaggaaacactcgaccagaacgatctcgatatgatgatgctatttggtgcagagggtgatgagtaa

SEQ ID NO: 78094 - DNA, 1026 bp, Saccharomyces pastorianus
atgtctgttccaatccctggtattaaagatatctccaaacttaagttcttctatggtttcaaatatttatggaatccaacagtatacaataaaatctttgataagctggatttaactaaaacgtataaacatccagaagaattgaaagtacttgacctctaccctggtgttggtatacaatcagctattttttataataaatattgccccaggcaatattctttattagaaaaacgctcaagtctctacaagtttctgaatgcaaaattcgaagggtctccattgcaaattctaaaaagagatccatatgactggtcaacctactcgaatctaattgacgaagagcgaatatttgttcctgaagttcaatcctcagatcatattaatgataaatttctaaccgttgctaatgtgacgggggagggttctgaaggtcttataatgcagtggctgtcctgtattggaaacaagaactggttgtataggtttggtaaagtaaagatgttattatggatgccaagcacaacagctagaaaacttctagctaggccaggcatgcattctagatccaaatgttcagtagtaagggaggcatttacagatactaaactcattgccatatcagacgcaaatgaattgaagggatttgatagtcaatgtatagaagaatgggatcccattttatttagtgctgcggaaatatggcctacaaagggaaagccaattgcgttagtagaaatggacccaattgacttcgattttgacgtagataattgggattatgtcacgaggcacttaatgattttgaaaagaacacccttgaatactgtcatggactcgctgggacatggtggccaacaatattttaatagtagaatcactgacaaagatctgctaaaaaagtgtccgattgatttgacaaatgacgagtttatatatctaacgaaattattcatggagtggcctttcaaaccagatattttaatggattttgttgatatgtatcaaacagagcactctggttga

SEQ ID NO: 78095 - DNA, 189 bp, Saccharomyces pastorianus
atgtgtattattgtaaaatactcacaatgtaatctattttttcaggatgtgttacgatgcagacatgttttgtgcatgctctttagtattgttgtgcattttagattgtcgtcgtttgtttctgtatgtggtgtacggattatgtgtaactgtattaattgttcaagattcattcataatattaactaa

SEQ ID NO: 78096 - DNA, 2034 bp, Saccharomyces pastorianus
atgtttaagacttcatataacttgtacgatttgaactatccgaaaaatgattcattaacgccaataagagactacaaaaatgactattttcataaaaatgatgacaaattaccagaaattgttagaaaacctacgagaaagttatcgaaacatgaaaacaaactcaacgataaaaaattcacgaataaacgaccagcaagtctggacttgcattctatagtggagagcctgagcaataaaaaaatttactctcctattaacacagagatatttcaaaatgtcgtgagactgaatttgagccctcagattcccaattctcctcacgagggatgcaaattttataaaatcgtacaggagttttacctctctgaagtggaatattacaataatttgttaaccgcaaataacgtatacagaaaggcattgaatagtgatccaagattcaagaataaacttgtcaagcttgattcaagtgacgagctattgctttttgggaacattgacactattgcgtcaatcagcaaaatactggtaacggcaataaaatacctacttttagccaagcaacgtgggaaaatgttggatgcgaatgaatggcaaaagatattcaccaaaaatgaggtacaacagcagctatattcaacttttgatatttcagaggcgttcgagcaacatttgttaagaatcaaatccacctacacaagctattttgttagccaccaaaaacaaatggaactatttactacattaaggatgaataagaatcatttttttaacaagtggtatgaatattgtttaaaagagagtggatgtataaagttagaggacatattgaaaagcccgatgaaaagactgacccagtggattgatactttggaaactttggaaagctgttacgaagatattctttcgccagaattgggcttgaaactaagcccgacaagaagaaaatattctttattttccaataagttagaaaccgaggtctccgagtataagagtaattccatgtataatttcagtttaaccccatcagagattatacaaagttatgatgaagatcagtttacacaccttttaaaacccccagacaaacaaaataaaaatatatgtaatgcatctcgacaagagagtaatttggataatagtagagttccttctcttctttctggatcatcgagttactactcagatgtatcagggctagaaattgtcactaatacttcaactgcctcagctgagatgataaatctaaaaatggatgaagaaacagaattttttacattggcagatcacatcagtaaattcaagaaagtaatgaaaggtttgttagaattaaaaaagaatttattgaaaaacgatctgtcaggcattattgatatcagtttaagaagaataaatgcatggaaaaaggtgatcgagtgcgaacgcccttctggtgcattttttgcgcacgataacttaatatcgaccatgtgttcttcgtacatagataaactgcatgaacaaaaaaatcaagtaacaattttgaaactcacagagctcgaaacagatgtgatgaacccacttgaaagaatcatagcccattgtactaccgttaaaagcaaactaaaagatttgcaagctttgaagaaagattacatgttatttttacaagaaaaaaaagcaaatgtgcgagatattaaacgtgacttgttgggaatgcatttccaaaacctgcaaaaccagatgaaaagggaattaccggtctttattactttgatccacgatactatcgaatgtatcttgttgaactatatcaaagtcttcttaaaatatttggaaatcattgctggtgaaaaaaaatacctgcaaaaagatcttgaaaatatgtctcttaatgactctatagctaccggccaaattaaaaatcttgatattttgcagtgttattctaaatcacgatatatgacaaaacgcatggtaagaaaagattggcctttccctggagaccctagtggaagccgtgttgtcagaaaacttttcgaactttaa

SEQ ID NO: 78097 - DNA, 681 bp, Saccharomyces pastorianus
atggccgacatcaataaatatattccgatggttgacgctattttgagcgtatccaaccccgatgaaataagcccaaaaagggtgaggaaagccctgcaaattctctattcagttaatttggattcacaaagaaagttaattaatgaattgattcttgagaggttcggcgatatacaagaaaacccaagagtcttaattccgaagaacgacctcattagtcgggatcaagaactatctttgaggttacagaaggaagaagaaagacccttgaggtctacgaggaaaaggaaaggtaaaagtgaaagtaaatctaaaaggaagaagaaaaagaatgatagtcctgattccaacagcatttccgtccgcaaagttctgttgtcagctcctttacaaaagtttttaggatctgaagaactgccacgaacgcaagtagtgaagatgatatggcagtatatcaaagagcatgatcttcaaaacccaaaagatcgtagagaaattctatgcgatgagaagatggaaccaatttttggcaaaaaaatgacgatgttttcaatgaataaactcttaactaagcacttgtttaatcccgatgaaattgtgaaacatgaagaggaacaaaagcaaacacccgaaaaagaaatcaaattggaaaacgaatctcttcccaatttaagcggttga

SEQ ID NO: 78098 - DNA, 474 bp, Saccharomyces pastorianus
atgaacggcggaggcaagaatgttttgaataaaaactcagtgggctcagtatcagaagttggtccggactcaacacaagaggaaacgccacgagatgtccgtcttttgcatctgctcctcgcatcacagtcgattcatcaatatgaggaccaagtaccgctacaattgatggattttgcacataggtacacacaaggagtccttaaggatgcgttggtttacaacgactacgctggcagtggaaattctgccggcagtggattaggagtagaagacatacggcttgccattgcagcgagaacacaatatcaatttaagcctacggcacctaaggagctcatgttacagttagctgcggaaagaaacaagaaggcattacctcaagtgatgggtacgtggggtgtcaggcttcccccagaaaaatattgtctcacagcgaaggagtgggaccttgaggacccaaagtctatgtga

SEQ ID NO: 78099 - DNA, 1377 bp, Saccharomyces pastorianus
atgatcgtcaatattagtgcgaagatgatcttatcgatatgctttacgtttctgtcattttttaaagccactcatgccatggatttggatactactagcaaaacgtcaatttgtgatgcgacagcgttaattcaaggtggtatgctggattactatgagggtactagatacggtggtaccgttgggatgtttcagtcaccatactattggtggcatgcaggggaagcatttggtggcatgttggaaaattggtttctttgtgagaatgatacatatcaagaattactatacgatgcactattagcgcaaactggttccaattacgattatatcccgtccaaccaaacgatggttgaggggaatgatgaccaaggtatttggggtattactgttatgggtgctgtcgagagaaattttacagaccccggtgacggcaagccaggttggttggcaatggtacaagctgttttcaacaccatgtactcaagatgggattcagagcactgtggcggtggtctgagatggcaaattttcacttggaatagtggttataattataaaaatacagtttcaaatgcatgtttgttccagattgcggcgaggttgggcagatatactggtaacactacatatttggaggttgctgaacaggttttcgactggctagtggatgtcgggtatgtggttcttaacgataccgcaaatgtctttgatggtgctgaaattgatacaaattgcactgatattacaaaaattgaatggacttataatcacggtatcgtgcttggtggtcttgcatacatgtataatgctacaaatggaacaggtgaatgggagaccagtttgacaaaaattctaaatggtgctaaatcttatttcttcaaagatagtattatgtacgaaagcgcttgtcaagactatggcacctgtaacaccgatcaaagaacattcaaaagtattttttctcgtatgcttggtcttacaagtgtcatggctccctttactagggacacaattgatgatttgataaaaacaagtgctgaggccgctgcaaaatcatgtaatggtggtacagatgggcatacatgtggtttaaattggcagaaacaaaccaatgatggctactatggattaggtgagcaaatgagtgctctagaagttattcaaaatcttttaattcatgacaggccagctccatataaggaagataatggcggtacgtcaaaaggtgacgcgaatgccggtatgaactcatcgaccactaacgtgctacaaaacaatttaaacattaagaaaggtgatcgcgctggtgccgctatcatcacagcagtcatactgagtgtgctaactggtggggctgtgtggatgctgttttaa

SEQ ID NO: 78100 - DNA, 1416 bp, Saccharomyces pastorianus
atgggctcaaaagtagcaggtaaaaagaaaacccagaatgataataaactagataacgaaaatggttcacagcagcgcgaaaatatcaataccaagacgcttttgaaaggcaaccttaagatatcaaattacaaatatcttgaggtgattcaactagaacatgctgtgacaaaattggtggagtcttacaataaaataattgaactttcaccaaatttggtagcttacaatgaagccgttaacaatcaagatagagtgcctgttcagatacttccttctctatcacgttatcaattaaaactggcagctgaattaaaaaccttacatgatcttaaaaaagacgcaattttgacagaaattactgattatgaaaatgaatttgatactgaacaaaagcaacctatattgcaagaaatcagtaaagctgatatggaaaagttagagaagctagaacaagttaaaagggaaaagcgagagaaaatagatgtaaatgtgtacgaaaatttaaatgaaaaggaagatgaagaagaagacgaaggagaagatagctatgacccaacaaaggctggtgatatcgtcaaggcaacaaaatggcctccaaaattaccagagattcaagatttagcgattagggccagggtatttattcacaaatccacaataaaggataaagtttacttgtctggatcagaaatgatcaacgcacataatgaaagactagaattcctaggcgattcgatcttaaattctgttatgacattaattatttataacaagtttcccgattacagcgagggtcagttatcaacattaaggatgaatttggtaagcaacgaacagatcaaacaatggtcaataatgtacaatttccatgagaaacttaagacaaattttgacttgaaggatgaaaattccaattttcaaaacggcaaactaaaactgtatgcagatgtgttcgaagcttacattggcggcttgatggaagatgatccaaggaataatttgcccaaaataagaaaatggttaagaaagcttgccaaacctgtcattgaggaggctacccgtaatcaagttgccttggagaagacggataaacttgatatgaatgctaaaaggcagctttactctttgattggctatgcttcattacgtctacattatgttaccgtaaaaaaacccactgcagttgatcctaattccatagttgagtgcagagtaggtgatggaacagttttagggaccggtgtgggcagaaatatcaaaattgcgggtattagggctgcagaaaatgctcttcgtgacaaaaaaatgttagatttttacgccaaacaaagagctgccattcctaggagtgaatctgtgttaaaagatccctcacaaaagaataagaaaagaaaattctcagatacaagctga

SEQ ID NO: 78101 - DNA, 1311 bp, Saccharomyces pastorianus
atggctagaaccaaaagtaggaagcgttccggaaataaccaaaataagaatgcgtctgtggtaaataataaggctgagatcgccgccatgattgatgcaagaaggcttgagcaaaagaaaaagggtggggtgactaacagcaaaggaaagacgaataaggtagtggatgcgaagttagaaaaagagttcaaagacgttttacaacgatttcaagtgcaagagaatgatacgccgaaggaaatcacgaaagatgaaaagaacaatcatgtcgttattgttgagaaaaacccagttatgaacagaaagcatacagcagaagatgaattggaggatacaccctcggatggtattgaggagcatctatcggcaagaaaacgtaggaagactgaaaaaccttcactttcgcagttaaaaagccaggtaccgtatcctcaaatcatagaatggtacgattgtgacgcaagatatccaggcttactagcgtcaattaagtgcaccaaaaatgtcattcctgttccaagccactggcagtccaagaaggaatatctatctggccgttctctgttaggtaaaagaccttttgaacttcctgacattatcaagaagacaaatatagaacaaatgagatcgacgcttccgcaaagcggactggatggtcaagatgaaaagtcactaaaggaggcctcaagagcaagagtgcagccgaaaatgggcgccttggatttggattacaagaagttacacgatgtgtttttcaagataggagccaactggaaacctgaccatttgttatgcttcggtgacgtctattatgaaaataggaatcttttcgaggaaacgaactggaaaagaatggttgatcataagagaccggggagaattagccaagagcttcgtgccataatgaatttacccgaaggtcaactaccaccatggtgtatgaagatgaaagacattggattacctacgggatatcctgatctgaaaattgccggcttgaattgggatataacgaatttaaaaggcgacgtttacggaaaaataatccctaatcaccattcaaggtccaagaaacagggtagaaactattttggcgcattgatctcatttgaaacccctgaatttgaaaattcaaaagaggatacacaggcgaatgcggaaaatgggcgccaagatgacaaaatcgatgatgaagtagagcataagttagatcacttccaggaagacatatccgaagtgacaagcgcagaagaaaaacttgagagaaacgaagaggaatcggagaagcaactatatactgtattgaaataa

SEQ ID NO: 78102 - DNA, 945 bp, Saccharomyces pastorianus
atgccatctaccactaatactgctgcagcaaacgtaatagaaaaaaagccagtctcgttttctaatatcctattgggtgcctgtttaaacttgtcagaggtgactacattagggcaacctttggaggttgttaagaccacaatggctgcaaacagaaacttcacatttttagaatctgttaagcatgtctggtcaagaggtggtatcttgggttactaccaaggtttgattccatgggcatggatcgaagcctccactaaaggtgctgtgttgctgttcgtgtcagctgaggctgagtatcgtttcaaaagtttggggttgaacaactttgcctcaggtatattaggtggtgtcacgggtggtgtcactcaagcctacttaaccatggggttctgtacctgtatgaaaacggtggaaattacaagacataaatctgcctccgcaggtggtgtcccacaatcttcttggagtgtgttcaagaatatttataaaaaggaaggtattagaggtattaataagggtgttaatgctgttgctattagacaaatgaccaactggggttctcgttttggtttgtccagactagtggaagatggtatcagaaagatcaccgggaaaaccaataaagacgacaagttgaatccgttcgagaaaattggtgccagtgctttaggtggtggtttaagtgcttggaatcaaccaatcgaagtcattagagttgaaatgcaatctaagaaggaagatccaaacagaccaaaaaatttgactgttggtaagacatttaaatacatctatcaatcaaatggtctaaagggtctttaccgtggtgtcaccccaagaattggtttaggtatctggcaaactgtcttcatggttggttttggtgatatggcgaaggaatttgtcgccagaatgactggtgaaaccccagttgccaaacattag

SEQ ID NO: 78103 - DNA, 543 bp, Saccharomyces pastorianus
atgaaaatccttgttattttatcagtggctcactttaaagaataccaagttattggccgtcgtttgccaactgaatctgttccagaaccaaagttgttcagaatgagaatctttgcttcaaatgaagttattgccaagtctcgttactggtatttcttgcaaaagttgcacaaggttaagaaggcttctggtgaaattgtttccatcaaccaaatcaacgaagctcatccaaccaaggtcaagaacttcggtgtctgggttagatacgactccagatctggtactcacaatatgtacaaggaaatcagagacgtctccagagttgctgccgtcgaaaccttataccaagacatggctgccagacacagagctagatttagatctattcacatcttgaaggttgctgaaattgaaaagactgctgacgtcaagagacaatacgttaagcaatttttgaccaaggacttgaaattcccattgcctcacagagtccaaaaatccaccaagactttctcctacaagagaccttccactttctactga

SEQ ID NO: 78104 - DNA, 90 bp, Saccharomyces pastorianus
atgtttaaaatgaaatttggcgataccttgccacggtcagattttggtacaggagggaacaagcaggcgcccggcttagagttgggctaa

SEQ ID NO: 78105 - DNA, 1329 bp, Saccharomyces pastorianus
atgatcaccggtaaagaattgagaatcatctctcttttgaccttagacacggtttttttcctattggaaattaccataggttatatgtcacattcattggccttgattgccgattcatttcacatgttgaatgatatcatctctcttttagtggcactatgggctgtggatgtggccaaaaacaggggtccagacgctaaatacacttatggatggaaaagagcggaaattttgggtgctttaatcaatgctgtttttcttattgccctgtgtttctctattatgattgaagctttacaaagattgattgaacctcaagaaattcaaaacccaaggttagttttatacgttggtgtagcagggttaatttctaatgtcgtaggtttgtttttgttccacgatcatggcagtgatagtctgcactcacactctcatggctctgtggaaagcgggaataacgatttggacatagaatctaatgcgactcattcccactctcatgcatctcttccaaacgataatttggccatcgatgaagatgctatttcgagtcctgggccctcagggcaaattggtgaagtgttgccacaatcagtagtaaacagattatcaaacgaaagccaacccttattgaaccacgatgatcatgaccacagccatgaatcgaagaaaccaggtcatcgctctttgaatatgcatggtgtcttcttacatgtactaggtgatgctctgggtaatattggtgttattgcagctgctttgtttatttggaaaactgaatattcttggagatattactcggatccaatcgtttctttaatcatcaccattattattttctcttccgctctgcccttatcacgtagagcttcaagaattttactacaggctactccttctacaatttctgctgatcagattcaaagagagattttggcagtacctggcgtgatagcggtccatgacttccacgtctggaacttaactgaatcaatatatattgcatctatccacgttcaaatagactgtgcacctgataaattcatgagctccgccaagctgataagaaaaatattccatcaacacggtattcattctgcaactgttcaaccagaatttgtttctggagatgttaatgaggatattcgcagaagattttctatcatagcaggtggttcaccatcttcgtctcaagaagcctttgacagccatggaaacactgagcatggtagaaaaaagcgttcacctactgcctatggtgctactacagcatcatctaattgtattgtagatgacgctgtaaactgcaatacttccaattgcctgtaa

SEQ ID NO: 78106 - DNA, 1068 bp, Saccharomyces pastorianus
atggtactttgcaaattactgacaccatattccttactgtcaattttgagtgtcggcgtgttcacggcgaccgccgcgccatcgcccagtattcaaatgacggaaaatacaaatcaagatcatcatgagcatgccaagcgtggaggaacgtgtgcgttccctaactacgatgggatggtcgcagtacaaaaaggtggatctaatggaggatgggctatgagccctgaccaagaatgttcctacggttcatggtgcccttacgcttgcaaaccaggtcaactaatggggcaatgggacccttcggctaccacatactcttatcctaaatgtcaaaatggaggtttgtactgtgattctaacggtaacttgcaaaagccaaacagtgataaagactattgttatgatgggaagggaaccgtaatagcgaaaaacaacgctaacagcggtgacgttgcattttgccagaccgtgcttccgggcaacgaagctatgctgatcccaaccttagtcggctctgggtcaaagcaaacgctggctgtgcctggtacagactactgggcctccaccgcgtcgcattactacgtaaatgctcccggtgtaagcgtagaggatgcatgccagtggggtagtagtgcaaatccacaggggaactgggccccatttgtagctggttccaacatggacgacagccagaacacttttgtaaagattggatggaaccccgtctacctggaatcttcatgtccgttcaagaacgttaagccttcattcggtattagaattacttgtgatgacgaatcacaatgtgaaggcctaccatgctccattgacccaagttctaatgcagtcaacgaagtgacaagttctggcggtggttcttccggggctggtggtggaaacttttgtgttgtcaccgccagaaacggcgccaaggccaacatcgaagtttttgatgttggtagcggctcatcttctaaaggcaagagagaactgaatccgctagacgttattaccacaacggtcaccgagaccaagtacaagacagtcaccgtcactgccaaaacttag

SEQ ID NO: 78107 - DNA, 315 bp, Saccharomyces pastorianus
atgggcttattttcatttgatggtggcaaaaaggaatcacaaccccctaatacccgttcacagagaaagttgtgctgggagtccagggacgcattcttccagtgtttggacaaggcagacatcttggacgcaatggaccccaagaatagcaagagtataaagtcgcactgcaaggtggaaaatgaaaaatttgaggagaattgcgcccatagctggatcaagtacttcaaggagaagagggtcatcgactttaagagagaggagaccatcaagagaatcgagcaggaagctaaacagagggaacgaaatcagtga

SEQ ID NO: 78108 - DNA, 621 bp, Saccharomyces pastorianus
atggtctcctctctcttaaagtcgatgaccctcttctccttgaagtacttgatccagctatgggcgcaattctcctcaaatttttcattttccaccttgcagtgcgactttatactcttgctattcttggggtccattgcgtccaagatgtctgccttgtccaaacactggaagaatgcgtccctggactcccagcacaactttctctgtgaacgggtattagggggttgtgattcctttttgccaccatcaaatgaaaataagcccatcgctatattactactattcctttctgtatattcgtgtatctatgttcctgcacagcgctacaatagtacccgtctatgtatgtatgtatgtatgtatgtaggcgaatcttctcccccattctacaaagcagcacctaccaccgcagcaccgtttcacatgtccgtctcttttgttcagctcagctacaatcgtcaatcgcactttcttccgcgcgggcgagcccggttttgttggatttgctcaggtgccgatataccatcaaggaacggacagggacctgacaatacaataggccatttacatcacaatgcacagggacagaaatttatacacgataacaataccaactaa

SEQ ID NO: 78109 - DNA, 2085 bp, Saccharomyces pastorianus
atgaccgaacaatattccgttgcagttggcgaagccgccaatgagcatgaaaccgctccaagaagaaatatcagggttaaagaccagcctttgattagacccataaactcctcagcatctacactgtacgaattcgccctggaatgttttaccaagggtggtaagagagacggtatggcatggagagatattatagatatacatgagacgaaaaaaaccatagtcaagagggtggatggtaaggataagcccatcgaaaaaacatggttgtactacgaactgactccctacataaccatgacatacgaggagatgatctgcgtaatgcacgacattggacgtgggctgataaagattggtgttaaacctaacggtgagaacaagttccacatctttgcctctacttctcacaagtggatgaaaacttttcttggttgcatgtcacaaggtattcctgtggtcaccgcgtacgacactttgggtgagagcggtttgattcactccatggtggaaacagattccgtcgccattttcacggacaaccagctgttgtccaaattagcagttcctttgaaaaccgccaagaacgtaaaattcgtcattcacaacgaacccatcgatccaagtgacaaaagacaaaatggtaagctttacaaggctgccaaggatgctgttgacaaaatcaaggaagttagaccggacataaaaatctacagtttcgatgaaattattgagataggtaaaaaggccaaggacgaggttgaattgcatttccccaagcctgaagatccagcttgtatcatgtacacttctggttccactggtacaccaaagggtgtggtattgacacattacaacattgtagctggtattggtggtgtgggccataacgttatcggatggattggcccaacagaccgtattatcgcattcttgccattggctcatatttttgaattaacctttgaattcgaagcgttctactggaatggtatcctagggtacgccaatgtcaagactttaaccccaacttctacacgtaattgccaaggtgacctgatggagtttaaacctaccgtaatggtgggtgtcgccgcagtttgggaaacagtgagaaaaggtatcctggccaagatcaacgaattgcccggttggtctcaaacgcttttctggactgtctatgctttgaaagagagaaatataccatgtagcggcttgctgagtgggttgatcttcaagagaatcagagaagcaaccggtggaaacttaaggtttattctgaacggtgggtctgcaatcagcatagacgcccaaaaattcctctccaaccttctatgtcctatgctcattggatatgggctaactgagggtgtggctaatgcctgtgtcctggagcctgaacattttgattacggtattgctggtgaccttgtcggaactattacagctaaattggtggatgtcgaagatttgggctattttgccaagaataatcaaggtgaattgctgttaaagggtgcacccatctgttctgaatactataagaatcctgaagaaactgctgcggcctttaccgatgatggctggttccgtaccggtgatatcgctgaatggacccccaagggacaagttaagatcattgatagaaagaaaaatttggttaagaccttaaatggtgagtacattgcattggaaaaattagaatccatttacagatcaaatccttacgtccaaaacatctgtgtctacgctgatgaaaacaaagttaagcctgtcggtattgtggtccctaacttaggacgcttgtctaagctggctatcgaattaggtataatggtaccaggtgaagatgtcgaaagctatatccatgaaaagaagctacaggatgccgtttgcaaagatatgctgtcaactgccaaatctcaaggcttgaatggtattgaattattatgtggcattgttttctttgaagaagaatggactccagaaaatggccttgttacatccgcccaaaaattaaagagaagagatattctagcggctgtcaagccagatgtggaaagagtttataaagaaaacacttaa

SEQ ID NO: 78110 - DNA, 405 bp, Saccharomyces pastorianus
atgtttggtaaagttttcgtaagctacatcagaacaagaattgggttcaaacctttaagcacgatatacacgcctgtttcttcttcttcgcacagcttcgataaggaggcatgtttcccctttaaaaaatggcacgaactgaatatgtcccagaagcaagagtttattcagcgttttgtcaaaaactacaggcaccaatacccaagttctaagaccaatgtttcgctgaaggggctgagtattggcatggacgagcacaatgactcgccatctgtgttcggcatattttataatgatatctggaaatcgtttaagaacgagcaattaggaactaacaatgataatatgaaatcgggtagtaggttcagtcaccccagctttaaacaattgttaatacagaagtga

SEQ ID NO: 78111 - DNA, 1245 bp, Saccharomyces pastorianus
atgaatccatcagtaccgaaggttatggaaagagaaaacaatacacacctactagtttctaaagaaatgaatgatacgagtttgcaactaccgtctactacgagatcactttcaccgaaagagtcaaacagcaatgaagactttaacgtcgatggcaacgaaacaacgctgcaaagaataagtacagattatttgaaaccaaatattgggcttgttctcttgacagtatcatatttcttcaactcggccatggtggtgtctactaaagtcttagaaaacgatcccgatgatattgccaatgatagacagatcaagccattacaaatcttattagttagaatggtaataacatatattggtacattgatatacatgtatattaataagagcacaatttcggatgtaccatttggtaaacctgaagtacgcaaatggttagtattgagaggttgcactggatttttcggtgtctttggaatgtattattcgttaatgtacttgacgattagtgatgccgttttgatcacttttttggcaccatcactaacaatattcctgtcgtgggttatcctgagggaaagattcaccaaagtggaagcgctcggttcgctgatctcattgctgggcgtggtgttaattgtaaggccttcatttttatttggaactcccgaattgaccgactcttcctctcaaatagtagaatcatcggacccaaaatcgagattgattgccactttggttgggttgtggggtgtagtagggatgagttgcgtctacatcattattcgttatattggtaagagggctcacgctataatgagtgtgagttatttttctttgatcacagcgatagtgtccttcattgggattaacactatcccttcaatgaaattccagataccacattccaaaaaacaatggatactgtttggtaatctaggtgtgtccggctttatcttccagctgctattaactatgggtatccaaagagaacgtgctggaagagggtctttgatgacatacacacaactactatatgcggttttctgggacgttgcactgtacaagcattggccaaatatctggtcgtggattggtatgataatcatcataagtgccacgttgtgggtaataaggataagggcggcaaacaacgaaacaactgccaaggacctaaccccaataattgacgacgaagagaactctattcccctgacagagtttgacctatccgattctaaataa

SEQ ID NO: 78112 - DNA, 567 bp, Saccharomyces pastorianus
atgcctttagaatccatatgggccgatgcccctgacgaagaaccaataaagaagcagaaaccaagtcacaagcggagtaataacaataaaaagaataataatagcaggtggagtaatgaatccagttcaaacaataagaaaaaggattctgtaaacaaagtgaagaataacaaaggtaaccacgaaagtaaaacgaaaaataaaataaaggaaactcttcccagagaaaagaagccgcctcatagtcagggcaaaatatcgcctgtaagtgaatcattggcgataaatcctttctcccaaaaagcaacagagatatctcctccaccagtttcacctagcaagatgaaaactaccaaaacacaatccaaacaggataccgcttctaagatgaagttattaaaaaagaaaattgaagagcagagggaaatattgcaaaagactcatcacaagaatcaacagcaacaagtgttgatggattttctgaacgatgaagggagctccaactgggttgacgatgatgaagaggagcttatccttcaacgtttgaagacctctttgaaaatatga

SEQ ID NO: 78113 - DNA, 183 bp, Saccharomyces pastorianus
atggctaataaagttattcaactacagaaaatcttccaatcttccactaaacctctatggtggagacatccaaggtcagctttatacctgtatccattttatgctatttttgcggtagccgtcgttacaccacttctatacattccaaatgctattagaggtatcaaagccaagaaggcatag

SEQ ID NO: 78114 - DNA, 1662 bp, Saccharomyces pastorianus
atggcattccaagatcaagatatattcatagtgttctcgcatgcctccttatttcttaatcaaaatgatttattaagcctaagtctaacatccaaaaaaatgcatgacatgattgcaatccctcgtctttatagcaatattcacataactaagaatcctgttttaagaacaaacaaatggtttttggacgggggaaaaacttatgtaagtggttatagatctgttctgaaaaccggtgacaagaatgacatatttttatatgatagaattgaaaggttgttggagacatcgcatttaaaatgtataaaacagctgactattgacgaggatttgtttcacaacagggaagaaggattgcaactgttacaaagattggtcaatgaaatcactgacttggacgtgattgaaagtcttgacatcaaggatcctaccttgtttgagttatgttcagcaaagtattatcgcctgtcaagtttaaagaagagagtagtatatggcgaaactggatttgatggtatcaaattatggcaaaacttcaaaagcttaaaatggcaattacctgaatcgttggatttgcaaaacgtaataatccctgaagtgggtgtaatgttaatgaagcaacttaatggaggagagttagaaataaaggacgaagcgtactcaagcctaagggtctttgaatactttgattccctgaacctccgcttcaagaatctgcgccgtttgaagcttaatcatgttcacaaacaaggtgatgggagtgctacttctatgagattatcttcacgcgcgtttaaggatgtagttaatttatccaatcttaaagcccttgaattagaattttcttgtgaggtggacgactgtgaatgtgatgatgactttcttcaagatataacaggaaaccttgtttccttaacaagtctggggttcattgaaaagacattcaccaaaaaagggtaccattacatggacgagaaatgggacttggtcgttaataagtttattttaaatttaccaaacgtgagtaaagatttgcgtttgttaagcatacgacatgacccacctttaaatggcaagggcattgatactgttgatgggaacttgcttcgccgtaaaaaactttatgaaaaggttttaccaaagctaacttcgttggaaacaataatagctccaactgtattgcagtccatcacctcatatgaaatgtatgcgtgtgaccttttgtggaacggctgcaaatgtgcgttctgctccaaatacttaccattatttgataagtacatcatgaatcatcaatacttttcgaccccggatgcaagatacttggatattataccgatagtgtttgcagcatatactggaaaatctctagctaagaggtttgatcctcagaagaactgggatttggatttgctacagtatgcccctgaggatacgacgtggaatttccatggctttgagagaattcatcactttgcaagttatgaatgttattttgacgaatcctcatttgagcccttagccactattatatcgcattttttttatccttacatgaactacttgataaagatattgccaaaccttcgccaaactatgttgtcaggaatatactttagcgtgagcccagaattacacacttatgaaactatttatgattaa

SEQ ID NO: 78115 - DNA, 462 bp, Saccharomyces pastorianus
atgggtaagaaaaacactaaaggtggtaaaaaaggtagaagaggtaagaacgactctgacggtccaaagcgtgaacttatttataaggaagaaggccaagaatatgctcaaatcaccaagatgttgggtaatggaagagtcgaagccagttgctttgatggtaataagagaatggcccatattagaggtaagttaagaaagaaagtctggatgggacaaggcgatattattcttgtttccttaagagatttccaagatgaccaatgtgatgttgtccacaaatataatttagatgaagccagaacactgaaaaaccaaggtgaacttcctgaaaacgccaaaattaatgaaacagacaactttggcttcgaatctgatgaagacgttaactttgaatttggtaacgctgatgaagatgatgaggaaggtgaagatgaagaacttgatattgatgacatttaa

SEQ ID NO: 78116 - DNA, 3165 bp, Saccharomyces pastorianus
atgactattatcgtcgcttctttattcttaccatatacccctcaattcgaggctgatgtcaccaactcggatactgctaagctggttgaatcaagtatgatcaaggtagactgcaacaaccaggaattgagcaacaacaagcaagaaagaagcagttctgtaacttcggcaagctctcattatattggcttacctcaggaggcgcaaattaacggtgaacccttacaaagggccaatatgggctctcctgctacgggagttaactatcataatgagatggaaatgctttcctccgagcaattcctggaagagctgactgccaatgctactcatgcagcaaactctggtattccgccagctaataacccagtttcttctggctcaactgcccagcggccttcagtcgaggaattcttttctgctccgtctgctagagtctgttctccctcccaggaagcttctgcttcgtctatttctgctagtcgttcatcggctcaccacaacgatttgagctccagccttatgaaaaatcccaatttgtcatttgattcacatccacccagggtcagaagctcatccaagagtgctgtaatcactcccgtctctaaaagcgttccagatgtcgatcctgctgttgtagatgtcgcaaaagttagagaagagtttcaacagcaagcctccttgccttccatgaaaagagtttccggaagcaccgctggagactcttccattgcttcttcgagttctaatctcaggtactcacagcaatttcaggataactttatcgaagacactgatagtgaggatgacattgattctgatttggagaccgatgctactaagaaatacaacgtcccaaaatttggtggctattccaataacgcaaagttaagagcatctctaatgagaaactcgtatgagctattcaaacatttgccatggacaatagtcgacagtgacaaagggaacggatccttgaaaaatgcagttaatattgcagttgctgaaaagacagtgaaagaacctgtttcctgggtaggtacaatgggaatccctactgaagaacttcctcacgaagtttgccataagatttcaaagaaattagaacaggatttctcttcttttccagtggtcacggacgatattacttttaagggtgcttataagaactacgccaaacagattttatggcccactctacattatcaaattccagataatccaaattcaaaggcttttgaagaccattcttgggactactatcaaaaagtgaatcaaaagttttctgatagaatagtttccgtttacaaacctggcgacacaatttggatccatgattatcatttgatgcttgtcccacaaatggtgagagagaaactgcctaaagctaaaattggatttttcttacacgtatcatttccaagtagtgaggtcttcagatgccttgctaacagagaaaggattcttgaaggtatcattggtgcaaactttgttgggtttcaaactaaagaatacaaaagacatttcctacaaacttgtaacagattgcttgctgcggatgtctctaatgatgaagtcaaataccattgcaatattgtttccgtgatgtatgcgccaattggtattgattattaccatttgacatcgcagttgagaaatggttctgtacttgaatggcgccaattaattaaagaaagatggcgtaataaaaaactgattgtttgtcgcgatcagtttgacagaattagaggtcttcagaaaaaaatgttagcctacgagaggtttttgatagaaaaccctgaatacatcgaaaaagttgttttgatccaaatctgcatcggtaagagttccgatcctgagtacgaacgtcaaattatggttgtcgttgatagaatcaattctttgtcttcgaacatcagtatctctcaaccagtggtctttttgcatcaagatttagattttgctcaatatttggcattgaattgtgaagctgacgttttccttgtggatgcgctgagagaaggtatgaatttaacatgtcatgagttcattgtcagttcattcgaaaaaaatgcgcctctattattatctgaattcactggtagttcttctgtcctaaaggaaggtgccatcttaataaacccatgggatataaatcatgtagcacaaagtatcaagagaagtttagaaatgtctccagaagaaaaaaggcgtaggtggaaaaaattattcaaatctgttattgaacatgattcggataattggattacaaagtgcttcgaatacataaataatgcttgggagtccaaccaagaaacgtctactgttttcaatttggctccagaaaaattctgtgctgattacaaagcctccaaaaagcatttatttatcttcaagatttcagaacctccaacgtccagaatgctatccttgctaagtgaattgagttcaaataatatagtttacgttttgagttcatttacaaagaatacattcgaaggcttatacaatggtgttctaaacatcggattgatagcagagaatggtgcctacgtaagagttaatgggtcgtggtacaacatcgtggaagagcttgattggatgaaagaggtggcaaagatctttgacgagaaagtcgagagattacctggttcatattacaaaatcgctgattctatgatcagattccatacagaaaacgctgaagatcaagatcgagtcccaactgttattggggaagccattacgcacataaacaccttatttgatgacagggatattcacgcttatgtgcataaggatattgtcttcgttcaacaaacggggctagccttagccgccgctgagtttttgatgaaattttacaacagtggcgtcagtcctactgacaatagcagaatatctctatcaagaacatcctcttcgatgtccgtcggtaataataagaagcatttccaaaaccaggtagatttcgtttgcgtttccggttcgacatcacctattattgaaccattatttaaattagtgaagcaagaggttgaaaagaacaatctaaaatttggttacaccattctttacggtagctcaagatccacttatgccaaggaacatatcaatggtgtcaatgaactttttaccatccttcatgacttgacagccgcctaa

SEQ ID NO: 78117 - DNA, 942 bp, Saccharomyces pastorianus
atgaataaacttgttgatgcccactgtcatgttataaccgacccagacaacacattctgcggtgatgatggagggtcccagggtacgttgcgttgcgttatgtcatcaaacccatatgactggaacaatttgaaaaaattggctggcagaagcacaagtaaaaacgatatatgcgtgggatttggtgtgcatccttggtacagccacttattttatgtgggaagtcggcgcgacaaggtttctcactatcaagatgtactggagtataagaatgaagaacagttcgacagtttggttcaggtgcttcccgaacctctagatcttgaagagtatataaaaagagagtttaacgacactttggttagtgtgattggagaaatcggtcttgataagctcttcagacttcctgcaaatggtttctacatgcagaacgagaaggcaaggcttacgacagtgaaggtcaaactatcgcatcaagaaacagtattcaggcgattttgccgactggcaaggcacacaagcaagcccatctctatacacgatgtaaagtgccacgggaaactaaacgatatctgcaatgaagagctcttgacgtatcactctgtcaagatatgtttacattcgtacacaggctccaaggaaacgcttctgggccaatggctcaagaagtttcccccggatcgtatttttgtgagcctatccaaatggattaattttaaggacccagaagagggagatgccctggtcaggagcttgccctcaacttgcatacttactgaaaccgactattctattgacaatccagatccgtcataccaaaaggcccttacagagcagctgcagtatttgaatgcacaaatcgcacgagcatgggacgagacactggatgcctcacaagccgctttgcgtgtatacgaaaactttcagaaatttatcaagtga

SEQ ID NO: 78118 - DNA, 612 bp, Saccharomyces pastorianus
atggaggattcgagattgcttatcactttgattcttgtgtttggagttatatttctgaaaaaattcttccaaagtaatcagcatccctcagcacaacgcttatccgctacaggtgtaaacgcacacggacgtcctcagggctccacgcagaatgccttgagaaggactggtagagtcaatggaggtcaccccgtgactactcagatggtggaaacagtgcaaaatctagcccctaacttacatcctgagcaaattaggtatagtttggaaaacacaggctcagtcgaggaaacagtggaaaggtacttgcgtggtgatgaattcagctttccacctgggtttgagccctccagggtgccaatgggggccaatgcggctgttgataataacgctgctggtggcggagagtttaacgatcccagaaagaagaacatgatttgcgctgagaatctactcgataaattccatgtggatctcaatgaagatatgagtaacttaagctttaaggacttagacattgaagagagaaagagattgttggtttggcaagccagaaagaatttggagacaaaattgcaaagtgataaagatttgcaaagtttgctgacttga

SEQ ID NO: 78119 - DNA, 2862 bp, Saccharomyces pastorianus
atgaatagtactaatagtactaatagtactacaacagctaccagtacaaacacgtcaactcaacaagtcgttacggctttggtaagtaatggtactatttttggtgtttttgtcatagcgttcttgattttgcgtataaaactaaaaaggatttatgagcccaaatcctcattcaatctgattaatgaagaaaaaaagccagaaccgctaccgcggggcgtatggcaatggctgaagccgttattgaaaaaatcagacaattttgtcattcaacaagccggtctggatggatatttctttttgaggtatcttttcatcattgcaatttactgtgctgtttccatgagttatatattccctattttgttgtcgattaacgccagtaacggtaaccatgaaagcggattgaatcaattggcctatcagaacgtcaagcaccgtggtagatattttgcacatgttttctgtggatggattttcttttgggggttcctttacattatttacagagaattgtatttttacacctctatgaagcaagctgtactagcgtcccctcgttatgctaaaaaactatcctcgagaaccgtgttattccagactgtccctaagcaatacttaagtgaagaagagttttctaagttgtttgatggtgtgaaaagagtctggatcgcaagaggttccggttcaattgaagcaatggtcaaagcaagggacaatatggccatacaattggaaggtgctgaaacaaaatacctgaaagcagcattgaaaaaaattaagaagttaaacaaaaaaagtccgcaattatctgtctctgataatattgctgaatatgtccctgacaagaaaagaccacatcataaaattaacaaggttgctaaattcttttttggtaaaaaagttgacaccatatcctacattaaggaggagttgcccaagttaaaccaaaaggtgaaggcattacaagaagatcatgaaaattcatcccctttcaactctgtttttgtggagtttgaatcccaatatcaggcccaagttgccgctcagatcaccacataccatgctcctcttttcatgacgcctacgtatattggtattgagccatccgatgtcgtttggtttaatttgaggatgttctggtgggaaagattaggtagggaagtcagtgcggtttcagcaattgtcgcgctggtaatattatgggctttcccagtggcttttgttggtatgatctctaatattccttccttgactaatgaagttaaatggttaaagttcatctataaattaccaaaacaactattaggtttactgacatctctggccccaactgtggcattggccgttttaatgagtttcttgccgaaatttattaggggtatggctatcactcaaggtgctccatctaagcaaaatgtggaatatttcactcaacaagcttatttcgcctttcaagttatccaagtctttttagttaccactctatcctccgccgccacttccacagtaacggaaattgttaaagagcccacgaaggctatggatctactggcttctaatctgccaaaagcttctaattttttcatgtcatacgttattctacaaggtctgtccatttcatcaggtgctcttttgcaaattgttccactaatactcttttatgttttaggtgcctttttagatggtaccgtcaggaagaaatggaatcgtttctgtgggctatccagtatgcagtgggggacaacttttccagtttatacaaacttggcagttattactttctcctactccatcatttctccgttgattttattatttgctgccgtcgcatttttcctattgtatatcgcatatttatacaatttgacttatgtctatcaggaatcacccgacgcaaggggtatctattatccaagagctcttttccaaactatagttggtatctacatcggtcagatatgtctattaggtctttttgccgttggtaaaggttggggcccaatcgttttacaggtaattggaatttgtgttactgtccttgttcatttacatttgagcgctgcatttgatcatttatcaaaggttatacccgttgataccatgaaaccgttagatggtgtatcagatacaccttctttcaaaaatatttacaaaggcatagaaagtacaaaggtgaagaaaaatgcttttggtgcaaatattgacatggacggaatcaaagaattacctgaatttccaataaagaaatatcacaagaggagtgaatcagtcactgagcaacaagttgaaaacagcctatttagtgaaaatacattcgaatatcaattcaacccagcaaatgaagcaaatgcagatgggcacgctataaatgcagaaaatgtaattgaggacgtgccattattagcagatggtgatacaatgaaaattcctccggctccatggtggaagagattcttgaaacctcacatttactactcctataaggctgtaaagagcagactgccagaaatatacggtttggttgatcctaatgaaagagtcaatgatttcgatatctctcatgcttacgattatccagctgttagtgcacaatgccccgaattgtggattcctcgcgatccttatggattttccaaattgttgatttcagacgtttctgggattgttgaaatgaacgatgaaaatgctaccatcgatgagaatttagaattcactctgcgtgacgtaccaccatcatataatgatgttaaagacgaagcgacaggtgaagcaaatggcgaatttgacacagctagtaaggaaaataatccatttgcggacccaaagtataaggaagaagagagtcgttcggcagtctaa

SEQ ID NO: 78120 - DNA, 933 bp, Saccharomyces pastorianus
atgaatttattacgaatgaatgctttaacaagcaagactaggtcaatagaaaggttaaaacaaacattgaatattttatctattcgtaatcatagacaattcagtaccattcaacaaggcagcaaatataccctcgggtttaagaaatatttgacattattaaatggagaggttggttctttttttcatgatgtccctttagatttgaatgaacatgaaaagaccgtaaatatgattgttgaagtaccaagatggacaactggaaaatttgaaatatccaaagaacttaggttcaatccaatcgttcaagatacgaagaatggcaagcttaggttcgtgaacaatatttttccctatcacggctatatacacaactatggtgctattcctcaaacatgggaagaccccacaattgagcataaactggggaagtgtgacgtggctttgaaaggtgacaatgatcctcttgattgttgcgaaatcggttcggatgtttcggaaatgggttccattaaaaaggtcaaggtattaggatcactcgctttaattgatgatggagaattggattggaaggtcatagtgatcgacgtaaatgatcctttatcctctaaaatagatgacttggaaaaaattgaggagtactttcctgggattctagatacgactagggagtggtttagaaagtataaagttccagcagggaagccattaaatagtttcgcctttcatgaacagtatcaaaattccaataaaaccatccaaactataaagaaatgtcacaattcgtggaaaaacctcatttcaggatcactccaggagaagtatgacaacctgcctaatacagaaagggctggtaatggtgtcacacttgaagatagtgttaaacccccttctcaaataccgcctgaggtgcaaaaatggtattacgtttaa

SEQ ID NO: 78121 - DNA, 1335 bp, Saccharomyces pastorianus
atggagtatggacatcacgctagaccagattcaaaacgaccattggatgaaggatcaccagcagccgcaggattaacttctaagaaggcgaacgaagctttaacaagaaatagagaattaacaactgtattagtcaaaaatttgcctaagagctataatcaaaacaaagtctataagtacttcaaacattgtgggcccattatacacgttgatgttgcggattcgctgaagaagaactttcgttttgcacgtattgaatttgccaggtatgatggagccctcgctgcaataaccaaaacacacaaagttgtaggtcagaatgaaattatagtatctcatttaacagaatgcacattatggatgacgaatttccccccaagttatactcaaagaaatattagagatctattgcaagatattaacgttgttgcactcagtatacggcttcccagtttacgattcaatacaagcagaaggttcgcttacatcgatgttacttctaaagaggatgcaagatattgtgtagaaaaattgaatgggctcaaaatagaaggttatactttagttactaaagtttccaatccgctggaaaagtcgaaacggaccgattctgccacactagaggggcgagagattatgatacgaaacctaagtacagaattgctcgacgaaaaccttctgagggaatcttttgagggatttggttccattgaaaaaatcaacatacctgctggacagaaagagcacagtttcaataactgttgtgcatttatggtttttgaaaataaagattctgctgaaagggcacttcaaatgaatagaagtttgttaggtaatagggaaatttccgtttccttggctgataaaaaaccattcttagaaagaaacgaagtcaaaagacttctcgcatcgcgtaacagcaaagaactagaaacactaatatgcttatttccactttcagataaggtgtcaccaagcttaatctgccaatttcttcaggaagaaatacacatcaatgaaaaagatattaggaaaatacttctcgttagcgacttcaatggcgccattattatatttagagatagtaagtttgcagcaaaaatgctaatgatactaaatggatctcaatttcagggaaaggtgatacgttcaggtactattaatgacatgaaaagatattataacaatcaacagaatcacagcatgaaacacgtcaaacctagttgtataaacgtgatggaaaaaggaccaaatcttcaagtaaagaaaaaaattcctgacaaacaagagcagatgtccaacgacgattttcgcaagatgtttctaggtgagtag

SEQ ID NO: 78122 - DNA, 1098 bp, Saccharomyces pastorianus
atgagtgatcttgacgaagaaagtcaaattgaaactcagatcgatgctcctatcgaagatattatacgaggatctgagcttaccactacaaccgctgataaagagactttgaaatctgcaaatgaattattagattctctagaacactcgcacagagtcgacctttcgttgcatttatactctgcgtacctcttgaaaagactattgtataaggcaaatgaaaaaaaacatttttatgaagtaaaccagtttgtgaagacccaaattaaggataactggacgagctggcctaatcccaatacaatcattgaccctagtgtagacaaattgtatgaagatataccggaaggtattgcaaatgtaagcgtacagccgggggagatctcaaatagggctttaatgcacgcctctgatatgatgagggttgagctggatgctcaatggcaaaaatttctctctaagtctgccttggaccatgatgtaactctagatgtggatgaattgaacattccaaacgaaatatcccggaatatcttagttaaactggacagcttattcgaagggttgcatgataaaatagccaaagagaacgaattcgatgtaaggcaagataagcattctaataatataagggcgaatcagatagacgacgagcccatgcaggccaatcgacgaattaaatacacatatcatgacttggtttcaagaggttgtgaaatgaacgaggatatgacggatatctacatgaaatcattagagctatataacgatatcccagaaaagtataaaaagagaaaattcagactgcccaaacaaattctaaaaaagtatcaccagccaaaaaagaccagttcatacttaaaggagctattaagtaaaacaagagaagatttcatacctgtggaaaagttattgaaggataaacggttgacatcaaaggacaaatccaagctacaacgcttaaatcgtgaagagacggaagatgctctaaacaaaagaacattttttcaggtaaagggctacttagaggatgagaatgagatctctgattacgagttggacgactgcctcatagaactgcctaatgggaacatatga

SEQ ID NO: 78123 - DNA, 684 bp, Saccharomyces pastorianus
atgtctgcatctactacaagtttagaggaatatcaaaaaactttccttgaactgggattagaatgcaaagcactaagatttgggtcattcaagctgaattcaggcaggcagtcgccatattttttcaatcttagtttgttcaattctggaaagctgttggcaaaccttgccaccgcgtatgcaactgctatcattcaatcggagcttaaattcgatgttattttcggacctgcttacaaagggatccctttggctgctattgtatgcgttaaactagcagaaatcgggggcactaaatttcaaggtattcaatatgcttttaatagaaagaaagttaaagaccacggcgaaggtggtattattgttggagcatcgcttgaagacaagagggtgttgattatcgacgatgtcatgactgcaggaactgcaatcaatgaagcatttgagataatcagtattgctcaaggtagggtagtgggttgtattgttgctttagataggcaagaagtgattcatgaatctgatccggaaagaacaagtgctacccaatctgtttcaaagagatacaacgttcctgtgctaagtattgtatcactgactcaagtggtacaatttatgggaaatagactatcaccagagcaaaaatcagcgattgaaaactaccgtaaggcctatggtatatga

SEQ ID NO: 78124 - DNA, 108 bp, Saccharomyces pastorianus
atgagaagtttggtgtttgtccaactttccctgttgtcctgggaaatattctgtggggaacgtagctttgtgagcatgaaagctatcttttcgtgtatgtacgtgtga

SEQ ID NO: 78125 - DNA, 2730 bp, Saccharomyces pastorianus
atgtccaatagagataatgagagcatgctgcgtactacatcaagcgataaggcgatcgctagtcaaagggataaacggaagtctgaagttttgattgctgcacagtcccttgacaatgaaatccgcagcgtaaaaaacctaaaaagattgtcgattgggtcaatggatttacttatggatccagaattagatataaaattcggtggggaatctagtgggagacgatcatggtctggcacgacatccagttctgcgtcaatgccaagtgacacaaccaccgttaataacacacgatatagcgatccaactccgctagagaacttgcatgggaggggtaactcagggatagaatcctccaataagactaaacaaggtaactacttaggtataaaaaaaggtgttcactctccatccaggaaattaaatgctaacgtattaaagaaaaacttattatgggttcccgccaatcaacaccctaacgttaagcctgataatttcctagagcttgtacaagatactttacaaaatatacaactaagcgacaatggtgaagataatgatgggaacagcaatgaaaataacgatattgaggataatggggaggataaagaatcacaatcatatgaaaataaggagaacaacactatcaacttgaacagggggctgtcaaggcatggaaacgcgtcactaatacgaaggccttcaacattgcggaggtcatatacagagtttgatgataacgaagatgacgataataagggagacagtgcctctgaaacagtaaataaagtcgaagaaagaatctccaaaataaaagagagaccagtgtcgttaagagatataactgaagaactgacaaagatctcaaatagtgcaggactaaccgacaatgatgccattacattagccagaactcttagtatggctggttcatattcagataaaaaagatcaaccacaaccggaagggcattatgatgaaggagatattggtttttcaacttcacaagcgaatactttggatgatggtgaatttgcctccaatatgcccatcaataataccatgacatggcctgaacgatcgtcactgagaaggagtagattcaacacttatcgaatcaggtcacaagagcaagaaaaagaagtagaacaaagtgtggatgaaatgaaaaacgacgacgaagaacgtctaaaattgaccaagaatacaataaaggtcgaaatagatccgcacaaatccccttttagacagcaagatgaggattctgagaatatgagttcgcctgggtcaattggtgattttcaagacatttataatcattacagacagtctagtggcgagtgggaacaagaaatgggaatagagaaagaagccgaagaggtacccgtcaaggttcgaaatgacacagtagaacaagacttagagttaagagagggaacaacagacatggtaaagccaagcgcaacggatgacaacaaagaaacgaagcgacatcgtcgaagaaacggatggacatggttgaacaataaaatgagcagagaagacgataacgaagaaaaccaaggggacgatgaaaatgaagaaaacgtggattcacaaagaatggagctcgacaattccaaaaaacattatatttctctatttaatggcggtgagaagacggaggtgtcaaataaagaagaaatgaacaattcaagtacttccaccgccacatcacagacaagacagaaaatcgagaaaacttttgcgaacctattcagaagaaagccacaccacaagcatgatgcatcatcatcaccctcgtcgtcaccatcatcgtcaccatcaataccaaataacgatgccgtgcacgttcgcgtgaggaaaagcaaaaagcttggtaacaaaagtggaagggagccggttgaacccattgtgttgcgcaatcgccctcgtcctcaccgtcaccatcacagccgtcatggttcccaaaaaataagcgtaaaaacccttaaagattctcagccgcagcagcagataccattacaaccacaattggaaggcgcaatagagatagaaaagaaagaggaaagcgattccgagagcttgccccaactacagccggccgttagtgtaagtagtaccaaaagtaactctagagacagagaagaagaggaggcaaagaaaaagaacaagaagaggagcaatacgatagaaatttccaaccaacaacactccaaacacgtccaaaaggagaataccgatgagcaaaaagctcaactacaagctccagctcaagaacaagtccaaacttcagtcccagttcaagcttcagccccagtccaaacttcagccccagttgaagcttcagctcaaactcaggctccagcggcaccaccattgaaacatacctccatattgcccccaagaaagcttacatttgcagacgtcaaaaaacctgacaaaccaaactccccggttcaattcacagacagtgcctttgggttcccactgcctttgctgacagtgtctacggttatcatgttcgaccaccgtctaccaattaacgtcgaaagggccatataccggctgagtcacttgaaattgagcaattcgaagaggggactgcgcgagcaggtattactaagtaacttcatgtatgcttatctgaacttggttaatcacactctgtacatggagcaggtagcccacgacaaagaacaacaacaacaacaacaacaacaaccctga

SEQ ID NO: 78126 - DNA, 1122 bp, Saccharomyces pastorianus
atgtcgttgaatatacatatcaagtcaggacaagacaagtgggaagtaaatgtggcacctgaaagcacagtgttgcaattcaaggaggcgataaacaaagcgaacggtatcccggtggcaaatcagagattgatctactcgggtaagattttaaaggacgaccaaaccgtggagtcataccacattcaagatggtcacagcgtccatctggtcaagtcacaacccaaaccacaaaccgccagtgccgctggcgcaaataacgccaccgccaccggtgcagcagctggcactggcgccaccccgaacatgtcgtccggtcaaagtgcaggcttcaatccgctggccgacttgaccagtgccagatacgctggatatttgaatatgccatctgcagacatgtttggcccggacggtggtgcattaaacaacgactcgaataaccaagacgagctgttgaggatgatggaaaaccccatcttccaatcgcaaatgaacgagatgttgagtaaccctcagatgttggactttatgatccagtccaacccgcaattgcaggccatgggtccacaagccaggcaaatgctacaaagtcccatgtttagacagatgctcaccaatcctgatatgattagacagagcatgcaattcgcaagaatgatggaccctaatgccggtatgggctctgcaggtggggctgcctctgccttccccgctcctggtggcgatgctccagaggaaggctccaacacgaacactacttcctcatccaacacagggaacaacgcagggactaatgcaggtaccaacgcaggcgctaacacagctgcaaacccatttgcgtctcttctgaaccctgcattaaacccctttgctaacgcgggaaacgctgcatccaccgggatgcccgccttcgatcctgcattgctagcgtctatgttccaaccccctgtacaagcatctcaagcagaagacaccagaccaccggaagaacgctatgaacatcaattaagacaactaaacgacatgggcttcttcgatttcgatagaaacgtcgcagccctcaggagaagcggtggctccgtccaaggcgctcttgattcactactgaacggcgatgtttaa

SEQ ID NO: 78127 - DNA, 2199 bp, Saccharomyces pastorianus
atgaccacacaaataaggtctccccaaggcttgccgtatccgattcagatcgataaactcattccaagcgtaggttcgtaccttcatgagggtgataggttgcttgtctataagttctggtatttggtggaaagggcctcagacactggtgacgatgataacgagcacgatgtttcccccggcggcagcgccggaagtaatggtgtctctccgccaaccaaacaactgcgtgaatccatagaattcttcgaaagtccctacgagggggacttgattagttggaatgtagacgtaggagatgaagtagccactgctaaccaagtgatttgcgaaataaaaaggccatgtaaccatgacatcgtgtatggcgggctatgtactcaatgcgggaaagaagtttctgcagatgccttcgatggtgtaccactagacgttgtcggggacgtggatttacagattagcgagacagaagccattagaacaggcaaggcattgaaggagcatttgcgacgggataagaaacttatcttagtggtggatttagatcaaaccatcatccattgtggcgtggaccctacgattgcagagtggaagaacgaccccaataatccgaattttgaaacattaagagacgtcaagagctttacgttggatgaggagttagtactcccacttatgtacatgaatgacgatggttctatgctgagaccgcctcccgtaagaaaatgttggtactacgtgaaggtaaggcccggtttaaaggaatttttcgctaaagtggcgcctctttttgaaatgcatatctacacaatggctacaagggcttatgccttgcaaattgccaaaatcgtggaccctacgggcgaattgtttggcgatagaattctgtcgcgtgatgaaaatgggtctctaacaactaaatcattagctaaacttttccccactgaccagtcaatggttgtagttattgacgacagaggtgatgtttggaattggtgtccaaacttgatcaaagttgttccttataacttcttcgttggtgtaggtgacattaattctaatttcttgcccaaacaatctacaggaatgctacaactagggaggaagacaagacagaagagccaagaatctcaggaactgctgacggatattatggataacgaaaaaaaactacaagaaaagatagataaagaagttaaacgccaagaagaaaaattgaaccatcaactggcgactgctgaggagcctcctgcgaacgaatccaaagaagagttgaccaagaaactagaatattcagcatctttagaagtccaacaacaaaatcgacccttggccaaactacaaaaacacctgcatgatcaaaaactactagttgatgacgatgatgaactatactacttaatgggtacgctatcaaacattcacaaaacttattatgatatgctctcacaacaaaatgagccagaaccaaatctgatggaaatcataccaagtttgaagcaaaaagtcttccaaaattgctattttgttttttcaggattaatacccctcgggaccgatattcaaaggtcggacatagtgatatggacgagtacatttggtgccacttccactccagatatagattacctgacgacacatttaatcaccaagaaccctagcacttataaagcgcgtctagcgaaaaagttcaacccacagattaaaattgttcacccagattggatatttgagtgtttggtaaattggaaaaaggtggatgaaaaaccctacacgttaatcgtggacagccccatctccgacgaggaattacaaaactttcaaacacaattacaaaaaagacaagaatatctggaggagacccaggaacaacagcatatgttgacatcacaagaaaatctaaatttattcgctgctggtacttcatggttaaacaatgacgacgatgaagatattccggacacagctagcgacgacgacgaagatgacgaccacgacgacgaaagtgatgacgaaaacaactcggaaggcattgacagaaagaggagcatcgaggacaatcatgatgatacatcgcaaaagaagaccaaggcggaaccttctcaagatcgtcctgtacaacataaaggagaaggggatgacaacgaagacagcgattcgcagttggaggaagagttgatggatatgctggatgattag

SEQ ID NO: 78128 - DNA, 1869 bp, Saccharomyces pastorianus
atgttgcaaggaattttagaaaccgtaccatctgacttgaaagatccgatatcattatggtttaagcaagaccgcaacccaaaaactatagaagaggtcaccgctctctgcaaaaaatccgactggaatgagttacacaaaagatttgattctagaattcagtttggcactgctggtttaagatcgcaaatgcaagctggctttagcaggatgaatactttagtagtcatacaagcgtctcagggattggcaacttatgtaagacagcagtttccagacaatttggtagctgttgtgggacacgatcatagattccattctaaggagttcgctagagctactgctgctgcatttcttttaaaaggatttaaggtacattatttgaatcctgaccacgaatttgttcatacccctttagttccctttgcagtggataagctaaaggcctccgttggcgtaatgataacagcaagtcacaacccaaaaatggataatggatataaagtatactattccaatggatgccaaatcattccacctcacgatcatgccatctctgattccattgacgcaaatttagaaccatgggccaatgtgtgggatttcgacgatgttctaaataaggctctcaaacaagggaaattgatgtattccagagaagaaatgctgaagttatatttagaggaggtttctaaaaatctggtagaaatcaacccattaaagcttgaagtaaaagccaaaccttggttcgtttacactccaatgcatggggttggatttgacattttcagcaccatcgtaaaaaaaacactgtgcctggtagaaggtaaggattacctatgtgttcctgaacaacaaaatccagatccttctttcccaactgttggatttcctaaccctgaagaaaaaggtgctttagacattggtataaacttggctgaaaaacatgacattgacttacttgttgccaacgaccctgacgctgatagattctctgttgctgttaaagatatgcagtcaggcgaatggcgacaactaacaggtaacgaaatcggttttctttttgcattttatgaatatcagaaatataaaagtatggacaaagaatttcagcacgttcatccgttggctatgttaaattcaacagtgtcttcacaaatgataaaaaaaatggcagaaatagaagggttccattatgaggatacattaacaggatttaagtggatcggaaatcgtgccatactcttggaaaagaaaggctattacgttccttttggattcgaggaagcaataggctacatgtttccagcaatggagcatgataaggatggtatcagtgcatccattgtcttcttgcaagcctactgtaagtggaaaatagaccacaatttggacccgctaaatgtcttagaaaatggcttcaaaaaatatggcgtgttcaaagagtacaatggctattatgtcgttccaaatccaactgttacaaaagatatatttgactacatcaggaatgtctacactcctgagggcgcgtcatatccttcatctattggtgaagaaatcgaagtactttactatcgagatttaaccactggttaccaatcggataccataaatcataaacctactctacccgtcgatcctacatcacaaatgataacagtatctgctagaccaagtaacggtagtgagaatgagcatatccgcttcactattcgcgggtccggaacagaaccaaaacttaaagtatatattgaagcttgtgcaaatgaagaacaaagagcctctttcttggcgaaattgacttggaatgtgctgagacgtgagtggtttaggccagatgaaatgaatatagttacaaaattttga

SEQ ID NO: 78129 - DNA, 1743 bp, Saccharomyces pastorianus
atgtggataaatagactggttaaacatccatcctacagtgttctgaggttttacacgaagaggctctgcactgtatcagtgaaatcgctgcgtgaatttggtgtactgccgaatagcacaatatgtcattctgtctatccccgaagaacgtatgtaatgggtagggctgtcataaatgatattttaatcaaaaaatcctattcaactcacacggtatgtgcaattgatcgatcaaaagatgaaaataatgggagcgcttatgacaaattcgaggcaaaaggtatacctatagatgttcacacattaaaacgaattatcagctcgagtggaatggatgaatccgaattttccaagagtataagttacttattcgcgaaaaccgtggaccctgaaccgaaggatgttctgtctttagaggacctgtcttttcttttgaacaaactatacacacaacggtttcaaattaggagaatctgtagagacataaacgctaaatattcagaattttggttcaaacttttttccttatatgcagaaaaagttgatgccaagagaaaccaagttaacttacggaatacgaaactagatgcatgtgaaatatttgatgcaaatcttatgatcaagaactttatagagctcggtcaattaggtaaggctcaaaaaattttaagctttattcttgatagaaatcctgatatattactgtctccgaaaaatgcagatattagcacaatagttcactttttacaactgcgttgtggcgctttggcgccttattggaaaataccagataatagtgagcaaaaacaaggttttttaagaaaaatggttcgactaggtgcgaaaaatacgtcaattcgtctttcttctacttacaaagccatggatcaccaaacattattaaagattgctgatcttgctctgcaggagaaaaagcttttgaattccgaggatttgttgtccactttaattcaatcctttggacacctaggccaaacccaaatattggaacggtgtattgaacatatatggcaaatatcaccccaagagtttcctagtcacgtagtaattaagcaccgagggtgctatcctagttccaaaatactcgtttcaatcttagtgtcattctactttaatgaccacgatcttcacagaggcctaagtattttggattcattcataaagcactatccggacgtgaaattggatgcgctattttggagaaggctgtttcagctaagtcattttgcttggacaccagcaaacgacaagaaagccacttctgttgttagatgttggcatttaatgaagcagtggtatgcatctaagcggctaaggccttcagttgattatgagacgttgagacaactgtacgatatcatgaagaaaacaggcaatttcccgcttggaattgatgttttaaggagtttcaaaccggggatcgaaagaacgagagcagaaaatgctggaaaagttaacaatatcattatcaaataccaaaaatgtattattaaggagcttgtaaatagaggtagattttcagcggtaagggaattcattgataattatggttttgatagaaaaatgaccaaagatttgaatattttttgtgcgaatcgtatgtttctaagaagtaagaaaatgaaaaacaagattgagaacaaaaaggaaagggagaaagtgcggctagatagtttcgatgacgatgaagatgatggtatgattataggtagcctttggtaa

SEQ ID NO: 78130 - DNA, 1542 bp, Saccharomyces pastorianus
atggtatcgaggctatcaaagagatatagatccagagtacagtttagtatatccgtgatggatgaaaatatttatctttcgctatctcagataaataaagacatcagaaaggaaaacaagtccgtaaggaatcgacttcagagtattcttttagacaataaatttttgcaagatcgagttatccctatatttccccattatccactgatacccaatgaaagatgtgggctatggtactgtaatccatcaagtttcaaacagaccagttactttaagagcacagacgggcatgtcaaccaatgggactttagcacccgaagattgaactttcatttgttagagaccattcgagataataaaggtattataattgtcgatagtactagaagaggtaaaaaaatcccagatgctttgagtaagactgtccccatatggtgtgctgtattaaatacgttaatgcttcaggaaacagaaaaaaatgttgccatcgataaggtactgtatcttccacctgagacagttcccaaatcagaatatgacatgattaagcgaaaaatacccgaactagttgctaaactacaaaaattgaatattatagattctaagaatttgaacgaactgtttatgggtaagttattgcggcccatatgggttcaccctggttcttcacttctagaccattctgttgattacttcacgggtgaagtacaggagtatgaagcctgggaaacacctgaagaccaaaacataatacccattattttgtgcacggtaagctatcaagcacaagatggtatggataaaagatacggcttcacttatgtgcagggtgcagccgacgatcacgagctctggtcttttggtttggattcaaatatgttttgggcccatatagaatacctaggcgacgcaagttattcagacgaccagttacatgattacatcatggatttggctgctgcaaagctgagaaatcagtgttatatacaagataaaggaagcttggatgaagtctttggaaacattgataaaattacgaatgagatatctctaggaaaagtgagttcaggcttaaccatcaataagaatttgaaacagaaattgaagtcagaatatggtaaagttataattttcagtaattcggtgactgttgctgaagatacagacgatgaagaagaaagtgggacagatccgtttatttcaatatacaagttgcaaagcggagacaagaaaagttcaaaagctttacgatccacattccctagaatccatggagaaattcaatcgttgtttacaaatcgagatgaaaaaataaagccaatgctaatatgctgcaatacaggtactgatatgtcaatcggtgtcatcttaagtatcctttgtaccaaatatactgaagaatggatgcttacgtcggagttaccggacatcagtaagcttattgtaagaaaacacttgacaaaattgatttcccacttgaaaggacgcaacgttaacccttcaagagcaacactgaacagcgtcaatagctttttaatgtag

SEQ ID NO: 78131 - DNA, 1809 bp, Saccharomyces pastorianus
atgcgctcagtcactaatgcatttggcaatagtggagaacttaacgatcaagtggatgaaacaggttataggaagtttgatatccatgaaggaattttgttttgcattgaactatcagagacaatgtttaaagagtcctctgatctagagtataaatcaccattgttggaaattctggaatcactagatgagctaatgtcacaattggtcataacaagacctgggacagctattggttgctatttttattactgtaacagagaggatgccaaggaaggtatctatgaactttttccattaagggatataaatgctacatttatgaagaaattgaacgatcttttagaagatttatcatcggggagaataagcctatacgactattttatgtttcaacaaactgggagtgaaaagcaagtgcgcttatctgtattattcacattcatgcttgacacttttttggaagagattccgggtcaaaagcaattaagcaacaagagagtgttcttattcactgacattgataaaccacaagaggcgcaagatatcgatgaacgggcaagattgagaaggcttacaattgatttatttgataacaaagtgaattttgcaactttttttattggctatgccgataaaccatttgacaacgagttttattcggacatactgcagttgggttcacatacaaatgagaatactggtttggattctgaatttgatggtccaagtacaaagcctatagatgctaaatacatcaagtccagaatcctaaggaaaaaggaggtaaagaggataatgtttcaatgtccattaatcttggatgagaaaacaaattttatagtcggagtcaagggttacactatgtatacccatgaaaaagctggagtcaggtataaacttgtttatgagcatgaagatatcagacaagaagcatattcaaaaagaaaatttttaaatcctataacaggagaagacgttactggtaaaactgtcaaggtttatccttatggtgacctcgatatcaatctatcagatagtcaagatcagatagtaatggaggcttatactcaaaaagatgcgtttttgaagattattgggttccgttcatcgagcaaatcgatacactatttcaataacatagacaaaagttcgtttatcgtaccagatgaagcaaaatatgaaggttcgataagaaccttggcttctttattaaaaattttgagaaaaaaagataaaattgcaatattatgggggaagcttaaatcaaattcacatccttcactatatacgttatcaccctcaagcgtgaaggactacaacgaaggattttatctctacagggttccattcctagacgaaattcgaaaatttcctagtttactatcctatgatgatggctctgaacataaactagattatgataacatgaaaaaagtaactcaaagtataatgggatactttaacttgagggatggatataacccatccgatttcaaaaacccactattacaaaaacattacaaagttttacatgattacctgttgcaaattgaaaccacttttgacgaaaatgagacacctaatactaaaaaagacagaatgatgcgtgaggacgattctttaaggaaactatattatatacgaaataaaattttagaatctgagaagtcagaagatccaatcatccaaaggctaaataaatatgttaaaatctggaatatgttctacaaaaaatttaacgatgataacatttcgataaaagaagaaaagaaggcctttgataaaaagccgaaattcaatatataa

SEQ ID NO: 78132 - DNA, 1548 bp, Saccharomyces pastorianus
atgacacaagacaaagaagtcaaagtggttgccccagatgttgcgcccgaccaagaagtagaaattaataaatctgtaaaagatgcaaaacaccaaaccaatgatgattcgttacttcaacataaaaagaagggcaagaaaggtaaaaaatcgaagcccatagtgaccccagaacatatcgctaaggttcgtgccgaaagggaagctatgagaaaggctaaaagagatgcaatgttggctcaaggtgttgatccggactgcccgccagagctgcattttatcagaagacctttcctatctctacatgaggcagagccagtaactggatttagattcaagctaatgacttataattgcttggcgcaagctctaatccgcagaaagctgtttccggatagtggtgacgctttaaaatggtacaggcgttctaaagttctcttaaacgagtttaaatattataattccgatgtcatttgtttgcaagagattgatcatattcagtttcaaagcttttggaaagatgaattcagtaaattgggatacgatggacaatattatagaaatgctacaaaaaaccatggtgtcgcgataatgtggaggagagaattatttcaccaggttgacaaaatgctaatcgactatgataaagaaagttcagaaagcatttccgctagaacaacgacaaacaacgtgggattagtcttagccttgaagttttctgagaaagtactgtcgaatttgggtaaaaaatcgtctaaaaaatgcggtatcttgatcggcactacgcatctattttggcatccatttggtacttatgaacgaacaagacaatgctatattgttttaaaaaagatgaaggaattcatgcatcgtgtgaatgttttacagaacgaaaatgatggggatttatctcattggtttccttttttctgtggtgattttaattcccagccgttcgacacaccatatttatctatgacatccaaaccagtgcactatagaaacagggcaaagaccgtcattgggtgcagcacttcatataagttttccaaggtccgtgatggcgaagaaggtgcagatgacgaagaaggcgggaatattgaaaaatatggtaaagatcaacctgagagccccgttccagaaaaatttcatgctaatgaagaacagtctgaactcgtagataaaatggcacaactccataactcattggatatgagggctatttcactatactctgttgggtataagaatgttcatccagaaaatgcaggtcttgataatgatagaggtgagcctgaaatttcaaattgggcaaacacttggcgtggtttattagactatctattttatgtaaagaaatgggacccacaaagtaattgtcaggaagtggaaacccttggcgattttgaaaaagaaaataaagttaaatgcagaggttttttgagaatgccgcccggtaatgaaatgacaaagcatggacaaccacatgttggagaatatgcaagtgatcatttgtctatggtgtgtgatttagagttacaactatag

SEQ ID NO: 78133 - DNA, 261 bp, Saccharomyces pastorianus
atggtgttttacaaagtcacgttgagtaggtcgcttatcggtgtgccacacacaacgaagagcattgtcaaaagtttgggtttaggtaaaagagggtccatagtctacaaaaaagtaaacccggccatagctggctccctagctaaagtgaaagagttagtcaaagtagaagtaacagaacatgaattaacaccatcgcagcaacgagagttgagaaagtcaaaccctgggtttatagtggagaagagaaccatcgactga

SEQ ID NO: 78134 - DNA, 2910 bp, Saccharomyces pastorianus
atggtagttaggcggaaagtacatgttcttctaattgcaaggagctttcattcctacacaccttgcttcagagtaactaccagaggcaaacgacagcgaagtaagagtaagcagcaagcaaaagtagaactagatcacacacgagagctagataatgatcaagctacagagacagttgtagaccgttcggttggaccggagaaagatatagaatcaataaacaaagactttctgcaacgaacaaaaggattagagcctgatattgaattaaaacaactgcctcaaattaaacaggaatttaaccaacgttataaagataggtatgttaaaccttccgaagattggtacgtaaactcctggaggtctttaacaaaaccaaaaattccgctttacaagttaataaattcagattttcaattaataacaaaactgaaagctccaaacccaatggaatttcaacctgttcagctaatggaaagtcccttaaatgttggtgactttgttcttttaaaaatgagacccaatgaattggcgatgtgtgtaagtcttccaagtagcactatggatcctcgatacacttttgttactattgatggaactatgtgctttgcgaccaaaaaccgggtgttattgaggattcctcacaaattacctgctggaatccgttcacttatacagcctgagagccatcacaaacatttgccaattggaaccgttaagaacttttctaaccaaacgaatattttgcctattgtagcaaggcagctaataacaagtaggtatccagcccaaatttcaaagttggcctggaaagatttgcccattactaccaaaaaattacagttactccacagatcattacaaaattatatgggtccatggcagattcctttttttaccctagtcggattagttcagaaattggatttaaataaagccttggacgataaaaatggaataaattacttaactagtttagttaataactatcacactgtaaacgatataccaataaattcacctacctttgtttccacgtactgggcgattatgcaacaacaggaatcgaacctttggggggaaatccatctgaatacagcgttgctgtcgcctatatcagtaacgattattcccttaaaatcacaacacttatattatgcgcaggtgatagagaagctagaagccaacagttatagagaggtcaataagtttgtaaaattggtgaatgaaaggaaatatcgcgatatatcagctttatatccttctgtgatccaattattgaaagattttgctgctgggaattttcacaataacggaattatagtagctttgatctcaaaaatattcagaaagatagaacgctataaggattgtgacatcacaagagatatatgtcaagatttaatcaatgagataacacccaactcaatacccaatccattgttacttaacatggatttagcattacctgcttcctcgaagttagtgaaatggcaacaaaaactctacgacttaactaatatagaagaattgcaatggaaaaaatccggcactgatgacgataggtacgattttggcgatcttagggttttttgtatagactctgaaactgcgcatgagattgatgacggcgtgtcggtgaaaaactatggtagagatggactgtacactttatatattcatattgcggatccaacttctatgtttccggaaagcactaatgttgatattgagggtataagtacagatatcctaaatgttgccttgaaaagatcatttaccacatatttaccagatacggttgttcctatgttacctcaatctatttgtcacttatcagatttggggaaacaaggacaaaggacgaaaactatatccttctctgttgatgttaaaatcacttctaaatgcagtggaaaatcaattgaaattatgtatgacagttttaaaatccggaaaggcattgtgtccaacttcccaaaggctacttatgaagatgttgacaggatactcggtacacccaatagcgaagcatcacctgtcaaaaaggatttggaaagtttgtccatgatttccaaattattgagagaacaacgtataaaaaacagtaatgctgttattttcggggagggctttaataagggcctagtgatgctaaacgccgattcagaaggagaactgactgaggtaacattttcggatcaagaggagacgctgtctaccattttggtttcagaaatgatgatcttggcgaatactttaacgggtagatattttgcggagaacaaaatcggtggtgtgttcagatgttataaacagttaccactgggcgaagtagcacaacaacagtatgattctatgataacaagtacaaaaaaaggaatttttcccaagctaaaagatatcgttaagctttcttcattgttgaactcgagtttttatacaggtcgaccttttagacatgaaatgattggagctaaacaatatttgacagtaacatcccctcttcgtcgttttccagacttgataaatcatctacaaattcaccgtcatttgcagaaaaagcctctatgttttaatcaaacacaaatcgacagtttgatctggccaattcaatctcgagcggatattttaaaaagggctagccgtaattcgtcgacgtactggacactgaattatttaaaaaagctaaccaaactagagccagaaaggactttcgatgtaatggtaacatcagtaccgcagaacggatttactggatgtgtttttccagacttatcgttcgctagaggaacattaaaattgcatccaagttctatgcattatccgatgattggagatatcgtgaagaattgtaaaatttcaaaaattgactgtttagaaggaatgttagagttggaaaagctataa

SEQ ID NO: 78135 - DNA, 2916 bp, Saccharomyces pastorianus
atgagtcatccgattcaatttgtaaacgctaataatagcgataagagccaccaattaggcggtcaatattctattcctcaggatttgagggaaaacctgcagaaagaagctgcacgtattggtgagaacgaaaaagatgtgctacaggaaaaaatggaaactaggacagtgcaaaatcgagaggattcataccacaaaagaaggtttgatatgaagtttgagccggattccgatacacaaactgttacgtcttcagaaaatacccaagacgctgtcgtgccaaggaaaagaaaatctcgttgggatgtaaaagggtacgagccacctgatgaatcttcaacagcggtcaaagaaaactctgatagtgctttggttaatgtagaaggaatccatgatttgatgttttttaaaccttctgaccataaatatttcgccgacattatatccaaaaaacccatagatgagttaaataaggatgaaaagaaagaaagaaccctgtcgatgttacttctgaaaataaaaaatggcaatacagcgagtaggaggacctctatgcggattttaaccgataaagctgttacatttggtccagaaatgatatttaaccgcttattgcccatattactagacagaagtttggaagaccaggaaagacatctaatgatcaagactatagatcgcgtcctttacaagctaggagatttaacaaaaccttacgttcacaaaatacttgtagtagctgccccattgctaatagatgaagatccaatggttcgttcaacaggtcaagagataatcaccaatctgtctacagtcgctggcctaaaaaccattctaacagtaatgagacctgatattgagaatgaggatgagtatgttagaaatgtaacttcaagagcggcggctgtggtggcaaaagcccttggtgttaatcaattgcttcctttcatcaatgcagcatgccactcacggaagtcctggaaagcaaggcatactggcataaaaattgtgcagcaaataggtatacttctgggaataggtgtcttgaatcatcttactgggctgatgagttgtatcaaagactgcctaatggatgatcacgttccggtgcgaattgttacagcacatactttatcaacactagcagtaaattcttatccatatggtatcgaagtcttcaacgttgtactggagctattatggaagggtataagaagtcatcgtggtaaagtgctatcttcttttttaaaagctgttggatctatgatcccattgatggacccagagtatgccggttattataccacagaagcaatgagaataattagacgtgaattcgactctcccgatgatgaaatgaaaaagaccattcttttagtattacaaaaatgtagcgctgtagaatccataacgccaaaatttctgagagaagaaatcgcgccagaattctttcaaaaattttgggtcagacgagtggcattggatagaccattaaacaaagttgttacatatactactgttacattagcaaagaaattaggttgttcttataccattgataaattattaacaccattgagagatgaagctgagccgttcagaacaatggctgtccatgctgttactagaacagtgaacttattagggacagcagatttagatgagagattagaaacgaggcttattgatgcgctcttgatagcatttcaagaacaaacaaatagtgattctataatctttaaagggtttggggcagtgacggtgtcacttgacatccgtatgaaaccgtttttagcacccattgtgagtacgattttaaatcatttaaagcataaaactcccttggttcgtcaacatgcagcagatctatgtgccatactaataccagtcatcaagaactgtcacgaattcgaaatgttgaataaattgaacattatattgtatgaatccttaggcgaagtatatccagaggtattaggttctataatcaacgctatgtactgtattactagcgtaatggatttggataaactacaacctcctattaatcaaattttaccaaccttaactccaattttaagaaacaagcatagaaaagtcgaagtaaacactatcaaatttgttggacttattggtaaattagcacctacctatgcacctcctaaagaatggatgagaatatgttttgaactattagaacttttgaaaagtacaaataaagaaataagaagatcagcaaatgccacgtttggattcattgctgaagcaattggacctcacgatgttcttgttgcgttattgaacaatttaaaggttcaagaacgtcagttacgtgtatgcacggctgttgctatcggtatcgttgctaaagtgtgtggtccttacaacgtgctgccagtaatcatgaatgaatacacaacaccagagactaatgttcaaaacggtgttctcaaggccatgtcattcatgtttgagtacattggtaacatgtctaaggattacatatacttcataacaccattattagaagatgcactcaccgatagggatttagttcatcgtcagacagcgtcgaacgtaataacccacttagctttaaactgttcaggtacaggtcacgaagatgccttcattcatttaatgaatcttctaatacccaatatttttgaaacttcaccacatgctattatgcgtattttagaaggtttggaggcactgagtcaagctcttggccctggactattcatgaactacatatgggcaggattgttccatccagcgaagaatgtaaggaaagcattttggagggtgtataataacatgtacgtaatgtaccaggacgccatggtacctttttaccccgttacaccagacaacaatgaagaatatatagaagaactggatttagttctgtga

SEQ ID NO: 78136 - DNA, 1125 bp, Saccharomyces pastorianus
atgtcactaatggacaattggaagactgatatggaaagttacgatgaaggaggcctagttgctaatccgaacttcgaggttctggccactttcaggtacgaccctggttttgcacgccagtcagcgtcaaagaaagagatctttgaaactccagaccctcgattaggtttgagagacgaagatattaggcagcagataattaatgaggattactcaagttatttacgagtaagggaggttaattccggcggtgaccttctcgaaaatattcagcatcctgatgcttggaagcatgattgcaagaccattgtgtgccagcgtgtagaagatatgctacaagtcatttatgaacgattttttttattagatgaacaataccaaagaataagaatagcattatcatactttaaaattgacttcagcacgtctctgaatgatttattgaagttattggttgaaaacttgattaattgtaaagaaggaaatgcagagtatcacgaaaaaattcaaaaaatgttcaacgaaaggcaatgctataaaatgcgggtacttgtctctaagacaggaaatatacgaattgaggcaattccaatgcctatggagcctatcctaaaattaacaaccgattatgacagtgtttccacatacttcatcaaaacgatgctcaatggatttttaattgatagcacaataaattgggatgttgttgtttcatctgaaccattgaacgcatcagctttcaccagttttaaaaccacttcaagagatcattacgctagggcgagagttcgcatgcaaactgctataaataacttaagaggttcagaacctacttcttctgtctcgcaatgcgaaattttattttccaacaaatctggcctgctgatggaaggttcaataacaaacgtggctgtaattcaaaaagatcctaacggttctaaaaagtatgtgacaccaagattagcaactggatgtttgtgcggaacaatgcgtcattatttattgcggctcggccttattgaagagggagatatagatataggaagccttaccgttggcaacgaagttttgcttttcaatggcgtcatgggatgcataaagggaacagtgaagacaaaatattga

SEQ ID NO: 78137 - DNA, 1518 bp, Saccharomyces pastorianus
atggctaccccgtcgaataaacgttctagagattctgaatctacagaagaacctgtagtagatgaaaagagcacttcaaaacaaaacaataccgcacctgagggagaacaaactacttgtgtggaaaagttcgaagaactaaagttatcacagccaactttaaaggccattgaaaagatgggatttaccactatgacttctgttcaggcaaggactatcccacctcttttggccggtagggatgttcttggtgctgccaagacaggttctggtaaaactctagcgtttctcatccctgctattgaactattgcattctttgaaattcaaaccaagaaatggtaccggtataattgtcattacgcctacaagagagttggctttacagatttttggagtggcaagagagttaatggaattccattcacagacatttggtattgtcattggtggtgcaaatagaagacaggaagccgaaaaattgatgaaaggtgttaacatgttgattgctacccctggaaggttattggatcacttacaaaatacaaaaggatttgtattcaagaacttgaaggctttgattatcgatgaagcggacagaatcttagaaattgggtttgaagatgaaatgaggcagataattaagatcttgccaaacgaagataggcaatccatgttattttcagctacacaaacgaccaaagttgaggatttggctagaatctcgctgagaccgggccctcttttcattaatgtcgttcctgaaaccgacaactccaccgcagatggattagaacaaggctatgtggtatgtgacagtgataagagatttttgttgttattttctttcttgaaaagaaatcaaaaaaagaaaattattgtatttttatcatcttgtaactctgtgaaatattacgctgaattattgaactatattgatttgccagtcctcgaattacacggtaagcaaaaacaacaaaagagaacaaatacatttttcgaattctgtaatgcggaaagaggtatcttgatttgtacagatgtcgcagctagagggctagatatccctgctgtggattggatcattcaattcgaccctcctgatgatccaagagattatattcatagagtcggaagaaccgcaagaggcactaaaggtaagggtaaatctttaatgtttttaacacctaatgaattagggtttttaagatatctaaaggcttccaaggtcccattaaatgagtacgaattcccggaaaacaaaattgcaaacgttcaatctcaattagaaaaattaattaaatccaactattatctacatcaaacagccaaggatggttatagatcttatttacaagcgtacgcttcccactctttgaaaactgtctatcaaatcgataaactggatttagccaaagtagcaaagtcttacggttttccagtccctccaaaggttaacattacaattggtgccagtggaaaaacgccaaataccaaaagacgtaaaactcataagtaa

SEQ ID NO: 78138 - DNA, 1761 bp, Saccharomyces pastorianus
atgactacagctagttcttctgcttcccagctacaacagcgcctgccggaagaaaaaccttggccgcaactgagtggcagcaatgcagacgctcaaaccttcaaatgtaaatacgtaaccaaccacaactccttgggcgatgggaattttagcgtcgtgaaagaatgtatgaatatacacacaaaggatttgtacgcgatgaagcttattaagaaacaaactgtcaagaacaaaattcaacttattcaaagagagttcgaccttttgaggtcaataagcgagaaaatcagagatatggaaaaaaagaatgaacattctttggacatttttgaggggcatcaccatattttacaacttttcgactattttgagacggcagataacattgtcctgatcactcagctgtgtcagaagggagatttgtatgaaaaaattgttgaaaatcagtgtttagacctcgaaactcaagttacctcgtactgcgcctgtttggtgagcgttctcgagtttttgcattctcaaggtattgttcatagagacttgaaagcagaaaacgtcttattcagattgagagtgaacgaaaacgaaaaaaacctacagggtgaacaccacggagatttcaaatacgatctcttggcacacgacctagttctcgccgattttggtcttgctgctgaatataacacaagtaaggtaaactcgttaaaggagtttgttggaaccatctcgtatattgctccagaaatcgtcaagtgcaaaggtgtcggtgaaatgactcctgatcaagttggcaaactagacaagtatggttgtccggtggatatatgggcccttggtgtactgacatatttcatggccttcggctatacgccctttgactgtaccacagacgacgaaactctggaatgtatttcaaaatgtgactattacgtcgacgaacaaatgatgcacgaccctaaatacgaacaattttggaattttgttcaatgctgttttactattgacccggccgttaggcgttctgctaagaatttgaaacagcatccctttattaaggattattttgctacttcaaattctttgaatactaaggacacgccgaatttctcctttcatccaacaataagaagggtatcttctacagcgtccatgcacacattgaggtctccttccaaatcaagaaagacaactactctagcgtatttaaatatggatggcgggtcctctgaaacttccaccgccttcagcagcaagatggatttgcctgacctttacgttgatagaaccattaattctcgtgaaagatcattgaatagaattcgagacactctgaagaaaacattatccatgacatctcttaagcctgcaggcacattcgactatcttcacgctaacaaaaacggtacttctttatcatcatccaagtcaggcctcgtgaaaaagaattctacttttgtcttggaccctaagccaccaaagaatagcttgatgaacggttgtttcagcaccactccagaatcgcgctcaaatttcaatacccccaaaaccttatcgaggcaaggttcctctactagcgtgaagaaatatgtcaatgaagttgacttacttttaaccccacgtacggcctcgatgagcagcaatgataccacagccattaacgattatgatactactaacgataagaatcctgcaagaaaacacgcagcttcattccaggtgaatgttgatgattctgatggtgatgaaaccatgcagatatag

SEQ ID NO: 78139 - DNA, 1395 bp, Saccharomyces pastorianus
atgccactgaaacgctccttaaaagaatcaatcgaaagattatctagttttcaatcaaaatataatattttcactagtatcaatccatctccttattcattcacaaataaaaaaggtacagaagaaacattgacaggttgcgttgccagtatcaaggataatatagttacaaaagattttccaaccacatgtgcctcacatatacttgagaatttcaagtctcccttcgatgcaacagttgtgaaactattaaaacaggcaggagtgcatatcttaggcaagacaaatttagatgaatttggaatgggttctgggggagtacattcaataagagggcccgtaattaaccctttatatcctcatgaggacaagaagatcatgggaggttcatcatctggagccgctgcaagcgttgcttgcgatctagtcgattttgccttgggaacagatactggtggctccgttaggctccccgcatgctatggatctgttttaggattcaagccgtcctatggacgattgtcaagatttggcgtaatagcgtattctcaatctttagacactgttggcatacttagcaaaaagataaacgtcttgcgaaaagtatttcatacgctcgataaatatgacatgaaagatcccacttccttaagtgtggaattgcgtgaattgatagaagggaataaaaaggttaggagacctttaaaggtaggaattgtaaaggaatttagccatgaaagtatgcccattgagtttcacagattatacttatccttactagaaaagctgataaatttagggcttgaaatataccctgtgtccattccatctgtaaaaaactgtttaccgatttattatacgctatcacccgctgaagcggcttccaatttatcaaggtatgatggtatcagatatggatacagagattcagaactcgatataaaagacggtattttattcgcacctaccaggtccaaattcggaacagaagttaagaatagaatcattctaggtaattataatctttgttcagatgcatttaagaacaattttattaaggcagaaaagctacgagttaatttgatcgatgaatttgacgggatcttcagatttccaaatgttttaactaattctaagggaaatccagacggcctagatatactgatagttcccacatcgtccaagcttcctggatccataagggacttcgaagaagaggaagccaaatctccggctaactcgtatataaacgatgtctttactgtcccaatgtcattggctggactaccaagtttatcaatgcctttaaaagagaagaccccgattggcttacaggtagtaggtcaatatggtgatgattccactgtgttagattttgtcgagtcaatatcataa

SEQ ID NO: 78140 - DNA, 360 bp, Saccharomyces pastorianus
atgaaatatgaaatatccaaaataagagcggaaaacagaaattatcataaaaaagaaaaatataaagtctctaaagggtatcaagcgcttatttcttcttcattctaccaaacaatcccttcttcttcttcttttgcttttcctcagtctgtacgtgttgttgtggctgatacactgcttgttcaccatacatttgactggaagcaccacccacttgctgtggcataccgttcgcatcgtaagtcacagcagcaccaaacacagggaaatcaggccttacgcggaacccgtaagttggagtctccaactgttgggcccagaccgggtctccggagacagcatactcgaaacttcttatag

SEQ ID NO: 78141 - DNA, 594 bp, Saccharomyces pastorianus
atgatgcattttagaaagaaatccagtatcagtaacacgagtgatcatgacggagcgaaccgtgcctcagatgtcaagatttctgaagatgacaaggcaagattgaagatgcgtactgcttccgttgctgatcctattctagacgctgtgcaggaagcccaaccttttgaacaagctgctgataccttccacgacaacatgaacagacaatcttatttttccaacgaagaaggtcatgttctgtgtgatgttttcggtcaacccatcacacaggcagatatatcgaatccaactagggcaagagacgaaagacctttggacactataagaagtttcgagtatgctgtctccggagacccggtctgggcccaacagttggagactccaacttacgggttccgcgtaaggcctgatttccctgtgtttggtgctgctgtgacttacgatgcgaacggtatgccacagcaagtgggtggtgcttccagtcaaatgtatggtgaacaagcagtgtatcagccacaacaacacgtacagactgaggaaaagcaaaagaagaagaagaagggattgtttggtagaatgaagaagaaataa

SEQ ID NO: 78142 - DNA, 1677 bp, Saccharomyces pastorianus
atggcacacatcccagaggttttacccaaatcaataccgattccggcatttatcgttaccacctcatcgtacctatggtactacttcaatctggtgttgactcaaatcccgggaggccaattcatcgtttcgtacatcaagaaatcgcatcatgacgatccatacaggaccacggttgagatagggcttattttatacgggatcatctattacttgtccaagccacaacagaaaaagagtcttcaagcacagaagcccaacctatcgccccaggagattgacgcgctaattgaggactgggagcccgagcctctagtcgacccttctgccaccgatgagcaatcgtggagggtggccaaaacacccgtcaccatggaaatgcccattcagaaccatattactatcaccagaaacaacctgcaggagaagtataccaatgttttcaatttggcctcgaacaactttttgcaattgtccgctacggagcccgtgaaagaagtggtcaagaccactatcaagaattacggtgtgggcgcctgtggtcccgccgggttctacggtaaccaggacgttcattacacgttggaatatgatttagcacagttctttggcacccaaggttccgttctgtacgggcaagacttttgtgccgcaccctctgttctgcctgcttttacaaagcgtggtgatgttatcgtggcagacgaccaagtgtcattaccagtgcaaaatgctctgcaactaagcagatccacagtctactacttcaaccacaacgatatgaattcgctagaatgtttattaaacgagttgaccgaacaggagaaacttgagaaactgcccgccattccaagaaaatttatcgtcactgagggtattttccacaactcgggcgatttagctccgttgcctgaattgactaagctgaagaacaagtacaagttcagactatttgttgacgaaaccttctccattggtgttcttggcgctacgggccgtgggttgtcagagcacttcaacatggatcgcgcaactgccattgacattaccgttgggtccatggccaccgcgttggggtccaccggtggttttgtcctgggtgacagtgttatgtgtttgcaccagcgtattggttccaatgcatattgtttttctgcctgtttgccggcttacaccgtcacatccgtctccaaagtcttgaaattgatggactccaacaacgacgccgtccagacgctgcaaaaactatccaaatctttgcatgattcctttgcatctgacgactccttgcgttcatacgtaatcgtcacgtcctctccagtgtctgctgtcctacatctgcaactgactcccgcatataggtctcgcaagttcggatacacctgcgaacagctattcgaaaccatgtcagctttgcaaaagaagtcccagacaaacaaattcattgagccatacgaagaggaggaaaaatttctgcagtccatagtagatcatgctcttattaactacaacgttctcatcacaagaaatactattgttttaaaacaggagacgctaccaatcgtccctagcttgaaaatctgctgtaacgccgccatgtccccagaggaactcaaaaatgcttgcgaaagtgtcaagcagtccatccttgcctgttgccaagaatctaataaataa

SEQ ID NO: 78143 - DNA, 1599 bp, Saccharomyces pastorianus
atgaaagcattcaccagtttactatgtggactaggcctgtccactacactcgctaaggccatctcattgcaaagaccgttgggtctagataaggacgttttgctgcaagctgcggaaaaatttggtttggacctagacctggaccatctcttgaaggagttggactccaacgtattggacgcttgggcccaaatagagcatttgtacccaaaccaggttatgagtcttgaaacttccactaagccaaaattccctgaagcaatcaaaacgaagaaggactgggactttgtggttaagaatgatgcaattgaaaactatcagcttcgtgtcaacaagattaaggaccctaaaatcctgggcattgacccaaatgtcacacagtacacgggttacttggatgtggaagacgaggacaagcatttcttcttttggacttttgaaagtagaaacgatcctgcaaaggatccggtcatcctttggttgaacgggggtccaggttgttcttcactaaccgggctgttctttgaattaggaccctcatccattggacctgatttgaaacccatcgggaacccttactcttggaacagcaatgccaccgtgatcttccttgaccagcctgtcaacgttgggttctcgtattccgggtcctcaggtgtttccaacactgtcgccgctggtaaggatgtctataacttcttggagttgttcttcgatcagttccctgaatacgtcaacaagggccaagatttccacatcgctggggaatcctatgccggccattacatccctgtttttgcctctgaaattttgtctcacaaggacagaaacttcaacttaacctccgtcttgatcggaaatggcctcactgacccattgactcagtataactattacgaaccaatggcctgtggtgaaggtggcgaaccatctgttttgccctcggaggaatgctctgctatggaagactctttggaacgttgtttgggcttgatcgagtcgtgctatgactcgcaatccgtctggtcctgtgttccagctaccatttattgtaataacgcccaattggttccttaccaacgtaccggcagaaacgtttacgatatcaggaaggattgtgaaggtggcaatttgtgctacccaacgttacaagatatcgacgactacttaaaccaggactacgtcaaagaagctgtcggtgcggaggttgaccactacgaatcctgtaacttcgatatcaacagaaatttcctgtttgcgggtgattggatgaagccttaccacaccgccgtaacagatcttttgaatcaagacctacccattctggtatatgcaggcgataaagatttcatctgtaactggttgggtaataaggcgtggacggatgtcttgccatggaagtacgacgaagaatttgcaagccaaaaagtacgtaactggactgcttctatcaccgacgaggtcgctggtgaagtcaaatcctacaagcacttcacctatttgagagtcttcaatggtggccacatggttccatttgacgtccctgaaaacgccttaagtatggttaacgaatggatccacggtggtttctccttataa

SEQ ID NO: 78144 - DNA, 453 bp, Saccharomyces pastorianus
atgtctcaacccactcccatcataactacaaaatcagctgctaagccaaaaccaaaaatttttaatttattccgcgtttgcttcatttcattattgctgattgctgcggttgaatacttcaagtatggtacaagaattaactatgaatggttccattgtaccccaatcaaagaaccccagtctggctcagtaatcaagctttgggcacgtggtgggccaagttgtgacaaaagaggcgaatataaaactatagtaaagagaatcactagagattatgaaccaaatgatgaacatctctcgttctgtatcatcgagaatgataatgttccacccgtccactacccaattcacgaagataaaggtgaacctggctacgtagcttatgtcgggtacgacacagactctgagctggttcaagaactatgtgctgattccacaatttatcacatgtga

SEQ ID NO: 78145 - DNA, 939 bp, Saccharomyces pastorianus
atggataattgtaatgcctgggacaaattattgtctcagaatgaatccacaatcaacagcacagagactgctacgataacagcaatcatatattccccatcaagtaaaacactgcatcaatttataaatatctgttttccagagggaagcaattcaatactggataccactttgattaattacgccaccataggatggaccaacgacttaaaggaaaattattctgtcgatgtttacacgctaataagaaacactgacgatgcactagatcttctaaagccgtttttacaagaacatagttcgaaggttcgctggctcatattattagattggacactgaacgaccaaaagttgtggctgaatgaactatcctacgcattcaataaaattaagcaactgaatgacgataatgaattttctgtatggtgcttaaacagtggcgaaatattaaacttacaaagaaacactacagtatggcagtcagtacatattgacttcattttgcaaatgttaagatcgttttgctattttaatgatagctcactattctatatatgcgaagaccataccgaagagaaacgagaggaagcacaaaggcttaaataccaagagcttctaaagcatttttgtgaagatagagatatgaaagatcatattgaaatggtcaaacgcagtgagatattaataccgaaggggtgcgattctattggattgataaaaacagtagacgaaagatttgagcctactgaggtgaaagagcaacactttttggcccgatatatggactttataccaacaattgataaaatcagagaagataggaaaacaacctctggtatcgaccttgataaactatatcctttagaagttttcaaagttaatattcaagaggaattaggcaaaatgttcgcaaaatatagggaaaattcgaggatttag

SEQ ID NO: 78146 - DNA, 1533 bp, Saccharomyces pastorianus
atgtgtggtattttaggtattgtattagcaaaccaaaccactccagtagctccggagttatgtgatggatgcatttttctacaacatcgtggacaagatgcagctggtatagctacctgtggttctcgtggtagaatctaccaatgtaaaggtaatggtatggctcgtgacgtatttacccaacaacgtgtttccggtcttgctggttccatgggtattgcccacttgagatatcctacagccgggtcttcggctaattcagaagcgcaaccattttacgtcaatagtccttacggtattaacttggcacataacggtaacttggtgaatactgcatcgttgaagagatatatggatgaagacgttcatagacatattaacacggacagtgattcggagttactattgaatatttttgctgctgaactggaaaaacataacaagtacagagttaacaatgaagatgttttccacgcgttagaaggtgtttaccgtttatgccgtggcggttatgcttgcgttggtttacttgccggttttgcattatttggtttcagagatccaaatggtattaggccattattgttcggtgaaagagaaaatccggacggcactaaggactatatgttagcttcagaaagtgttgttttcaaagctcacaactttactaaatatcgtgacttaaagcctggcgaagcagttatcatccctaagaactgtagcaaaggtgaacctgagttcaaacaagtggttcctattaactcttatagacctgatttatttgaatacgtatatttcgccagaccggacagtgtcttggatggaatatcagtttatcacacaagattggctatgggttctaaattagcggaaaatatcctaaagcaactgaagccagaagatattgatgttgttattcccgtcccagatactgcaagaacatgtgcactggaatgtgctaatgtgttagggaagccttatagggagggctttgttaaaaacagatacgtgggcaggacatttatcatgccaaaccagagggaaagggtttcttcagtaaggaggaagcttaaccctatggagtctgaatttaagggtaagaaggttctgatagtggatgattctattgtcagaggtactacttcaaaagagattgttaacatggccaaggaatccggtgcaacaaaggtttacttcgcttcagctgccccagccattcgttacaaccatatttatggtattgacttaacagacacaaagaacttgattgcttataacagaaccgatgaagaagtggcggaagtaatcggttgtgaaagagtcatttaccaatcattggaagatttgattgattgttgtaaaactgataaaataaccaaattcgaagatggtgtatttaccggaaattatgtcactggtgttgaagacggttatattcaagaattggaagaaaaacgtgaatcgatcgcaaataattcatcagatatgaaggctgaagtcgatatcggattatataattgtgcagattattga

SEQ ID NO: 78147 - DNA, 2073 bp, Saccharomyces pastorianus
atgctgcttcttccaagatgtcctgtaattgggcgaattgtaagatcaaaatttagatctggtctaatccggaaccattcgcccattatatttactgtgtctaagttatcaacccagcggcctctgttattcaattcagctgtgaatttatggaatcaagcacaaaaggatattacgcacaaaaaatccgtcgaacaatcctcgtcggctccaaaagtgaagactcaggtaaaaaagaccagcaaggccccaaccctctcggaactgaaaatcttgaaagatctatttcgctatatttggcccaaaggcaacaataaagtgaggataagggtactgattgcccttggactgttgatatccgccaaaattttaaatgttcaagtacctttttttttcaagcaaactattgattcaatgaatatagcatgggatgatcctacagttgcccttccggcagcgattggattaaccattctttgctatggtgttgcaaggttcggctctgttttattcggcgaactgaggaacgccgtatttgccaaagtggcacagaatgccattagaactgtatcgctacaaactttccagcaccttatgaagttagatttgggatggcacttgagtagacaaacgggtggtctgacgagggccatggatagaggtacaaagggtatatctcaagtgttaacggccatggtattccacattatccctataagttttgaaatatctgtcgtttgtgggattttgacgtatcaattcggtgcgtcatttgccgcaataacattcagtacgatgcttttatactccattttcactataaagacgaccgcatggaggacacattttagaagggatgctaacaaggccgataacaaagctgccagtgtggctttagattctttaattaattttgaggcggtaaaatacttcaacaatgaaaaatatcttgcagataagtataatggctccttgatgaactatcgtgactctcaaattaaagtatcgcaatctctagcatttttgaactccggccaaaatctaatttttactactgccctaactgcaatgatgtatatgggttgtaccggcgttattggtggcaacttgacagttggtgacttggttctaattaatcagttggtttttcaactatcagtaccgctaaattttcttggtagtgtttacagagatttaaagcagtctctgattgatatggaaacgctatttaagttaaggaaaaacgaagtcaagattaaaaatgccgaacgtcccttaatgcttccagaaaatgttccctacgatattacttttgagaacgtcacgtttggatatcatcccgataggaaaattttaaagaatgccagctttaccatcccagcaggctggaaaaccgcaatagttgggtcttcgggcagtgggaagtccaccattttaaaattagtctttagattttatgatcctgaaagcggaaggatcctcataaacggtagagatattaaagaatatgacatcgatgccttgaggaaggtgattggtgtggtaccacaggacacaccacttttcaatgacactatctgggaaaatgtaaagttcggtcgtattgacgcaaccgacgaggaagtgataactgtagttgaaaaagcccagctagcacccttaatcaagaaattaccacaaggttttgacaccatcgtcggggagcgagggttgatgatcagcggtggtgaaaagcaaaggctggcaattgcaagggtactattgaagaatgcaaggatcatgttttttgacgaggccacaagcgccttggacacacacacagaacaagctctcttacgaaccattagagataactttacttcgggttcgagaacgagtgtatacatcgcacatagactgaggacaattgcagatgcagacaagatcatagtccttgacaacggaagagtaagagaggaaggtaagcatcttgaactgttggctatgccagggtcattgtaccgcgaactttggaccatacaagaagatctggatcatttagagaatgaactaaaagaccagcaagaactatga

SEQ ID NO: 78148 - DNA, 2553 bp, Saccharomyces pastorianus
atgttgctagtacgaacgacttccctgaatgtgtcaaggatgtcagtgccatgcctcgccagaggaataggcatcctcaagggcaaatatagactagcgaacctgatgaatgcccaaccctcagtgagacatgtgtcgagcgagatccagcaaaaggatcagcaggcaggagagtcaaacaccgccaccgatactggtgttattcacaaatcagatgaagaaactctgatatatttcgataatgtttacgcgagagccacctcggtttggaatccaacactgtggtacaatcttctgctaagaaaccagtcacgggatgcagtgagggagaaaataagaaatttagccagtccacccaataaccccatttatggactggagttgaagtctaccattccagtgaaaagggatggtggtgtatttgccacatttgtcgttccacccaagtatacaaaagctcaggtaaattctctaatccaacagaatacagccagagaatcctctaaaaacttactctcgtacttcactcgagcttctgccttcccagtaaagggttcgccttggattgaggatttaagaagactaccaagtaccactatagtcatcaagttccaagggcccgccttaacagaagaagaaatatactctttattcagaagatatgggacaattattgatattttccctcccactgctgctaacaacaatgtggcaaaggtaagataccgttcattccgtggtgccatttctgccaagaattgtgtttccggtatcgaaattcataataccgtcttacacatacaatacgaaaatatcagaagaggccatctagttagtaattttttcaccaaccatacaaggattgctattccagttttatttgcgctactttcaatctttgctgttttagtgtttgatcctataagagaattttcgattgaacagaagatcactcacaaatattctttatcgtgggacaataagttttggaaacaactgaaaacgctaacctcatctaccgtgacttctatcaagtactactggggcggccctgatgataatcaccaaataaagcatttatgggaggaaagaatagagaaagtgaatgacctgaaaatgtggcttgaagaaaataataatacttttgtggttataagggggcctagaggttcagggaaacatgatttggtcatgcaacacactttgcaaaatagagcaaatgttttgtatttggattgtgataaattgattaagtccagaacagatcctaagtttttaaaaaatgccgctagtcaattgggttatttcccaatattcccatggattgactctgtcacaggtgtccttgatttaacagtgcaaggattaacagggcaaaaaattgggttgtccgagacgaaggaatctcagtttagaaacatgttaactacctcattgatgtccattagacgtattgctctcaagaattacaaggcttttgtttccaccggtgatgggacagttaatgttaaggaagaagattacctacagcaacatccggaagctaaacccgttatcgtcatagataggtttgagggcaagtcggaaataaatggatttgtgtataaggaactatccgattgggcagctatgctagttcaaatgaatattgctcatgtgattttcttaacggaaaccgttgcatccaaccaaagattgagcgagtcactacccaatcaagtcttcaaaaacttaattttatcagatgcctcaaaagaaaattcgaggaactatgtattatcccaattggaggattacttatattacaataaaaaatccaagggtgaaaacgtaaaagaaccagaatcagaaaaggaaattgctgaaaataatgattctgatagtgaggccgatacgagtgtcaaaaaagctgaggttattttaaatgaaaaggaattacaggaaattgacgcttccttagaaccattgggcggtagaatgttagatttgcaagcatttgtaagaagagtcaaatcaggagaagagcctaccgaagcgctagacaagatgattgaacaggcttctgaacagataactcaaatgtttttgagtgacaaaattgatggtacaaagagtgcccaagcttgggaactgatcgaattattgagttcccatccagtgcttccattccacgaagttgttaatatgccattattcaaggcggctccagaaacagggatcatggaactggaaaacaatgggttaatcactgtgtccagggataggggtgttttacaggagattagacctgccaaaccactatacagagcagcattcacatatttgattaacgatgctgaactttcaaaggtgttgaaaactcgctacttattaaaggttgtaggttttgaaaccggcaggatcaagaagtgggaagaagagttaaagcccttagggaaagttcctgaccagaaactgttcaaaagtagactggactatttatctggaaagataaacgctagtaacgctgtcattaataagtgtgaagaagaaataaaaaagttatctaagtaa

SEQ ID NO: 78149 - DNA, 1047 bp, Saccharomyces pastorianus
atgtctattccagaaactcaaaaagccattatcttctacgaatccaacggcaagttggagcataaggatatcccagttccaaagccaaagcccaacgaattgttaatcaacgtcaagtactctggtgtctgccacaccgatttgcacgcttggcatggtgactggccattgccaactaagttaccattagttggtgggcacgaaggtgctggggtcgttgttgctatcggggacaacgttaggggttggaaagtgggtgatcttgccggtattaaatggttgaacagttcatgtatggcctgcgaatactgtgaattgggtaacgaatccaactgtcctcacgctgacttgtctggttacacccatgacggttctttccaacaatacgctactgctgacgcggtgcatgccgctcgtattcccgaagggaccgacttggcccaagtcgcgccaatcttgtgtgctggtatcaccgtatacaaggctttgaagtctgccaacttgagagcaggccactgggtggccatttctggtgctgctggtggtctaggttctttggctgttcaatatgctaaggcgatgggttacagagtcttaggtattgatggtggtccaggaaaggaagaattgtttacctcgctcggtggtgaagtattcatcgacttcaccaaagagaaggacattgttagcgcagtcgttaaggctaccaacggcggtgcccacggtatcatcaatgtttccgtttccgaagccgctatcgaagcttctaccagatactgtagggcgaacggtactgttgtcttggttggtttgccagccggtgcaaagtgctcctctgatgtcttcaaccacgttgtcaagtctatctccattgtcggctcttacgtggggaacagagctgataccagagaagccttagatttctttgccagaggtctagtcaagtctccaataaaggtagttggcttatccagtttaccagaaatttacgaaaagatggagaagggccaaattgctggtagatacgttgttgacacttctaaataa

SEQ ID NO: 78150 - DNA, 3693 bp, Saccharomyces pastorianus
atgagctctgaagacgaattgggaagtatcggtactgtgtttcccggaagtcccatagataagagcattgggagtattctcccacaaattgatgaagaagtggagactttgctggaagatagcttcacgtggaacattcctgattggaacgagttaacaaacccgaaatacaattcgcccaggtttagaattggtgatttcgaatgggacattctattattccctcagggaaaccataataaaggtgttgcggtatatctggaacctcatccggaagaaaaattagatgagactacgggagagatggtgccagttgatccggactggtattgttgtgctcagtttgccattggtatatctagacctggtaatggtgacaccatcaatttaattaacaaatcgcatcaccgattcaacgctctagatacagactggggatttgcaaatttgatagatttgaacaacttgaaacatccctcaaaaggaagaccgctttcgttcttaaacgaagggaccttgaacataacagcgtatgtgcgcatattgaaggatcctactggtgtcttgtggcataatttcctgaattatgactcgaagaaagtcacgggctatgttggctttcgaaatcagggtgccacatgctatttgaattcgttattgcaatcttacttctttacaaaatacttcagaaaactggtttacgaaatacccaccgaacatgaaagtccaaacaacagtgtcccattggctttgcaaagagctttctaccaactacaagtatccgatataccattagacactttggaacttaccaggtcattcggttgggacactgcggaatccttcactcaacacgatgtgcaagaattgaataggatattaatggacaggctggaaaataatatgaagggaacacccgtggaggggaagttaaatgaaatatttgtcggaaaattgaaagtttttataatgtatcacactgtcgattatgaatctgctagagtggaggacttttgggatctgcaactgaatgtcaaaaatttcaagaatttacaagaatcttttgacaattacattgagatggaactaatgaatggtgaaaatcagtatgctgctcaagactatggtttgcaagatgctcaaaaaggtgttatattcgaatcatttccgccagttttacatctgcagttgaaaagatttgaatacgattttaattatgatcagatggtaaaggttaacgataaatatgaatttcctgaaacaattgacttgtcgcccttcgttgataaagacgtattaaagaaaacgttagactcggagaacaaggataagaatccttatgtttataacttacatggtgtgctagttcattctggtgatatatctaccggccactactatactctgattaaacctggtgttgaagatcaatggtacagatttgatgatgaaagggtttggagggtcacaaagaaacaagttttccaagaaaattttggatgtgataggttgcctgatgaaaaagttcgtacaatgacgagagatgagtatcagaactatatcattcaacgccatacaagtgcttatatgcttgtttatatacgtcaagaacaagaggaggatttgctgcgtccagttttggaatctgatgttcctaagcatgtaatcacaagagtaagagaagaaatcaaagaacgggaaacaaaagaaaaggaaattagagaagcacacctgtatgtcacgctcagattgcactcaattaaagagtttattcattatgaaggatttgactatttcgcacatgatgggtttaggttatttgcagaggagctcaatgactctggtttgcagcaaatcaacttaaaagtcttgagaacaactaagttatcggatatttttgcaagcattaaggaaactatgaatattccacaagaaagggacgtcaaatattggaaaatggattatcgcagaaacagcactttgcgtttaacacaacccataaattttgaatccgtaaacatcactttgcaggaggcattaaaaaaggagaagaaaaggactatgcaaacgcaatatggagaggaaggtgttgctagtactgaggaagacgacaaggcacttttagaaactgtatcattcttagatcttttcattgaggagccctatctagagttacaatttttgaacaagctgaaggaagcttctttaatctcaaaggcccagctggatgatgagctgatatcaactataagaacgaatcttccagaactaacaaagggaggaatcgagcctgtttttgccaccgacaataaatctaatttgctattcgtcaagagctacgacccacatacccaaaagctattgggatttggccattttgccgtaaatcaattgcaacagctatcggatatatctgcaattattgaggacagcatttcttccaacgaaaagctgactttctacgaagaagtccaacctggtaccataaatgaaatatatatgaaggagacaatatatgatgctgatatagacacgggtgatatagtttcatttgaggttccaggtgctgttttgccagatacttttccagtttacgcaacaatcaaagatttttactcatatctgaggtatcgtgtaaaattgaagttttctaaatttgacggttcaagtaaggaatatggagttagtaatgaaatcccagagagcttcgaattctggatatccgcttatgcaccttatgatgaccttgctagaatggtgtcgaaatatgcgcacgttaagccagaatatctaaagatttttgccctttattctaatggaagatttgtgttaaaatcaacctcacttttgaatgattaccttttgaaagatttcaattgcgatcaaataccgccttttgcatttgaagtattgtctgtgcctttgaaagaattggagcgtttgaggccaattaaattatattggttaaaaaatagttatattcattatcaatgtttcgaattcgaagtcgcaaacgattatacagaatctcaatttcttgaaaaagtgcaacacaagatcggctttaccgatgaagaaaaggagaacatcttactctggaccaacacaaatttccagtttcagggcttattatcggaccaaaacaccttcaaagatgtgagtaaaaattctttactctttggtagaattttacccgaggagtctaaattgttcaaagaattaaatcgtctagaaaacgtacaaacatcttcattggaggattttatggatgatgaaaacgcgactgacagaccaatggacgatgagcaagatctaggtatggcgatagaacattctgaagatatgaaagggcgtatagtggttgttcaacaatatttcaaagaccttgagaatagacacggaatatccttcttatttaatttaataccagacgaaacattcccaaagacaaaagatcgtcttcatgcaaaatttggtctcggacaaaaagaattttcaaagatcaaattaagtattggttactccactgaagaaggtacggtgtttagaagtttgcaaggattttcggacgaagaattggacaaagttatattgtatgacattatgtccaacttagattatatctacatggatcatccggatagattgagatcgcattcttcctatgatagaccaatgatcattaaaaactga

SEQ ID NO: 78151 - DNA, 351 bp, Saccharomyces pastorianus
atgatctatggaaagatgatgggcaatacggtgttgaaaaatactggggtattctatcaagtgattaaaccactgaaacttcatttactttatgatcattctttttccctttttcttaaaaagcagccaaatatggggggaataagccctttcccatatttgctctcctattcttatcacgttattgtttacttatgtgttttgtgtaaagtatatattctatactcatttgtgaaagatttttcaatttgtcttccttttagctacgggtcctcgctgctctatagtttgtgttctaacttatatatatatatatatgcggcattacctaaaagcaaaataaaactgtag

SEQ ID NO: 78152 - DNA, 1170 bp, Saccharomyces pastorianus
atgcgtttttcaaatttcctaactgtatctgcattattaaccggagctctaggtgctcctgctgttcgccataaacatgaaaagcgtgacgttgttactgccacagtccatgcgcaggttactgttgtcgtttccggtaacagcggcgaaactgttgttccagtgaacgagaatgctgttgtagctactaccagcagtactgcagttgcttctcaagcaactacatccactttagaaccaacaacttccgctaatgtcatcacttctcaacaacaaaccagcactcttcaatcttccgaggcagcatctacggttggttcttcgacttcatcctcaccctcatcctcatcctcaacttcatcttcagcatcatcctccgcttcatctagtatctcagcctccggtgctaagggtattacttacagtccttacaatgataatgggtcctgtaaatctactgctcaagtcgcctcagatttagaacagttgactggttttgacaacatcagattatatggcgttgactgtagtcaggttgagaatgtcttgcaagctaaaacttcaagccagaaattattcttaggcatatattacgttgacaaaattcaagacgccgttgatactattaaatctgcagttgagtcttatggctcctgggatgatattaccactgtttctgtcggtaacgaactggtcaatggcggttctgccactacgacgcaagtcggtgaatacgtttccacggccaagtcagctttaacctctgctggttatacaggctcagtcgtttccgttgataccttcattgctgttataaacaaccctgacctgtgtaattattctgactatatggctgtcaacgcccatgcatacttcgatgaaaatactgcggcccaagatgcaggaccatgggtactagaacaaatcgaaagggtttacactgcttgtggtgggaaaaaggacgtcgttattaccgaaactggttggccatctaagggtgatacttacggcgaagctgtcccatctaaagcaaaccaagaagccgccatttcttctatcaaaagctcctgcggctcttcagcttacttattcaccgccttcaatgatctatggaaagatgatgggcaatacggtgttgaaaaatactggggtattctatcaagtgattaa

SEQ ID NO: 78153 - DNA, 5358 bp, Saccharomyces pastorianus
atggattttatgagtcccaagttttcgctaactgacgttgagtatcctgcttggtgccaagacgatgaagtcccaataacaatgcaggaaattagagaaatttttgtggagctcatggataagtttggcttccagaaatcttctatggaaaatatgtatcaacatttaatgggacagctggactccagggcaagtcgtacaggtgctcaaaatgctttagtatcgctacatgtttcatatattggaggcgaacacgcaaattatagaaaatggtattttgccgctcagctcgatttagatgaagagatcgggtttcaaaacatgcgactacatggaaaggcacgccaaagaaacgtaaaaatggcgaagaaaagaggcgtatcgataaaggaacaaattaagcaatggaatgagaaggagcaagagttcatcaataaccatccaaagatcacactgacccaagaacaattggaagatcagacaaacttgaaaagtgcagactacaaatggaaattgaaaatgaaaaaattgacgcccgaaaatatgataagacagctagccctttatttgctttgctggggtgaagccaatcaagtcagattcgccccagaatgcctttgctttattttcaaatgtgcacttgattatgatattagtacgtcaagtagcggaaaaacggtgaaatcacctgagtattcatacttaaatgacgttattactcccttatacgaattcctaaggggccaagtatacaaaaaagacgcaaaggggaactggaaacgaagagaaaaagaccacaagaatattattggttacgacgacatcaatcaattattttggtacccggaaggatttgaacgtattattttaaacaatggagaacgattagttgacaagccattggaggagagatatctttactttaaagacgttgcatggtctaaagtattttataaaacatatagagaaaccagaagttggaagaattgttttaccaatttcaatagattctggattatccattttgcaccgttttggttcttcaccacatttaattcccccactttgtacaccaagaattatatacagttattgaataaccagcctacaccccaagttagactatcagtgattgcctttggaggcacaattgcatgtttagttcaaattttagccaccgtgttcgagtggggatttgtacctcgagaatggccaggcgctcagcatttatcaagtagaatgattggtttacttttttgtcttgcaatcaatttgggaccttccgtgtatgttctcgggtttttcgaatgggatgttcattcaaaatctgcgtatatcgtgtccatcgtccaactaatcattgcatttttaaccacttttttttttgctgtcagacctttgggcggcttatttcgtccatatttgaataaagacaaaaaacatcggaggtacatctcatcgcaaacctttaccgcttcatttcctaagctgacaggacgcagcaaatggttttcttatgggttatgggtatttgtgtatttggcgaaatatattgagtcctatttttttttgaccttgtccctcagggaccccatcagggtcctctctattatggatttgtccagatgtcaaggtgaatatttgttgggtcctattctatgtaaatggcaagccaaaattacattagttctcatgctgctttctgacttgggcctgttttttctcgacacttacctttggtacattatttgcaactgtattttttccattgtactgtcattttcccttggtacttcaattctcacgccatggaagaatgtatactctagattgccaaaaaggatatattccaaaatccttgctacttcagagatggatgtaaaatttaaagcaaaaatactgatatcgcaggtttggaatgccattgttatatcaatgtatagggaacatcttctctccattgagcatttacaaagactcttgtttcagcaagttgactccttaatgggagacacaagaaccctgaaatcgcctacatttttcgttgcacaagatgattccacgttcaagtcaatggaattttttccatcaaattcagaggcaaaaagaaggatatccttttttgcccaatccctggcgacccccatttcagaacctgttccagtggattgtatgccaacttttaccgttttggtaccccattattcagaaaagattctgttgggcttgaaggaaattatcagggaagaatctcctaaaagtaaaatcacggtgcttgagtatttgaagcatctacaccctacagaatgggaatgttttgttaaggataccaaactactaagcatggaaaagagctttttgaaagaggcagagagcagtcatgatgaagatagattggaaattccggatgctctgtacgatccaaggtctagcccgctttctgaccacactgagtcccggaagttgcccacagaagacgatcttattaaggagaaaattaatgatttgccattttcttactttggcttcaactcatcagaaccatcgtacaccctgagaacaagaatttgggcatcattgcggacgcagactttgtaccgaaccctttcagggtttatgaactattccaaagctattaagctactgtatcgaattgaaaacccctctttagttagcttgtatcgtggcaataatgaagcattggagaatgacttagaaaatatggctagcaggaaatttaggatggttgttgctatgcagagatatgcaaaatttaataaggatgaagtggaggcaacagaactacttttaagagcctatccaaatatgtttatatcttaccttttgaaagaattagagcaaaatgaatctgagaaaacgtactattcgtgcctgactaatggctatgctgagtttgacgaagaaagtggattaaggaagccaatattcaaaattcgcctgtcgggcaatccaatacttggcgatggaaaatcggataatcagaaccattctattatattttatcgtggtgagtatattcaggtgattgatgcaaaccaagataattatttggaggaatgcctaaagatacggtctgttttaagtgagttcgaagagcttgagcttaatcccacaatcccatacattcctggcattgaatatgaagaagaaccaccgcccatcgctattgttggttcaagagagtatattttttcagaaaatattggagtgttaggtgatattgctgcaggtaaagaacagacttttggaaccttatttgctagaacgttggctgaaattggtggtaaattgcactatgggcatcccgattttctcaatggcatttttatgaccactcgtggtggcctgtctaaggcacaaagaggattgcatttaaacgaggatatatatgctggaatgaacgcaatctgccgtggtggaaagataaaacatagtgattactaccaatgtggtaagggtagagatttgggatttgggtccatcctgaatttcactactaaaataggtgcaggtatgggggaacagctactatcaagggagtactattatttggggacacaacttcccatggatagatttttatcgtttttttatgcacatcctggtttccatctgaataatctttttatttccttttcggttcaactgttcttcgttctgcttttaaacttgggtgcgttgaaccatgaaattatagcctgcttttacgacaaggatgcaccaattacaaatcttgagacacccgttggttgttataatattcagcctgcattgcattgggtatcgatattcgtactatcaatcttcattgttttctttattgcctttgcccctttgctgattcaagaagttttggaaaagggtatttggagagcagcttcaaggtttctacatcatcttctttcaatggccccattatttgaagtattcgtctgccaagtttattcgaattctctattgatggacttgacctttgggggagcaaagtacatatctacaggtcgtgggtttgcaataacacgcctcgatttctttacgctctattccagatttgttaatatatcgatatattctggtttccaagtgttcttcatgttattattcgcgattatttccatgtggcaacccgccttattatggttttggattacagtcatttcgatgtgcttcgcaccttttattttcaatccacatcagttcgcattcatggatttcttcattgattataaaacctttatccactggttattctcaggtaacacgaaatatcaaaaagattcgtgggcaaactttgtcaagagttctcgatcaagatttacgggctataaaagtaaaactgtagatgatatttccgaagattcaggccatgattcaaagaaagcgaggttttggaacgtcttctttgcagaactatttctacctttctgtgtgttcctcttcaacttcaccgctttttctttcattaatgcacaaacaggggtttctgactcaacaccaactagcgctgttttccgtttgttgctcgtaacttttttgccaatctttcttaactcaatagtgctttttctattattttgggtttcactttttgtggttcctggattgtcatattgttgtaaagacgcaggtgccgtgattgcgtttattgcacacactttctcggttttgatctatcttttagatttcgaactgatgtggttcttacaaggttggaactttacccgtacattgatactgcttattacgtgcatcaatatgcatctgattcttttcaaggtctttacgacgatattcttgacaagggagtataaaaacaataaggcacatttggcatggtggaatggtaaatggtacaatacgggcatgggctggtctatcattttacagcccatacgagaatacttcgtgaagattatggaatctagttattttgcagcagatttctttcttggtcacttcctcttatttatacaaacgcccataatattgttaccatttatcgattactggcatataatggtgctattttggatgaatccaagaagtattatcgcgcataaaagaattttgactcgaaagcagagagcattaagaagtaggatagtttcaaaatatttctctctatattttgtgatgctaggtgtgctcctttttatgctcatcgcgccattctttgctggtgatttcgtatctagtccgcaagaattgctggaaggcacccttttcgaaggaatcttccaacctaacaaccaaaacaacaacgatactggtccaaatgctccatcgacaatcctgactacaacaccaactttacctacctttaggactgtcgcatag

SEQ ID NO: 78154 - DNA, 1680 bp, Saccharomyces pastorianus
atgttgtttaaatccctttcaaagttagcaaccgctgctgctttttttgctggcgtcgcaactgcggacgatgttccagcgattgaagttgttggtaataagtttttctactccaacaacggtagtcagttctacataagaggtgttgcttatcaagctgataccgctaatgaaactagcggatctactgtcaacgatcctttggccaattatgagagttgttccagagatattccatacctcaaaaaattgaacacaaatgttatccgtgtctacgctatcaataccactctagatcactccgaatgtatgaaggctttgaatgatgctgacatctatgtcatcgctgatttagcagctccagccacctctatcaatagagacgatccaacttggactgttgacttgttcaacagctacaaaaccgttgttgacacttttgctaattacaccaacgttttgggtttcttcgccggtaatgaagttactaacaattacaccaacacagatgcatctgctttcgtgaaggcagctattagagacgtcagacaatacatcagcgacaagaactacagaaaaattccagttggctactcttccaatgatgacgaagataccagagttaagatggctgattatttcgcttgtggtgatgatgatgttaaggctgatttttacggtattaatatgtatgaatggtgtggtaaatctgacttcaaaacttctggttatgctgatagaactgcagaattcaaaaacttatctattcctgttttcttctctgaatacggttgtaacgaagtaacaccaagactatttactgaggttgaagccttgtacggttctaatatgacagatgtctggtctggtggtatcgtatacatgtacttcgaagagactaacaaatacggtttagttagcatcgatggtaatgatgttaaaactttggatgacttcaacaactattcttctgaaatcaacaaaatatcaccaacttccgccaacaccaagtcttactctgcaacaacaagtgatgttgcttgtccagctactggtaagtactggtccgctgcaacagaattaccaccaactccaaacggaggcttgtgttcatgtatgaatgcagccaatagttgtgttgtttccgatgacgttgattctgatgattacgaaaccttatttaactggatctgtaatgaagtcgactgtagcggtatttcagcaaacggtaccgccggtaagtatggtgcttactctttctgtacaccaaaggaacagctatctttcgttatgaacttgtactacgagaagagtggtggtagcaaatctgactgtagcttcagcggttctgccactctacaaactgccaccacgcaagctagttgctcctccgctttgaaagagattggtagtatgggtaccaactctgcatcaggtagtgttgatctgggttccggaactgaatccagtactgcctcttctaacgcttcggggtcttcttccaagtctaactccggctcttctggttcttccagttcttcttcttcttcttcagcttcatcttcatcttctagcaagaagaatgctgccaccaacgttaaagctaacttagcacaagtggtctttacctccattatttccttatccattgccgctggtgtcggttttgctttggtttaa

SEQ ID NO: 78155 - DNA, 195 bp, Saccharomyces pastorianus
atgctaactaaaccgtatttgttagtctcttcgaagtacatgtatacgataccaccagaccagacatctgtcatattagaaccgtacaaggcttcaacctcagtaaatagtcttggtgttacttcgttacaaccgtattcagagaagaaaacaggaatagataagtttttgaattctgcagttctatcagcataa

SEQ ID NO: 78156 - DNA, 3270 bp, Saccharomyces pastorianus
atgtctgctttaccggaagaagttaatagaacattacttcagattgtccaggcgtttgcttcccctgacaatcaaatacgttctgtagctgagaaggctcttagtgaagaatggattaccgaaaacaatattgagtatcttttaacttttttggctgaacaagccgctttctcccaagatacaacagttgcagcattatctgctgttctgtttagaaaattagcattaaaagctcccccttcttcgaagcttatgattatgtccaaaaatatcacacatattaggaaagaagttcttgcacaaattcgttcttcattgttaaaagggtttttgtcggaaagagctgattcaattaggcacaaactatctgatgctattgctgagtgtgttcaagacgacttaccagcatggccagaattactacaagctttaatagagtctttaaaaagcggtaacccaaattttagagaatccagttttagaattttgacgactgtaccttatttaattaccgctgttgacatcaacagtatcttaccaatttttcaatcaggctttactgatgcaagtgataatgtcaaaattgctgcagttacggctttcgtgggttattttaagcaactaccaaaatctgagtggtccaagttaggtattttattaccaagtcttttgaatagtttaccaagatttttagatgatggtaaggacgatgcccttgcatcagtttttgaatcgttaattgagttggtggaattggcaccaaaactattcaaggatatgtttgaccaaataatacaattcactgatatggttataaaaaataaggatttagaacctccagcaagaaccacagcactcgaactgctaaccgttttcagcgagaacgctccccaaatgtgtaaatcgaaccagaattacgggcaaactttagtgatggttactttaatcatgatgacggaggtatccatagatgatgatgatgcagcagaatggatagaatctgacgataccgatgatgaagaggaagttacatatgaccacgctcgtcaagctcttgatcgtgttgctttaaagctgggtggtgaatatttggctgcaccattgttccaatatttacagcaaatgatcacatcaaccgaatggagagaaagattcgcggccatgatggcactttcctctgcagctgagggttgtgctgatgttctgatcggcgagatcccaaaaatcctggatatggtaattcccctcatcaacgatcctcatccaagagtacaatatggatgttgtaatgttttgggtcaaatatctactgatttttcaccattcattcaaagaactgcacacgatagaattttgccggctttaatatctaaactaacgtcagaatgcacctcaagagttcaaacgcacgccgcagcggctctggttaacttttctgaattcgcttcgaaggatattcttgagccttacttggatagtctattgacaaatttattagttttattacaaagcaacaaactttacgtacaggaacaggccctaacaaccattgcatttattgctgaagctgcaaagaataaatttatcaagtattacgatactctaatgccattattattaaatgttttgaaagttaacaataaagataatagtgttttgaaaggtaaatgtatggaatgtgcaactctgattggtttcgccgttggtaaggaaaaatttcatgagcactctcaagagctgatttctatattggtcgctttacaaaactcagatatcgatgaagatgatgcgctcagatcatacttagaacaaagttggagcaggatttgccgaattctgggtgatgattttgttccgttgttaccgattgttataccacccctgctaattactgccaaagcaacgcaagatgtcggtttaattgaagaagaagaagcagcaaatttccaacaatatccagattgggatgttgttcaagttcagggaaaacacattgctattcacacatccgtccttgacgataaagtatcagcaatggagctattacaaagctatgcgacacttttaagaggccaatttgctgtatatgttaaagaagtaatggaagaaatagctctaccatcgcttgacttttacctacatgacggtgttcgtgctgcaggagcaattttaattcctattctattatcttgtttacttgcagccaccggtactcaaaacgaggaattggtattgttgtggcataaagcttcgtctaaactaatcggaggcttaatgtcagaaccaatgccagaaatcacgcaagtttatcacaactcgttagtgaatggtattaaagtcatgggtgacaattgcttaagcgaagaccaattagcggcatttactaagggtgtctccgccaacttaactgacacttacgaaaggatgcaggatcgccatggtgatggtgatgaatataatgaaaatattgatgaagaggaagactttactgacgaagatcttctcgatgaaatcaacaagtctatcgcggccgttttgaaaaccacaaatggtcattatctaaagaatttggagagtatatggtctatgataaacacattccttttagataatgaaccaattttagtcatttttgcattagtagtgattggtgacttgattcaatatggtggcgaacaaactgctagcatgaagaacgcatttattccaaaggttaccgagtgcttgatttctcctgacgctcgtattcgccaagctgcttcttatataatcggtgtttgtgcccaatacgctccatctacatatgctgacgtttgcataccgactttagatacacttgttcagattgtcgattttccaggctccaaactggaagaaaatcattcttcaacagagaatgccagtgcagccatcgccaaaattctttatgcatacaattccaacattcctaacgtagacacgtacacggctaattggttcaaaacgttaccaacaataactgacaaagaagctgcctcattcaactatcaatttttgagccaattgattgaaaataattcgccaattgtgtgtgctcaatctaatatctccgctgtagttgattcagtcatacaagccttaaatgagagaagtttgaccgaaagggaaggccaaacggtgataagttcagttaaaaagttgttgggatttttgccttctagtgatgctatggcaattttcaatagatatccagctgatattatggagaaagtacataaatggtttgcataa

SEQ ID NO: 78157 - DNA, 2439 bp, Saccharomyces pastorianus
atgtcccgtttcttttcgtctaattacgaatacgatgtagccagttcttcatccgaagaagatcttttatcttcgtctgaagaagatttgttaagctcttcctcctctgagtctgaattggaccaagaatctgacgactcctttttcaatgaaagtgaaagtgaaagtgaagctgatgtagactctgatgattctgatgcaaagccttatggtcctgactggttcaagaaatctgagttcagaaaacaaggtggaggttcaaataaatttttgaaaagctctaactatgattccagtgatgaagaatccgatgaagaagatggcaagaaggtagtcaagtctgccaaagaaaaactattggatgaaatgcaagacgtttataataagatctctcaagctgagaactctgatgactggttgactatttctaatgagtttgatttgatctcgcgtctcttagttagggctcaacaacaaaactgggggactccaaatattttcatcaaggttgttgcccaagtggaggacgctgtgaataatacacaacaagctgatttgaagaataaagctgttgcaagagcttataacactacaaagcaaagagtcaagaaagtttctagagaaaatgaagactcaatggctaaattcagaaatgatcctgaatcatttgataaggaaccaaccgcagatttggatatttctgctaatggattcacaatttcttcgtctcaaggcaatgaccaagcggtacaagaagatttcttcactagattacaaacaataattgactcaagaggtaagaagactgtcaatcaacaatccttgatttctactttggaggagttattaactgtagctgaaaaaccatatgaattcataatggcttatttgactttgattccatcaagattcgatgcctcagctaacctatcttaccaaccaattgatcaatggaaatcttcattcaacgatattagtaaattattgtctattttagaccagacaattgacacctaccaagttaatgaatttgctgatccaatcgatttcattgaagatgaacctaaagaagattctgatggtgtcaagaggattctgggttccattttctcatttgttgaaagattagatgacgaattcatgaaatccctgttaaacatcgatcctcattccagtgattatttgatccgtttaagggatgaacaatcaatctataatttgatcctaagaactcaattgtactttgaagcgactttgaaagatgaacacgacctagaaagagcattgacacgtccattcgtcaagagattggatcatatctactataaatccgaaaatttgataaaaattatggaaactgctgcttggaatatcatacctgctcaatacaaatctaaatttacttcaaaagaccagctcgattctgctgattatgtcgacaatttaatagacggattatcgacaatcttatccaagcaaaacaacattgctgttcaaaaacgtgctattttatacaacatttactacactgcattaaacaaagatttccaaactgctaaagatatgttactaacttcccaagttcaaacaaatatcaaccaattcgattcatccctacaaattttattcaacagggttgttgttcaattgggtttatccgcctttaaattatgtttgattgaagaatgtcatcaaattttgaatgatcttctgtcaagttctcacttaagagaaattttgggccaacaatccctacacagaatatctctcaattctagtaacaatgcttcagctgatgagcgtgctagacaatgtttgccatatcaccaacacatcaatctcgatttaatcgatgtcgtcttcttaacatgttccttattgatcgaaattccaagaatgactgccttctattccggtattaaggtcaagagaattccttactctccaaaatccattcgtcgttccttagaacattacgacaagttaagtttccaaggtccaccagaaactataagagattatgtcttgtttgctgccaaatcaatgcaaaaaggtaactggagagactctgttaaatacttaagagaaataaaatcttggactttattaccaaacatggaaacggtgttgaatagtttaacggaaagagtacaagttgaatctttgaagacttatttcttttctttcaagaggttctattcaagtttttctgttgctaaactagccgaattatttgatcttccagaaaataaggtggttgaagttttgcaatctgttatcgcagaattggaaatcccagccaaattaaacgacgagaagaccatctttgttgtcgaaaagggtgatgaaattactaaattggaagaagcaatggtaaaattgaacaaagaatataaaatcgctaaagaacgtcttaacccaccatcaaatcgtcgttga

SEQ ID NO: 78158 - DNA, 954 bp, Saccharomyces pastorianus
atgagcagcacgaggaagttcaaaaaggttgagaaacctctatcacaaaccagacattattcactctgtatccccacgacattggtatcggactgtcgcaacctctctcaaatcacgcataaggtgtaccaagtggccaagtttgcatcgctgtttaatgtttctgaggttgtcattcttgaggacaattcccaggtcgatgccaccaaaaaaaaaatctccactgctaaattaatactggcacttttacaatacttcgtcacgcctccatatcttcgcaatactgtcttcaacgaaaaattcagaccttatttgaccgccgcttcaaaattaccaagattatccacacttcctttcaccaggtaccaaaagcaagatcacggtcggtacagagaaggcctcactatcaagatgcagaaacccaccttggctcgcaaaaagactggtaaggtattcaagcaaaccaaatatattaatatagggaaaagcaaagcactggctctacaaagtcagctggtgccgataaacgcaagggtcaccatcgacacaataacgaggaaaattgtatctcctcaggaagcttacggtgatttcaccggattggactcgcagtatggctactatactcgtatagcgtcatcgttcacagacttgtttatgaaggggcctttaaaagagggttatacacaatcagtatatgttcccttaaccacgagagacacctctattcccgagttatcatcactgcctaccgccgaaactaatccccacatcttattggtattctcaacgtgggacactcttgctcgagcattcaaactggatcaagatcaattcgtagattgtcaaggtcctcaagagttctttgatgctcagctaccatgccccgtatccaattcggacgttgcagatgcaatccccatgacactgacaactctttcaactgtattttaa

SEQ ID NO: 78159 - DNA, 690 bp, Saccharomyces pastorianus
atgggaggtatacttaaaaacccgctagccttatcgccggagcagctggcgcaacaggatccagaaacgcttgaagagtttagaagacaagtttacgaaaatacgcagaaaaatgccaaattgacatcacataaaaggaatataccgggactagataatacaaaagaggagggggagataattggaacatcgagtaccttccttccaaaggacacactgtcactgaaacatgagcaagacatgttggccaagatgacaccagaagagcgagttcaatggaaccaaagaaatttagcagaaaatgaaataacaaaaaagcagttccaagatattcacatagacgagcccaagaccccctaccaaggtgctgtggaccctcacggggaatactacagagtagatgatgatgaagatgaggataatagtgataaaaaaccatgccaggtggcaaacgatgacatcgacgatttgtccctgggcgaaccggaatttgaaatcaaagagaacaaacaaccggattttgagaccaacgacgagaatgatgaagactcaccggaggctagacataagaaatttgaagaaatgagaaagaagcattacgacgtaagggcaattttcaacaaaaagtcccgtgaagcgctaaaggacgaagacgaagacgaagatgatagtacgacaaaagaaccatga

SEQ ID NO: 78160 - DNA, 822 bp, Saccharomyces pastorianus
atgagtagtgttcaacgacaggatttggtcctattcagcgaccaatcagtgcttccttcccactttttccaagacagcaactctcataacttattcttcatcacccatcaatcctgtactcaaccactatggctgataaacgcactagtagaaacgcacgtgttaggttccccaagttcccttaatgaatcttcttcatcggtgctaccttcgtcaactcactcccatgcagtccttgcgtcgtttatccacgaacagaactattttacaaattcattaaacaagctgaagatcccatctaataactacaatgttttagacttcctgtccgacttcatcgttaataatatccataataagccaagagacaagatactaagtgacgtactcgcaaagttctccgctgctatacaaaataacccaactgacaccattgttatcatcgaacaaccagaattactgttgtcgctagtaagcggcctaacttgttcagaattaaacaataagttcatcacacctcttttgaggcaatgcaaagtgctaatcattgtttccaattcggacatatttaatatagatgaatacgatgcttctgttaattcctcgaatctgcaaaatttctacaaatcttcctttatcaaatcaatgattaatttgaacttgaatcctctgaagaccggttttgcaaaggacgtaaccggctcattgcacgtttgcaggggcggcgcacccattgcaacttcaaacacaagcctacacgtcgttgaaaatgaatacctatatctgaatgagaaggagtcgacaaaactattttatcgctaa

SEQ ID NO: 78161 - DNA, 1929 bp, Saccharomyces pastorianus
atgaaggaaacggcgcaggaatacaaggtgtctgctgtaataccgacccttttgaaaaactggatactgcgtgtagtgtatgccacattggaccatatacctccttttgtgtgggaaattctacatgtcatcaccgatatttatttcttctgggttcaaaagctgattaactatgtgcggccacactcaagagtcatttattataacgctattaagaagttagatgagtgtgatacgtatcaaatgtggtgtcagcaagcgtccgtagtggatgaaataacaggcgcaaatttatggcggcggaatttcttttcgaggaggtacgacttcaattctgtcattgaacaatatagcatattggaaaatatgttaagggaggagaagtatgatgtagttaaggagaagttttcgactacaggcccttgtatgttgaggaactttgcgggtattggagataaaaagttgttcacaaaatctttgatgggtacaaagctacttattgaacaatatttgacccgaattctagaaggcttggatgtattaaataatcaaactttaactccaacatcctttttccaaagatgtaagttgtcactgggcacaacagcattaatcttgcaaggtggttcattgtttgggctgtttcaccttggggtgattagaggtttattgttacaggacctgatgcctaatattataagtggtagctctatgggggcatgcgttgcaagtttattcggttgcttgtccaatgagcaactaaagcaattattgaccgatgacaacctcttgaatatcatcaagaatgatgtagatttattaaaaagctgtggatacggtaatttagagcagcacctaaacctggggactttgattcagaacctaatacaccacggttattctcaagacgtttatctttttatccggtttgttatgaaatatattgttaaggaaaaaacttttgaagaagtttatcaaattactggaaaagttttcaatattgttattcatccaactgataaatcatgccctaatttactaaattatgtgacaaccccaaacgtattaatcaagtcagccattgaatgctcacttggttctggtgtaatttcagaggatacatcactattatgtaaaaatttagaaaatgaaattgagccttttcttaacatcaataaaaataaacaagtcaaatttcttaccccagaaaatgccaacaatccgagcataacggagagcccctatactaggttaacggaactattcaatgttaataacttcattgtttctttggcgagaccatacttggcaccattggtggtaaatgatttgaagcatgaaataaaaacgtcaaaatattactattataggcattatccaaatatgcctcctataaacgcgaatactgtaagaaaaacacagagatcctcttcgcaatcacccataaaggcaggaactgtcgaggatcttgagccagaacctttaatgagccctgcgcccccaagttcggcagtcaacgattcagcagagtacataatcccagaattgggcataccgcagttgaactttactgagatggaaccgctggcgtttaaatttaagtatcatctggaaagaaaattaaaaaatattgccactatggaatttcgacataggatggaggtattggataatttaggcctgttgtgctcattaataaaaagactaataattgatgaaaagactcccagatcagctacggagattgctgtggtaccaaggatgaaaagtctatcattaacaaggattattgaaggtcaacttaacaacattctatactggataaaatctggtgaacgaagtacatggcccgcactagctttaattaagacaagatgtgcagtcgaatttaaattagacgacataataagagcaagacggagtaggtag

SEQ ID NO: 78162 - DNA, 705 bp, Saccharomyces pastorianus
atgttcaggaacaattacgacggggacacagtcactttttctcctacaggccgtctgttccaagtggaatacgccttggaagctattaaacaagggagcgtcactgtggggttacgttcgaacactcatgctgttttagtagcgttgaaaagaaatgcagacgaattgtcatcataccagaaaaaaatcatcaaatgtgacgagcacatggggctctcgttagccgggttggctccagatgctagagttttaagtaattatttgagacaacagtgtaattactccagcttagtttttaacagaaagcttgccgtcgagagagcaggtcatttgctttgcgataaagcacagaaaaatacacaatcctatgggggcagaccctacggtgttggtttgttgatcatcgggtatgacaagagcggtgctcatcttttagaattccaaccttccggaaatgtcacagaactatatggtacagctattggcgcaagaagccaaggggcaaagacttatctagagagaactttagacacgtttataaaaattgacgggaacccggatgaactaatcaaagctggcgtcgaggctatcagccagtctctaagggacgaatccttgacggtagacaatctttcaatcgccatcgtgggtaaggatacgccttttacaatttacgatggagaagctgttgctaaatacatctag

SEQ ID NO: 78163 - DNA, 1050 bp, Saccharomyces pastorianus
atgtccccattgaacgtcggtatagttggtacaggtatttttgccagagatagacatctcccatcctaccaggaatttcctgacaaattcaaagtcattgccgccttcaacagacataaggcaaaagctttggattttgcaaaggttgctgacatacctgaaaataaggtttacgacaatctagatgaaattttgaatgaccctcatgtcgactacattgacgctttgctacctgctcaatttaatgctgatattgtcgagaaggcagttaaagcaggtaagccagttattttggaaaaaccaattgcggccaacttagaccaagcaaaggagattgtcaagatagcagaatccaccccattgcccgttggtgtggctgaaaattggttatatttaccatgtattaaaatcgcaaaggagcagatcgagaaaattggtcctgtagtagcattcacccacaattctaccggtccatttgttactcaaaataaatatttgaccacaacctggagacaaaaaccagagcacattggcggatttctatctgatggtggtgtccaccaattagctctcgttatttccctactcggtgaatttggatctgtttctgcattaacgagacaggtgcgtgaacgttccggtgcagatgatattgtctttgctactgtccagttgaaaaataaagaggttatcggaagttttacttatgggtctgcctttggtgctaccgaaaagtcggttttcttgaaagtctatggtaagaatggtaccgttaccgttgacttatcagacaaaaaagaccccgttgtaaaagtcaaattagggggttcagctgaagataacggtgacgaacgaatttttaaagtcgataatgatgaaagtttcggcgtcaacgctgaatttttgaattttcacgaagctgtcagcaagaaggacaaatccttatacctaggcacacccagaactgcatttcaccatttggcttgtgtggacgcgtttttaaaatcttctgccaagaatggtgaccacgttaaaattgagcagccatga

SEQ ID NO: 78164 - DNA, 1011 bp, Saccharomyces pastorianus
atgggttcaataagtagataccttcttaagaaagcagcagatgggcttaaagatgagcagagattgaagattgaaatgtccgatagcaaaagtgttccagagtgctttcattttaatagggaaagaagaatgcccatagccgagataaacggcgaggatgggtttttcatgtttccgtctcagcaatcgcttgaaaattttgaaaacactaaaaagtattcgaatgagctgagtccagatgcaattggtattccattatttcaaattatcaattgcactctaccgtttggtaaaagaggtcatagcaatactgtggtcggcaatgtcccatattataaaattttcaaatttattttaagaacggcagacgaacctccgccttatactgtggcaaaaatcgtttgctcaaacaacggattaatattgtataaagtgcctctttacgacatatataaaaatgtcagccaagcaaacgtaacttacagcttcgtagggactacgtctacggagcccaacttactagcaatggctcaccgagaaggacacagggatttggacactaaagtgaataatttaaatctcaggtggcatgtcacttattcgcccgtagttaccaacgatcattataaattaattctgttagcagattatgaagtgaatcgtttggatgaagatgtcattagagccgctaaaaataagatgtccaccgaccaaaaggatcaaaaagttcagaggttcgtggcagctcattatactagagaatttgaaacatctctttttaggtgggtcgctcaagagggccacttaattcttggcgagtattccacagatcaaggatcatttggattgaataatatcccaccattgacggaagaactcgggtgtcagagcctgctcatacattacatagagtacatgaagagacaacgtaaaaaaattgcgaaaggggcaaggagacaaaataaaagaaacgttgcaaacacgactaacatgaacatgaacctcatgtaa

SEQ ID NO: 78165 - DNA, 309 bp, Saccharomyces pastorianus
atggaaaccaatgactccgatgatagaattgaggcaattgtatcggaggagagcgacgagctagaagtaaactcgggtacaacagaagaaactaatgtgctagaactactgacaataatttctgggctagttgtaactttagtgcttgtcgtgcttgtcgtggtggtggtagtaggcgtagttgtactggtcgtgctactagtagtagtcgtgctactatgcgatgtggtagtggctgtggtcgattttgaaccagatgaacccattttgatacggcgctaccctttcttgtggataccttttctatga

SEQ ID NO: 78166 - DNA, 1083 bp, Saccharomyces pastorianus
atgtcttatcctgagaaatttgaaggtatcgctattcaatcacacgaagattggaaaaacccaaagaagacaaagtatgacccaaaaccattttatgatcatgacattgacattaagatcgaggcatgtggtgtctgcggtagtgatattcattgtgcagctggtcattggggcaatatgaagatgccgctagtcgttggtcatgaaatcgttggtaaagttgtcaagctagggcccaagtcaaacaatgggttgaaagtcggtcaacgtgttggtgtaggtgctcaagtcttttcatgcttggaatgtgaccgttgtaagaatgataatgaaccatactgcaccaagtttgttaccacatacagtcagccttatgaagacggctatgtgtcgcagggtggctatgcaaactacgtcagagttcatgaacattttgtggtgcctatcccagagaatattccatcacatttggctgctccactattatgtggtggtttgactgtgtactctccattggttcgtaacggttgcggtccaggtaaaaaagttggtatagttggtcttggtggtatcggcagtatgggtacattgatttccaaagccatgggggcagagacgtatgttatttctcgttcttcgaggaaaagagaagatgcaatgaagatgggcgccgatcactacattgctacattagaagaaggtgattggggtgaaaagtactttgacaccttcgacctgattgtaatctgtgcttcctccctaaccgacattgacttcaacattatgccaaaggttatgaaggttggtggtagaattgtctcaatctctataccagaacaacacgaaatgttatcgctaaagccatatggcttaaaggctgtctccatttcttacagtgctttaggttccatcaaagaattgaaccaactcttgaaattagtctctgaaaaagatatcaaaatttgggtggaaacattacctgttggtgaagccggcgtccatgaagccttcgaaaggatggaaaagggtgacgttagatatagatttaccttagtcggctacgacaaagaattttcagactag

SEQ ID NO: 78167 - DNA, 1659 bp, Saccharomyces pastorianus
atgggtaaaattgcagagtttctcgggaatccaggtgctaggcctgacgttcatcatagagcacctactgttgactgcaaacagtacgaagaattcggtgattctaacgattacaaaaatgatgatgtggtcagagtagtcagccatagcgatgagagtactgatgacgaactttgtaatgtgaatttaacagaaacaggggcaatcttcacgagtaaaggttttaccgggttaagcaaaggtttcacagataagaccctggatttcctggtacgagtggccggttcgcaggcggttttttttattgtttggatcatcctcataatttgggtggttattggtattgtttataacgcacctttcaattggcaagttgttatgcaggacggacagtccattcaaagttatgtttgggacacactgttgatgagacaacagttgatgagtacgcatgaacaaattttgatctgcggtagattgaagtcgagattggcttccttcaaaaactatctaacaagaagcaccccagaggaagaaaaagcagactgcacagttgaagctaatgaagtcagctctgttgaaaatcatatagacccatctgccattaacggagaactgcctgtggaaaattggtacgaccgtttatctaatgtagcaagtaggtatatgggttcaattgcagcaatggtgatattttggataggtattttcgtttggattggttgcggtgctatcccaaaagatgcgggcaacactccaccttacaccggagaaactacaggtagtaatccaagattgaaaaagttcagtgacgcttggcagatgtatattaacactgcagttgcaatttcccttctaatttgcactactttcttacaaaatataagggccagacatgattatttcacggggaggtttttagttgatatctttgatatggacgagaaaatcgactatcgtataagaaagcattttaacgattttgaaacacctcacccagttgttaccattgagtctaaaaaaaggtcgacagggagaaagatgattgattggtatgctgatattattggtactggtattggtgtcctgatcggtgtggcagtgttcgctacatggattggtattggttcgccaatgaagtgggatgataattggtggttgattatcggtacatacacaggtttaattgggtttttggacggtttcgttttgagagaagtgtacttccgaatcgttcaacatgaagagaaaaattattctgatgtggctaaagaagaccttgaattattccaagaattaggtattgaatgtcccgaagaatttagtggtaaaactcctgaaattaacattattggttacagaacatcccaatatattaataggatctgctcaactccatggagtgttcttgtatccgtcatcatcatcattggtttaatttgtattgcttccggtttgcgttggagtacaacaggtcaattgattgctaacacgccaactatgattatcgaagaatttttcttgctagttttgttgcaagcacataattgggccgatcgtcaaagaagagtggaggttaccgctttgtacgcacgtaggcgcatacttctatcatacgtagaaaagcgtttcccagaggttatgatgttggaaaaatag

SEQ ID NO: 78168 - DNA, 306 bp, Saccharomyces pastorianus
atgcgtagatttggaaagccatgtattgtttcacatgaaatttcggccaggcctcacatattacagccttgtaattataagatggtgctgagttgtaaggtaaaaaaacccattgagttattgcaccttcaagagttaatactttacacttttatgaaaatttgccttcatgtaaacttgatccagcaaaacatcaataagttgtcatatatttctcgaaaatatccaagggcacctgcttctatcagctgcgacaatagagccacggagccaacaaaaaaaggctttttagtttgccgcatgtaa

SEQ ID NO: 78169 - DNA, 1146 bp, Saccharomyces pastorianus
atgaaagagaatgaacttaaaaatgagaagagtgtagatgtattatccgtcaaacagctcgaatcccaaaagactgttctacctcaagatcttttcagaagcagctttacctggttttgttatgaaatttacaagtctttagcgtttcgcatctggatgctattatggctaccacttagcgtctggtggaaactttccaacaattggatttacccacttatagtttcacttcttgtcctgttttggggaccattttttgtccttgttatttgtggactttctcgtaagcgttccttatcgaaacaactcattcagttttgcaaagagattactgaaaacacaccaagttcggatcctcatgattgggaagtcgttgccgcaaatctaaattcgtacttctatgaaaataaggtttggaataccaaatacttttttttcagtgccatgagctgccaagaagcgttcagaacaatccttctcgaacccttctctttaaaaaaagacgaagctgccaaggttaagtcatttaaggattccgtctcttacattgaagaagcattggaagtttattttacagaagttgaaaaacaatggaagttgtttaatactgaaaaatcatggagccctgttggcctggaagatgctaaacttcccaaggaagcttaccgatttaagcttacttggtttttaaagaggatttccaatatttttatgttgataccattccttaattttttgtgctgcatatatgtgtcacggggaatgtgccttctattacgcaccttttatctcgggtggattcttttcatgttggtacaaggtttccaaaacatgaggatgatcgttttatctgtgaaaatggaacacaagatgcagttcttgtcgactattataaatgagcaagaaagtggtgcgaatggatgggacgaaattgcaaaaaaaatgaataggtacttgtttgagaaaaaagtctggaagaatgaagagtttttctttgacgggattgactgtgaatggttttttagccacttcttctaccgcgttctatctgcgaagaaatctatgcgggctctatcattgaatgtggaactatggccatacattaaagaagcgcaattatcctgcagtgaggagtccttagcgtaa

SEQ ID NO: 78170 - DNA, 669 bp, Saccharomyces pastorianus
atgaccgtcgttatcggagtcttggcattacagggtgcgttcattgaacatgtgcgacacgtagaaaaatgcatcgtcgaaaacagggatttctatgaaaaaaaactatctgtgatgacagtgaaggataaaaatcaactagttcaatgtgatgcattgatcatacctgggggagagtcgactgcaatgtcccttattgcagaaagaacaggattttacgacgatctctacgcattcgtacacaacccaagcaaggtaacctggggtacttgtgcaggtatgatttatatttcacaacaattatctaacgaagcaaaactggtcaagacgctgaatttactaaaggttaaagtaaaaagaaatgcatttgggagacaagctcagtcttccacccggatttgcgacttttcaaactttattccttactgcaatgattttcctgctacttttattagagctccagtaatagaagaggtgctggatcctgaacatgtgcaggtcctatacaaattagatgggaaggataatggtggtcaagacctaattgttgccgctaagcaaaaaaacaatattcttgcgacatcatttcatccggaattggcagaaaacgatatacggtttcacgactggttcatcagagaatttgttcttaaaaactacagtaaataa

SEQ ID NO: 78171 - DNA, 897 bp, Saccharomyces pastorianus
atgtcagaattcaaggttaaaactgggcttgcccaaatgttaaagggcggtgtgattatggacgtcgtcacacctgaacaggctattatcgcagaaagagcgggcgcttgtgctgtaatggcattggaacgcattccagctgacatgcgcaagtctggccaagtatgccgtatgtcagatcctcgcatgatcaaagaaattatggaagctgtttcaattccggtgatggcaaaggtccgtattggacacttcgtggaggcacagatcctggaagagctgcaagtagactacattgacgaaagtgaggttttgactccagctgattggacacatcacattgagaagcataacttcaaggtgccatttgtttgcggtgccaaggatctaggtgaggctttgagaagaataaacgaaggtgctgcaatgatccgtaccaaaggtgaagcaggtaccggtgacgtttccgaggccgtcaagcacatcgccaagattaaggcggagatccagcagtataaagagaatttgaagaccgaatccgattttgcagctaaggccacagaattacgcgtccctgtcgagttgctgaagacaacactatcagagggaaagctacctgtagtcaattttgctgctggtggagttgctactccagcagacgctgctctattgatgcaattgggttgtgaaggtgttttcgtcggctcaggtatattcaaatcgtcagatcctgagaagttagcatgtgctatcgttgaagccacgactcactacgataatccagcaaaactattgcaagtttccagcgatttgggtgacttgatgggtggtatttccatccaatcaattaatgaagcaggaggcaaaaacggtgcaagactttctgaaatcggatggtag

SEQ ID NO: 78172 - DNA, 1131 bp, Saccharomyces pastorianus
atgactgacttgtttaaacctctacctgaaccacctaccgaattgggacgtctcagggttctttctaaaactgccggcataagggtttcaccgctaattctgggaggagcttcaatcggcgacgcatggtcaggctttatgggctctatgaataaggaacaggcctttgaacttcttgatgctttttatgaagctggaggtaattgtattgatactgcaaacagttaccaaaatgaagagtcagagatttggataggtgaatggatggcatcaagaaaactgcgtgaccagattgtaattgccaccaagtttaccggagattataagaagtatgaagtaggtggtggtaaaagtgccaactactgtggtaatcacaagcgtagtttacatgtgagtgtgagggattctctccgcaaattgcaaactgattggattgatatactttacattcactggtgggattatatgagttcaatcgaagaagttatggatagtttgcatattttagttcagcagggcaaggtcctatatttaggagtatctgatacacctgcttgggttgtttctgcggcaaattactacgctacatctcatggtaaaactccttttagcgtctatcaaggtaaatggaatgtattgaacagggactttgagcgtgatattattccaatggctaggcattttggtatggctctagccccatgggatgtcatgggaggtggaagatttcagagtaaaaaagcaatggaagaacggaagaagaatggagagggtctgcgtacttttgtgggtggccccgaacaaacagaattggaggttaaaatcagcgaagcattgactaaaattgctgaggaacatggaacagagtctgttactgctatcgctattgcctatgttcgctctaaagcgaaaaatgttttcccattgattggaggaaggaaaattgaacatctcaagcagaacattgaggctttgagtattaaattaacaccggaacaaatagaatacctggaaagtattgttccttttgatgttggctttcccaaaagtttaataggagatgacccagcggtaaccaagaagctttcacccctcacatcgatgtctgccaggatagcttttgacaattag

SEQ ID NO: 78173 - DNA, 1302 bp, Saccharomyces pastorianus
atggtatatgaagcaacaccttttgatccgatcacggtcaagccaagcgataaaagacgcgttgcatatttttacgatgcagacgttgggaactatgcatatggagcaggtcacccgatgaagccgcatagaataagaatggcacattcccttattatgaattatggcttgtacaagaagatggaaatttacagagctaagccggcaacgaaacaagaaatgtgtcagttccatactgatgaatacattgattttttatcgagggttactccagataatttagaaatgtttaaaagagaaagtgtcaagtttaatgtcggagatgattgtcctgtctttgatgggctctatgagtactgtagcatatctggtggtggctctatggaaggagctgctcgtctgaatagaggcaaatgtgatgttgctgtcaactatgcgggtggtttgcatcatgcaaaaaaatcagaagcttctgggttttgttatttaaatgacatagtactgggcattattgaactactacgataccaccccagagttctgtatattgatattgatgtgcaccatggtgatggtgtagaggaagcgttttatacaacggatcgtgtcatgacatgttctttccacaaatatggtgagtttttccctggcacaggtgaactgagagatataggggtgggtgcaggaaaaaactacgcggtcaatgtgccattaagagacggtattgacgatgctacgtacagatctgtgtttgaacctgtgataaaaaaaattatggaatggtatcaaccttctgctgtcgtgttacagtgtggtggggactccttgtccggcgatcgtcttggttgctttaatctttccatggaaggccatgctaattgtgtaaactatgtgaaatcctttgggatcccaatgatggttgttggtggaggaggctatactatgagaaatgttgcaaggacatggtgctttgaaacaggtctactaaataacgttatcttggataaagatttaccgtacaatgaatattacgaatattacggtccagattataagttaagtgttagaccttcgaatatgttcaatgtaaatactcccgaatatcttgacaaggtaatgaccaatatatttgctaatttggaaaacacaaagtatgcccctagtgttcagttgaatcacacacctagggatgccgaagatttgggtgatgttgaagaagattctgccgaggctaaagatacgaagggtggttcgcaatatgcgagggacctacatgttgagcatgacaatgaattctattga

SEQ ID NO: 78174 - DNA, 3093 bp, Saccharomyces pastorianus
atgaaggcatcgcttacgtttagtctctccggaatatacgccccctgtagcatttctagggatatatatctcgaatacggcgataaaaaagctgaatgtttatatgggacaattagattgcctcagtacggtccaggttgcacgcctggtaaaattgtacattgtgtcctggatgattcactgcccttctgtagcattgttgtaccttccaaactttttgggtttatgccgacacaacccactatggatttttgctattttgaacccatattagacaatgtagtacctgtactggatagcgtaacgtttctgattaatgaacaattgtattcaaaactaatggacctaccgcaagagatgcaacaaatacaatttttgcattacaaatataacatcaactccatggaaaccgtggttcattctcgagatattttaacatctggtctttgccaaattttaaactgctcacctttcccgcagggccttgttgattttacagaaacccaattgatattagtaaatgatactgagcagaaactaagtactctaaaatatgctaacgaagatgaagaatatgcattacctaaaatagggacaaaatctgctttatcagttgatcttgaatctctcccctgcacaatttcaagagatcttttgcgacctgcacctcacatcaatgatgatgattcaatatatgcctttacagacgctgaaactctactgcgcctggatgtcacaagtggatcgtttataacagtgtcaaatatgggttgcgtcaggctagttaaactgtttgttttactactccccaacggctttaaaaaaagaacaatatacgcacctcccaaaataatagcaagctttccagactgcagcgtcgtgacaatatcaaagtccaatataggccatacagatattcccattgctaatcaagttttcatctcaagagttggaggctggcttcaatctcagaaatgctttcaaaatattattctaacaaccttgaaaaagttttttagcgagagcaaaaggattctttgtcaaaatgatttaatcccaatcgcttttgattcaagtatggctgatctcaatatagcagaggaaaatgatgagtctgatgacgaagatgagctagggcagtactacaagaacgattcccttgtatggttctttgtcacaagctcagagctcgattgcttctctaaagataattctcattttattattgatcctaatcggacgaagctaataacaactaatatcactaacagaagaccattacccttgagtagatccaatcttcagagatattacggttttgctgaaacttttcactatgatttgcatatcttcccctatgtaagacaattggttaacatattagaaacttccttcaattgttctcaaaggggaatcaccctaaatgcctctgtgttacttcattccactacaaacaatgtgggcaaggctacaatggtgagatttgcttcaaaatatcttggtatacatctactggagatagattgcctttcgctcacttcaaattcaagacaactggattcaacatctaagattattggttacattagggctaaatgtgaaaatgtcctaccgtacgcatcacctgctgtgatttttttggctcatttggattcaattttgcttgacgtaaacgctaatcaagatccagaggcaatcaaattacaaaaatctataaacttcgaaatgtctaaacttctggacgattttacgtttaaattcccaggaactacatttgttggctccgtaaataacatagataacgtgccttccagctttagatcacatatgagatttgagattctcgtacccgttccgtctgaagcacagagactgcgtatctttcagtggtacttatcttcacatgaactaaacagagatgttcaacaaaaggttccagtatcttacatggataatatttcattttcatcactctcttcatattctgctggtttaactcctttagacatcaaatcaattgtggaaacggcacgaatgacggctactgcgcgtttttaccaagaatcaaagaagtatggatggcttccgcaatcaattttgatcactcaggaggatttatcaaaagctacttcgaaagctaggaacgaattctcggtttcgattggtgccccacaaatccctaacgtaacttgggatgatataggtggtattgattttgttaaaggtgaaatattggacacaatagacatgccgctaaaacatcctgaattatttacctcaggtatgaaaaagagaagcggtattcttttttatggtccaccgggtacaggtaaaactctaatggctaaggccattgcaacaaatttttctttaaatttttttagtgttaaaggccctgaactgttgaatatgtacattggtgagagtgaagctaatgtgcgcagagtgtttcaaaaggcgagagaggctaaaccttgtgtcatatttttcgatgaaatcgattcagtagcacccaaacgtggtaatcaaggtgattcgggtggtgttatggatcgtatcgtttcacagttactagcagagttagatggtatgagtaccgacgctgacggtgtattcgttatcggagcaacaaacagaccagacttattggacgaagcactactaagaccaggacgattcgataaattgttgtatttaggcattccggatacggataccaaacaattgaatattttagaggctctgactcgcaaattcgtgctcgacaacgacgtaaagtttattgagttggcaaagctatgtccatttaattacaccggggcagatttttatgctctctgctcagatgcaatgcttaacgccatgtcaagaattgcacgcatggtagaaaaaaaagtttctcagcataacgaattgacgggagagaatatttctacacgtcgctggtttgataagattgcgacaaaagaggatactaaggttgtcgtaaaaatggaagacttcttgaaagcacaagagcagctcaccccaagtgtgtcgcgggctgaactgaatcattatgaagcggtgagagctaattttgaaggtgcttaa

SEQ ID NO: 78175 - DNA, 441 bp, Saccharomyces pastorianus
atggttttgcctataataattggtttgggcgtgacaatggttgctctaagtgtcaggtctggtctcaatgcatggaccgtctacaagaccctgtcccctttaactattgcaaaactaaataacattcgcatagaaaacccgacggcgggctaccgcgatgcacttaagttcaaaagctcactgatagacgaagaactgaaaaatagattaaaccagtaccagggaggctttgcaccgcgaatgacagagcccgaagccttgctcatcttggatatctccgccagagagattaatcacttggatgaaaaattactgaaaaaaaagcacaggaaggctatggttcgtaaccacccagacagaggagggagtccctacatggcggccaagataaatgaggcgaaagaagttctcgaaagaagcgttttactaagaaagagataa

SEQ ID NO: 78176 - DNA, 3012 bp, Saccharomyces pastorianus
atgaataaactattgttacatctagtacgagtcatttcgatactcggcctagcaaacgctctcacacaaacgcaaccgattttaaaagatattcaaataacagatagttataccaaaacaaaagaatgtgcggatccagatcattggttcataatagaagggcaactgtctatcccaaagggaagtcagcaaaatataacattccaagtaccagatgctttcagctcattccctcaagaacccttcagcataaaacataattctaacagtgttgccacgatatcacgcccagataaatcgacgaacaatttcaccatttctattccagaaaagagttcagaagacataactactacatttaacttccttgcacagcttacatcagatgctaaatccaaagttacagaaccaaaaagcattgtttacagtttctattcagaaaatactatgtttaatgacgttattgattacgtcgctaaaaatacttctgctataacaacagatggtggtatatacaaaactaataataccgcctggtttaccgttgacttaccaatgagaacgttcataaatcccgtttatttgacttctcagacatcttcctcctcagattacgtattcgatacttcgttgactaagtttgaggttgtcactgccgttgattcttttaacgaacctattaatgctatcccatatacaactgttcatgactactccacagaagatgaaattaaatgtttatttaattctacaatcagcggtgggctatacttccgtgtgacttatttcacaaagaagctatctacctcttccatatcaaatactgtcgaattaacatatcccgatgaaggtacatctgtcagacttttaggaaagagagatacttcaaccaccctagcctcagaattatattctgagtcagctgctaacattgattccaccaccagtgatgacacaactagctctgatgctgctataacaccaacatactcaaattcaacgctttcttcttatacttcgcaatcatccgctatccctgaagttgcggttactgcatcattgagtagcgggatcctttcttctacagttaacggtgctagcacctcggcggacgcttccatgtccgctgtctctacggtttcttctagcagtgaacaagcttcttcttcaagtatttctttatcggctccaagttcttcaaactcaacctttactactccttcatcttctctgtctgctactgaaacatatagtattatcagttcagctagtatatctgtcacacaggcttcctacattgataattctacaactaccgctgctacccaatctacttctactatagcagtttcatctgctgaaaaattgtcaagcactctatcatacaccagtaacgtcacaatatcactatcatcagctacccaacatactactactccttcatatgttagtaactccactacactctcatcctcatctgttcttgaatctgtaattagctctccatacctggcaaacactactgtttcaggagcttcatctgcaagtcaatctactaatccgccatatgtctccaactccacgacatcatccgcaactcaattagccaccattgctccgttcgcgattaacataacaggaacaagtatttcttctagtatcactaatacttcttcagttagttctactacgtccagtttatcatccggcccatttgtttcaaacacaacggttgcctctgggtcttatattctaaccactactacagagtctgcacaacttactgaaatagggagtttgataccaatctcgactattactactagtaccaccacttctggtaccgataaaactggtagtaataaggtggcctcttcaactgaaatagcgcaatctatcgtaaacaacagttcactttcggtgtcaacaatcaacactaacgctgcgacagcagctgctaatgccagaaatgctactttcactcatgcaacccattctggttcgcttcaaccctcatatcatagcagctcactattatcgtccacaattgacaccaaggtaactactgctactacaagcaccagtagagacggtagttcgagtttggctttcaccactgggctcaatcaatccgtagttaccggtacagataaaagtgatacctatagtgtaatttcatccacagaatcagcccaggttacggagtacgacagcttacttccaatttccaccctgaagcctacagtcgttacaggtacaagtagaaacagtacctttagtatggtgtcctccaccaaattgaccgaagctactgcaacggataaaggtgatgcgtatagtgtaatttcatctacacagtcggctcaagttactgaatatggaagtatgcttccaatttctacgctggaaacaccaacagtcattatgagtaccgatgaaagcggctattttactttaactacatgtactgagtctgggcaagctacagaatatggtagtctgattccaatttccacactagatggttcagttatatatacatttactggcgaaagtgtagtggtgggttacagtaccacagtgggtgccgcccaatatgcacaacatacaagtttagtcccagtatctaccatcaagggttccaaaacttctctttcaaccgaggaaagcgtagtggctggctacagtaccacagtagattctgcccaatacgccgagcacacaaatttagttgccatagatacattgaaaactagcacattccaaaaagcaacagcaactgaggtttgtgtcacatgtaccgccctttcttcccctcattctgcaactttagatgcaggtactactatttcattgccaacaagttccagcacatctctatctacaataattacctggtattcctcatctactattaaacctccttcaatttctacatactcgggcgccgctggtcaattaaccatccgtattggcagtttgttgctagggttaatctcatttctgctgtaa

SEQ ID NO: 78177 - DNA, 1011 bp, Saccharomyces pastorianus
atgaatgacaggctttcgttgacaagtctgtttcccaggtgtttgaccacatgtttgtatatttggactgcatacataacattgacaaggattcatcaaatacctaggtggtttctcgcgctaacaatagttccgacattggcagtggctctatacacttattataaggttattgctagaggtcccggttctcctctagatttccctgatttgttagtccacgatttaaaggcagcggaaaatggacttgaacttcctccggagtatatgtcaaaaaggtgtttgaccttaaaacatgatggaagatttcgggtgtgccaagtatgccatgtttggaagcccgatcgctgtcatcattgttcatcatgcgatgtttgcatattgaaaatggatcatcattgcccttggttcgctgaatgcactggttttaggaatcaaaaattttttattcaattcttaatgtacacaacattatacgcgttcttagtcctaatttatacttgctatgagcttgggacgtggtttaactccggtagtttcaaccgtgaattgatagattttcatctattaggggtggccctattggcggttgctgttttcatttctgttttagcatttacctgtttcagcatttatcaggtttgtaaaaaccaaactactatcgaggtacacggaatgagaaggtatcgaagggatcttgaaatcctcaatgacagctatggaacaaatgagcatttagagaatatatttgacttgggttcttcaatggccaactggcaagatataatgggtacatcttggttagagtggatacttcctattgagaccttcaagtacaaaaagtctaaacacacaaaggatgaaaaaggtttatattttaatgtaagacctcaagtacaagaccgactgctaagtagtagatgtttagaagatcaattactgagaagagtaacaccaagaccctcattagaagccgatagggcgtctgtagaaattatcggtgcaaattag

SEQ ID NO: 78178 - DNA, 2640 bp, Saccharomyces pastorianus
atgaacaatgatgcaatggagcatacccttggtggaggtatacttaccacatctgggtctaagcagagaaagacctctaagtttgtaatgggtaaatatacgttatacgaaaccaaagatcgaatgtatattgttggaagcaataaaagggaaaccatgtttcgtattctagaaattgatcttactgtaccccgtggagaattaactgtgttggaggataatgtcttcttcaccagaaatgaaatcatgaatgtactagcaagtttagaagaagcaactgaagatggtctacataagaaaattacaggatacggtcttctgggattcattaaattcacctgttggtactatttaataatggttaccaagtatagccaagttgcagtgattggcggtcatggtatttatcacattgatggtattgatattattcctattacgaacaactataaaaaacctgaaaaaagttcagatgaggcaaggctattgaatatatttaaggatttagacctaacaaaaaccttttatttcagttatacctacgatatcacaaatactttacaaaccaatatattgcgagagaaattaaaagcggttgaccgatgtgatattacaataccttgcgggataaccgactataacgaaatgtttgtttggaataacaatttattatctcctatttttgcttgtattgacactgtttttgattggttccaatgcattatacatggatttattgaccaggttaatgtttcagttttgggtaagtccatatatattactttaatcgcaagaagatcccaccattttgctggtgcacgctttctaaagcgtggtgttaacaataaaggtcatgttgctaacgaagtcgaaactgaacagattgtaacagatatgattttgactccattccatcaaccgggaaatggattttttgatagtgatcgatacacttcttttgtacagcatcgtggctcaatccccttatactggacccaggatgcgtccaatttaaccacaaagccacctataagaatcaatgtggtagatccatttttttctccggctgcgttgcattttgataacttgtttcaaagatatggtggcggaaccattcaaatactgaacttaattaaaaccaaagaaaagacgccaagagaaactaagttactctgggaatttgaacaatgtatagattatctgaatgaatttttaccaacactaaagaaattagattacacctcttgggatatgagcagggcttctaaacaagatggtcaaggtgttattgaattcttagagaagtacgcggtaaacactgtcacgacgacaggaatatttcataatggtccagactttgcttctacaaagatccaggaaggaatatgtcgaagtaattgtattgactgtcttgataggaccaacgccgcccaattcgtcattggcaagagagcacttggttgccagctcaaatctttaggaattatcgataatagttatttagagtacgactctgatatcgtcaacatactaactgaattgtttcatgatctgggagatactattgcattacaatatggcggttcgcatttggttaacaccatggagacatatagaaaaataaatcagtggagctcccattcaagggatatgatcgaaagtataaaaagattctacagtaattcattcgttgatgcacaaaggcaagatgcgattaatttattcctgggtcactactcctggagagaaggatttccctctttatgggaaatgaataccgatttctacttgcataatgcttatagtcttaatatgcctaaaaggagctatactcattggtggaatgattacaacatcaaaagtgtaaaagaattgattaatgaagaacttattgcaacaggtaatgatgtgacaagagagaaaattataaaaaacgtaagaggttatcctggtgcctttgacaattactggaatgaatattatctgccaagatcagtaacttggattcgcgatctctttgcatataatatgaattcaacaagaagatatcataatgctttgtccaaacaagacaaggctatgtcgccgttcacttctaggaagcaaagttggctgaataataagctaaagatgatcacatccagtaagagtttagaaaaggctgaaggtagggtagttgagactaccgatttagacagagatacatctccaaagcaagaattagaattgtatgaacattacctgcacataatatctgacagaagccaaaagttggaagagaaaatgaattcattttcgtattcaaaatatccaatttttatcagtcatgaaagtagtgagattccaccaatgagaaaagtaataggagaaccactagttgatattgcagaagatttcactgatgtatacgatgatgatgatgatggtgacgatgagaatgacgagatgacaacagaagcacttcttattgctcctgatcatgtgtctgttgacgaaaaattttacgaaaaagtcctcaatgtcgatgattataaacctgctcttgatgactattctgctgttatacacattaagcccgacaatttgcagctttacagggatttgtgcttttctaaagatatacaacttgattttcaataa

SEQ ID NO: 78179 - DNA, 396 bp, Saccharomyces pastorianus
atgaatcccagaagaccgtatcctgtaattttcttatgtagaccatcttcagttgcttcttctaaacttgctagtacattcatgatttcatttctggtgaagaagacattatcctccaacacagttaattctccacggggtacagtaagatcaatttctagaatacgaaacatggtttcccttttattgcttccaacaatatacattcgatctttggtttcgtataacgtatatttacccattacaaacttagaggtctttctctgcttagacccagatgtggtaagtatacctccaccaagggtatgctccattgcatcattgttcatccttgtcctgtttcttttttgctttgcgttacgttactacgtttcaaaactaattaatttcaaataa

SEQ ID NO: 78180 - DNA, 1245 bp, Saccharomyces pastorianus
atggtaaatttcgatttgggccaagttggtgaagtattccgtagaaaggacaaaggagctatagtgtccggagacaacccagaagaagaagaagacgtcgatgcttctgagtttgaagaggatgaagtaaagcctgtgcgtacaaagaacagaagacccaaagaggatgcattcactcaacaaagattagcggctataaacccggtgttaacgccgaggacagttttgcctctttatctgttaattgctgttgtatttgttattgtaggagggtgcatattagcacagaactccaaagtggatgaagtaaccatatattaccaggactgtatgactaacgcgacctcatcatggagcgacatcccttctgaacattggcaatttgtatttcacaaatataaaacatataatactgcaccacaatggaggtttgtggatgatgaatcagatgacttcacaaaacaaagaggtacatgccaaatcaggttcactactccaagtgatatgaaaaataacgtatatttgaattatgtgctggaaaaatttgctgccaatcacagaagatatgtactatcttttagcgaagatcagatacgtggggaggacgcctcttatgagacggtgcatgatgcaaccggtataaattgtaagccactatctaagaacgccgatggtaaaatatactatccatgtggcctaattgcgaactcaatgttcaacgacacgttccccctgcagttaacaaatgtaggggatacgtctaacaactattcattgacaaataaaggaatcaattgggaatctgataaaaaaaggtacaaaaaaaccaaatacaattatacacagatagcacctccaccatattgggaaaagatgtatccagatggatacaacgagacgaatattcctgatattcaggattgggaagagttccaaaactggatgaggccaggtgcttttgataaaattacaaaactgatcagaatcaataaaaacgatactttgccagcgggtgaataccagttggatatcggtctgcattggccagtattggagtttaatggtaagaagggaatctacttgactcacggttctcaccttggcggtagaaatccatttttaggtatagtttacctgattggaggctgtatttgtgctgccatggcattgatattattaacgttttggctcttcggcggtagaaagattgctgatgcatcaagtttgtcatggaatatgaaatag

SEQ ID NO: 78181 - DNA, 855 bp, Saccharomyces pastorianus
atgttgtggaaagtttctaagatgttcttgggtggcttggtagcgctaacaacaatatcggttgcgaccctttatcactaccaaaatcgcctagtctacccatcatgggctcaaggcgccaggaatcatgttgacactcctgattcccgtggaattccttatgaaaagctaaccctaattacacaagaccacattaaactcgaggcatgggatatcaagaatgaaaactcaacaagtactgtgttgatcttatgtcccaatgccggtaatattggatactttataccaataattgacattttctatcgtcagtttggaatgagtgtatttatttattcgtatcgtggttatggtaactcagaaggttcacccagcgaaaagggtttgaaattggacgctgattgtgtcatatcgcatttgtcaacagattctttccattcaaagagaaaactagtattgtatggtagatctctaggtggtgctaatgctctttacattgcttcaaaatttcgggatctatgcgatggcgttatactggagaatacatttttgagtattcgaaaagttatcccatatattttcccccttttgaaacgctttacgcttttatgtcacgaaatctggaattcagaaggccttatgggaagctgtagttcagagacgccattcttgtttttaagtggattaaaagatgaaatcgttccacccttccacatgaggaaactgtacgaaacatgtcctagttccaacaaaaagattttcgaatttccacttggttcacacaatgatactattattcaagatgggtactgggatataataagagattttctaatagagaagggttttatctaa

SEQ ID NO: 78182 - DNA, 441 bp, Saccharomyces pastorianus
atggttatttattatggaaaaaaaaactgcactttgctacttcttctatttatattatgtaatatctactccggttcaaatattttattgatctcttgctcattctttttcctcgtttcaggtactagtatccaactgaatattatcaacgctaataggcaagcagcaaatatgtatcctagtttgaaatcaattttggatacaatcatcggtgttaaaagtgatattaagaaattgagcatccaattgataaatgtgcaaatagccattgatatggccctcgttcttagagggaacaattcggacactagtacaaatgtaactgggcccaatgttattgcaaaccaaaaaataaaacaacaagtcacgataattaaaacaatatttgagaagtccgtttctcttccaaatgtccccacagtagcatatgtcatcatataa

SEQ ID NO: 78183 - DNA, 1623 bp, Saccharomyces pastorianus
atgactgctcagattccgtatcaacatagctcgggatacatctctcattttcacaataatgagcttgatgcaggcaggggaagggattataatgtaaccattaagtatctagatgataaagaagaaaatatagaaggccaagcagcaaagattagtcacaatgcgagtctgcatattcccgttttattgtgcttggtaatctcgcttggtggctttatttttggatgggacattggaaccatcggtggaatgacaaatatggttagctttcaagaaaaatttggcacaactaatcttatccatgacgatgaaacaatttttgtatctactaagaaacttactgatctgcaaataggcctaattatcagtatttttaacatcagttgtggcgtaggggctttaactctgtcaaaaatcggtgattggattggtaggaaaggtggtatatggtttgccttagtagtgtactgcatcggtataacaattcaaattctctcctatggaaggtggtattttttgacattgggaagagccgtaacgggcatcggtgtgggagtaaccactgtcttggtgccaatgtttctctccgagaattctccactaaaaatcagaggctccatggtatctacgtatcaattgattgtaacatttggcatactaatgggaaacattttaaatttcatatgcgaaagatgttataaagatcctacacaaaatatagcctggcaattgccattgttcttgggatacatttgggcaattataattggaatgtcacttgtttacgttcccgaatctccacagtacttggcaaaaatcaaaaatgatgtgccctctgctaaatactcttttgcgaggatgaatggcatccctgcgacggatagcatggtaattgaattcatcgatgatttgctggaaaataactataataatgaggaaactaacaacgaatcaaaaaagcaaagcttagttaaaagaaacacatttgaatttattatgggaaagccaaagttatggttgagactgattattggtatgatgataatgacatttcaacagctgtccggaataaattatttcttttattacggaacttctgttttcaaaggtgtcgggattaaggatccttatattacttcaatcatactgtcaagtgttaacttcctttctacgatattaggcatatattacgtggagaaatggggccgcaagacatgtttattatatggttcaacaaatttattattttatatgatgacatatgctactgtggggacatttggaagagaaacggacttctcaaatattgttttaattatcgtgacttgttgttttattttttggtttgcaataacattgggcccagttacatttgtactagtgtccgaattgttccctctaagaacgagggccatatcaatggctatttgcacatttatcaattggatgctcaatttcttaatatcacttttaacaccgatgattgtatccaaaattgatttcaaactaggatacatatttgctgcttgcctattagcgttgataatattcagttggatactagtacctgaaacgaggaaaaagaatgagcaagagatcaataaaatatttgaaccggagtag

SEQ ID NO: 78184 - DNA, 1398 bp, Saccharomyces pastorianus
atggacggacataatcagaaccagtaccagaatcagaatcaaatccagcagtcacaacaaccacctctgaagaaatatgtgacacagagacgatcggtagacgtgagttctccgtatattaacctatattacaacagacgacatggattaccgaatctagtggtagagccagaaacttcatacacaatagatataatgccgcctaatgcctacagaggtcgagatcgagtcatcaatttgcccagcaaatttacgcatttaagctcgaataaagtgaaacatgtgatacccgctatccagtggaccccagaaggcagaagacttgtagtagcaacttatagcggagaattttctctatggaacgcatcttcgtttacgtttgaaaccctcatgcaagcacatgattcggctgtgactacaatgaaatattctcacgacagtgattggatgattagtggggacgcagatggaatgattaagatatggcaaccaaactttagtatggttaaagaaattgatgctgcacacacggaaagtattagggatatggcattcagtagtaacgactcgaaatttgttacctgttcagatgataatattttgaagatttggaacttcagcaatggcaaacaagaaagagtattatcggggcaccactgggacgtgaaaagttgtgattggcatcccgagatggggttaattgcctccgcatctaaggacaatttagtaaaactgtgggatccgcgttccggaaactgcatatcatcaattctgaagttcaaacatactgtcttgaagacgcgatttcaacccaccaagggaaatctattaatggcgatttcaaaagataaatcgtgtcgtgtgttcgacattagatacagtatgaaggaactaatgtgtgtaagagatgaaacggattatatgacactagaatggcacccaataaatgaatctatgttcactctggcgtgctatgacggctcgctaaagcattttgatcttttacaaaatctaaacgaacctattttgactattccatacgcccatgataagtgtatcacttcgttatcatataatccagtaggacatatatttgccacagcagctaaggatagaaccataagattttggactagagcgaggccaattgatcctaatgcatatgatgatccaacttataacaataagaagataaatggatggttttttggcatcaataacgacatcaatgctgtgagagagaagagtgaattcggtgcggccccgccaccaccagctacacttgaaccacatgcgttaccaaacatgaatggattcatcaacaagaaaccgcgtcaagaaatcccaggcatcgattcaaacatcaagagttccacattgccaggtttaagcatataa

SEQ ID NO: 78185 - DNA, 957 bp, Saccharomyces pastorianus
atgtggagactaaccagaaaaatcagcactagaatccatatttctaatcagctgtcgcccatttctaacaaggcaattggaacagttcctgtttttcgtttttattcttccagcccagagcagaagtatagaaagaaacttttggaagaggctcaaaaacaaggttttaacagcatagaagagttgaaaaatcatttgaaagagactatagagtctaagaagcgggaatttaataaaatcgaccccctgaaagaactagaggattaccaacaaaaaactcaaatggaaaataacaactccaagcatttgatgacgaaatcaagaagtcctctcgatccaagtgctcctaaagttcccttcaaaacattggactcttttttggatgttggaaaactgaaggacttatcgaaacaggaagttgagtttctttggagagcaagatgggcacaaaaagataatacattatgcgccgtgattcctgtctccgtttatgataagatgatggcaaatgccaggaataaccctatattcgtgttgccacttcctagacaagttcaatctgaggatgcaaaaccgaacgaagaacagggaatggaactacactacatccaatggcagtttgtcggaccccaaacaacacattgtatgatgacttcccttgcagaatacaaactacaccaggaatttgcaaggccacatactactttgcagttccattctgatttggtcaaggataagggaattgtttttatgaatggccatgttgaaccggatacaaacgtgaatgtacaggatgcacagctgttattgctaaacgtgcaaaggttttatggtgcaatgggtgaagaaactccagttgctaaacagagagtgcagttattaagagatttctctaaggcctctccgggattcaccgtcgagaaattgatttcgctatcacagtccatggaaaattaa

SEQ ID NO: 78186 - DNA, 768 bp, Saccharomyces pastorianus
atggatgaatcggtggatcctgtggagctgcttctacgactactgatacggcacaaacctcatctgaaaccatatgcctacagacaagatagctggcaaagggtgctcgatgagtacaacagacagactgggtcaagatatagacaatcaaggacgttaaaaaccaaatttcgtcgactgaaggacctcttcagcgcagatcgagcccaattctctccttcccagttgaagctgatgggagcactcttggacgaagcaccagaacatccaagaccaagaactaaattcggaaatgaatcatcttcatcctcatcatcatcttctttcattaaaagtcatccggggcctgatccgtttcaacaattatcatccgctgaacatccgaataaccacagctccgacgatgagcattcaggctcacaaccgctgcccctggattcaataacgattggaattccgcctactcttcacacaatccccatgattctgtctaaggataacgacgtcgggaaagtcatcaaaagccctaagataaacaagggtacaaataggttcagcgagacagtactgcctccacaaatggctgctgagcaatcgtggtcggactctaatatggaattggaaatatgtctagattatcttcacaacgaactcgaggtgataaagaaaaggcaagaagattttgagtgtaaagttttaaacaagctcaacataattgaggctctcctttcacagatgagaccacccagccaaggagataaaatataa

SEQ ID NO: 78187 - DNA, 2715 bp, Saccharomyces pastorianus
atggagacgttattgcatgcaaaattattgctgtctgcagaagtagaatctctgaaaagtggttctttcgaccagacatatgtgaaaaaggctgaacatatcatcagtggtgaatcataccagctaatacagcaatttgtggacaaatttaagggaaaaattagtatttcgggagaaatatccacatctagtgttattgctgctctaaatgactttcttaacgttgaggttttcaaaatgggccaagaaaatgagatgctatttttggctattgccctcttacagacctttattcaaaataactacaccggcccagcagctaggttgaaagcaatctcaggtttgtttggcaaaactggaattgaaataggagcagttaatacagccctttcccgctcattagccattatgggccagcctgcctacgaatttatggatgatccattgtatttggttttatcactattattacttgaaaggataaccggccaaaaaagcttatttgatgttaccccggatcaagaaattccgctacctattatctctgctgagtctactcctggattattagctgtagcttattggtggtgggcaagagctcttttgacgcaattgtcactgattccagaaccttctgggttccaagctagtgttgcatctgcaatatatcagtctgctgaccttgcatatgcgataactaaggaattaccggagagtattcacgaagatttcaaaagagaactttgtgcaatgtactatctagagaatgtcaaatgttcattggccatcaacacagaacatttgtgcctgccatccttgaccagagcgaaaaagataacaaattttgaatttgtaatgacgggtgcacgcgctactagaactaaatatcaacaaaaggctcatgccggtttgatcattcttgccaaatccttcacatttcaaaattttgctttgagaacgacatctgctacaccagaaacatttgctttagagtccgatctattattggagaagcctcattttgagtccattgctgatgaacctctagacgagcaaatttatagtaaaagacaaaaggtagacctaaatgcaggttatgaagaagataaactattgccattggcactacgtcaagaaaatattccaaagtcgttgctggatttgaaccctaacgatcaacctactctatctgattacgacaacatccagctgctgttacgtctttacaccataaagaacacaactccggccaaggatcctcttgtggaagaagaacttactgccttgctttctagaatattatatcaaaacggtgagaaaaattggtctattttcgcccgatcattatgggaaaggtcaattattgagacaacaaaggctaaaactattgaaagaggacttttacaaatgcaatccctcgtagaagaattggatttgaagattaagagtaaattggttccaagttcaaacgaaatcaatgttgctagcaggctgtcatacatccaccagctgccgttcatccctaggtggcaactggatgccaccttagctgaaaaatatatgtcgctgggtattttgaagtccgctgtggaaatttatgaaagacttggtatggcatgcgagactgcattatgttatgccgctgttggagatgaaaaaaaggcagaagaaatccttcttcaaagaataaatgaaaatgattcggatgccagggcttactccattttgggtgatataaaacaggatccatccctatgggaaaaaagttgggagattggaaaatacgtcaacgcaaaaaattcccttgcaaagtattactttaatcctcctccaaagtctggagcacaaccaaattactctgctaccttgaaacatttaaatgactcgttaaggcaatacccattaagctttgaaacgtggtatttttatggttgcgttggattacaatgtggtaaaatgcagatagctgcggaggcatttaccagatgtgtttcattagacccttatcatgctctttcatggtcaaatttgagcgctgcatatacgaaaatggataaattgaaagaagcttatagttgtttgaaaagagccatttcatgtgacgctcaaaagaactggaaaatttgggagaattacatgcttgttgctgttaagttgaatgagtgggaggatgtcttaactgcatgtaaacaattagtcagtattaggagggacaaatctggcgaaggttccatcgacttaccaattattgaaaaactagtagaactattagtgactagtgaatatccagaggagccgcagcaattatcttattttcaaaagagctgtactgagtttatctgtaacactttacctcaggtaattacaaccagtgcaagatgttggcgactggtcgcaagagtagaactttggaggaagagaccatgggccgccctagaatgccacgagaaggcttatagggccatttctcacaatcctgatttagaagttgaagaaaaggtttggaatgatacagtggatgcttgtgaagatttggtggctgcctatgaatcacttggtgaaatggaaggtaaatatgggccaggcagtctggtttgcaaagactggaaatacaagtgtagatctactatcaaagctctaatgagtaaaggcaaaggcagatgggatgactctcctggttgggataggctagtggaagcaagaagccaaatatga

SEQ ID NO: 78188 - DNA, 2292 bp, Saccharomyces pastorianus
atgaaacggttgcaattgtttggtagatcaaaatatttctcgctggtctccagtgctgcgaaggaggaagaagaagaggaagagggctgtgctgatgccaaaagccttctacatagtacgagccatgatatcaaatcgagatcactacgcttcaacgataaatcgtccctcatgtgtttgccaacaaaagttctactgttaatactgcgaactttggacttcaatacattagtaacactatgccaagtcaattcgaggttctacaatttgattacgaatgagttccttttccaaaacgttattttggactcaaaactttcgttgttaaagttcaatgctttgatacactccgagttccacacgtcgaacattgtcacacacagcggtgattgtagcacacaatctagatcacaaaatgcaagattcctcgtaagatccatcgaattcaaaaatcctcagtcccaagactcgttgttaaaatacagtaagttctataataagagtggccaagattctattattgctggatcttataaactcgattcgtatgataaagacgtaaaaaaactgaataacatcagactaaacgatgagactcccatcataacttcagaacgaatcaaactgcttgataaatttgaaagcaattacttccattatacttatattgagctaatgcttgatattatagactatctaccgaacctgaccagagtgattctgagtgatgtggaaccgaattttaaaattcctttatggtattctgtattcaacgatggatctagagattttttcaagaaaataatcaagggccagcaatccatcacaaacgaagatttgaggactttccaactatccaaaaaatttgtcaaagaatacgaatccaagtattattctctgccaaggttgaaaatactggaaatcaaagctaataataaaagacagagaacctctaatcgtcaacgccatcaccaaaagctcgtactaagaccgagtttattctgctgtttcggcataattaatgaacttaaactagaaaatgtaacgatagacaccgaatcgctagatactccaatggaattcttaccactatttttaaagaacgaagataacgaactgtacagtttacagtctcctatcactgcacttactttagattcatgtgatgtagttcctggaaatggaatattacgtttgtttcactcttactttaaaatggtcaaacatctatccttattgaagatcaacagtaaattcgacttattgttatgcagttgtttcccatcgttatccaatctaacaattgattgtaatagcaaatgtttcactaacgaacaggtagtcggcgaatcatattatttccaacagcgaagtttggatacagaagatgattttgatgattgcaattccatgacagaaacattatttgaagcgccatcagattcgaagataattactcctccgccgacatcttcagttgtattgtccttaaatctgaactatatttctagaactacaggaaatgatgtttcaaataacccatcaccagacaataacaaaaagcccgccatgttaactgcggcacagctacaaacttttcaacgacaaagaatccctgaatttcattctttctaccattattaccgcttactttgggagagacttccaagtaaaaatatttctattaacgtaatcaatatcccctttaccaatgtgtatcctttatcccctctatcgttttgggaacatctagcaagaacaattactagtgttgatgagacagatgaggatgttggcgacgagaacgatcaagaaacattaatcggttacgaaaataattccataagagataacataccaaatgctaatgcagttccaaatttaagtacagtaatgagccctgaatcagacattcaccacacttactattggaacaactctgtaaggcgttgcctaagagatagtttaatcaaattgaaaaaccgaaccatcgaatatagagatttagatgtggaggagttcttacaaaatgtgacattggaaaattttttcaatgatttccaagatccagagaatttcaaagatattccaaatattaacctctggtgtttcctgagaaatttgtcaaaattcaaagctgtcaaaataagaatgctgagacatttttcattatgtacacctagaaccagatacgactgggaactattattgaagcccgtactgcgtgtaaatgttcccattgaagtcagagataaggacggattcgttctttattcttacgggcaaaaataa

SEQ ID NO: 78189 - DNA, 618 bp, Saccharomyces pastorianus
atgagaggaaaggtgaaagagcgtcatgttggcttcaggggatcagcgatactaaagcagcaccggtgcaactggaatatcaagagactgaacatgattccgaggactagaacactactgcaaagtaaaataccaattaccaggtactttgccagatgttgggcgcctcgcgtacgctacaacgtgtgccgtactctacccgcagcagcgttgcataccaatatcatcgcacataatgaagtgaaaaaggacgataagaaggttcatttggggtcttttaaagtagacaagcctaagatgatgatagctttcacctgcaagaaatgtaacacccgatcttcacacacaatgtccaagcaggcgtacgagaaaggtactgtcttgatctcttgtccgcactgcaaagtgagacatttgatagcagaccatctgaaaatattccatgatcatcatgttaccgtggaacagttaatgaaagctaacggagaacaagttagccaagacgtgggcgacttggagtttgaagacatcccagattcgctaaaggacgtcctgggaaaatatgccaagaacaactcagaaaatgcatcccagctccctcacccttcccagaaatga

SEQ ID NO: 78190 - DNA, 1776 bp, Saccharomyces pastorianus
atgccaagaaaaaagtctgccgctaaaagagctagagaacaagcaaaaaaagaagcggccgtacctgcaacggatactgctaccataaaaacttctgaaacctctgcgacgacagttaagcctgcaatcgaagcaagcaaatcgtacgttcctagtgaagatgaggaagaagacgaagaggaagaagaggaggaagatgattacggtgaattgattactgatgaagtggaaaatggtattaatcaagtgctagatgccatcaaaaacaataagacggacaaactactagatcctaaagtcaaattcttcgaggatcccgaatctgctgctgccaaactggccaatcgtgaggggaagcataaacctatttacctaaaagattatcaccgtatgaacatactttctggtgatgccttaaaggaggatgacgaagaatacgaacatgcaactgttgacggaaagcaatctttcgtctcgcaacaacgtgaagagaaaactcagcttttaaatgaaatcaagagtgcctttaacgatgaagaaaatgaagagtctagcggagatgaagacgatgggtttttgaagaaaaaggaaccttctacgaagaaggaaggaaaaaatttaccggatccaaccgtaaatgaagaaaatttcttggaagaattcgtgaatcaacaggcctggattcctaagaagggggacaaggtgatttctcttgacctcaacaataatgaagaggacgatgaagaatttgaagatgctgcagaaaaatttgagaatgcctacaattttaggtacgaggacccaaacgcagctgaaattatatcttatgcacgtagtcaagctacactaagaagatccgacgactcttcacgcagaagaaaaagagaggaaaaaagaaaaatcaaagagcaaataaaagcagagaaggagacagctcttcagaaaaagaagactaaaaaattaaataaattgactgacattttagagcaactaacaaaggaatatggtgctgaaattaatgccgacatggtgaaaaaaatcactgacaccctattgaagaacgatttcaaagaagaagagtgggataacgtggtagctgaattatttaatgaagaattttatcaacaagagggaaagcctacctggaacgaggatgacgaaataatgggtgacttctatgcagacgccgatggtgatgaccaagcagaagaaggtgaagtggaaaaagaacaaaaagaagaagacgaggaagaaggtccaaaaagaaagaagagcaagaaagaagagaaactgcaaaagaagaaagaaaagagaaaggtaaatgaattagtggaaaacgctttggaacaaaacaaactagcactaatagaggaggttgaaaaagaagaggaagaaagaaagagtagaagccgtacaaaagaggagcaagatttgaagtttcgttaccgtgaagtttctcctgagagttttggtttgaccgcaagagagattttcgccgccgatgatactgatttaaatgaatttattggtttgaagaaatttgcaccttatcgttccaaggaactaagagcgaaggataaaaggaaagtgatgaaggcaagaagattaagagagtggaggaagaaaacttttaagaacgaaaatgggttagctccagtcgaagcagaggcaggggagaaggatgaggacaccatactgatacctgtagagaaagcctctaaaagcaaacacaagagggggcacagtcataaacataaaggccaccagaaaaagtaa

SEQ ID NO: 78191 - DNA, 1128 bp, Saccharomyces pastorianus
atgtctacggaagagcagaatggtgttcctctgcaaaggggatctgaattcattgcagacgatgtaacctcgaataaatcgaacaacacgaggcggatgctggtgaaagagtacaggaaaatcggtagaggtgcctttgggactgttgtacaagcatatttaaccgaggataagaaaaactggttgggcccctttgcaattaaaaaagtccctgctcataccgagtataaatccagggaattacagattctgaggattgccgaccatccaaatatcgttaaattgcagtatttctttactcatttgtccccgcaagataataaagtttatcaacaccttgccatggaatgcttaccagaaactctacaaatcgagattaatcgttatgtgacaaacaagctagaaatgccattaaaacatatcaggctatacacttatcagattgcccgcgggatgctttatttacacggtcttggcgtttgtcatcgtgatatcaaaccatccaatgttcttgtagacccggaaaccggtgtcttgaaaatctgcgattttgggtctgccaaaaaattggaacataaccagccttcaattagttacatctgttcaagattttatagagcgcctgaattgatcattggttgtacccaatataccacccagatcgatatatgggggcttggttgtgtcatgggcgagatgcttatcggcaaagccatatttcaaggtcaagaaccccttctacagctaagggaaattgctaaattgttaggtcctcccgataaaagattcattttcttttcgaatccggcctacgatggccctctattttccaaaccactgttctcgggctcttcgcaacagaggtttgagaagtattttggccattccggtccagatggtatcgatcttttgatgaaaatattggtctacgaaccacaacaaagactgtctccaagaagaatccttgcccatcagttctttaatgaattaaggaatgatgacactttcttaccaagaggtttcactgaaccaatcaagctaccaaatttgtttgattttaatgattttgagttacaaattctgggtgaatttgctgataaaattaaacctacgaaagttgctgaataa

SEQ ID NO: 78192 - DNA, 654 bp, Saccharomyces pastorianus
atgctgttacaacctgtttggaaaggctgccgatggacacagtttgtcaggcctatcagaagatggaattctaccggcacgaatagaggagttcctttttcatttaaggatatttcaaatcaggaggatatcacgaatatctcgtatccttcgtcctctgacccagttttgacaaagtcaaatggtagtagtgaggtttacaagcccaaagaggaagtagttaagtacattctacatggcaagtttactaaaaataacacgcatttgacgttttcaagcgttgtggaggacaagaactttcataagaataagggacttacgtataatgatacaatgctgtactatttgaacttaccccagaaagtgaagatttcgctatctacaggttgtttagggttcaggaaggcagcaagaggggagtatgaagctgcatttcaaaccagtggtagaatgtttgaattgattaaggaaaagaacatgctgaacaaagatatcgaagtggtgatggacgactttgggaagggcagagccgcttttatttctgctcttgttggtaaggaaggggccagtgtggtgaaaaaggttgtgaagatcagcgatgccaccaaattgaagtttggtggtgtaagatcaccaaagatgagaagactatga

SEQ ID NO: 78193 - DNA, 897 bp, Saccharomyces pastorianus
atgtcaggtcctccacctccttacgaagagcaaagctcacatctttacggccagcctgcgagggacagccaggatggaaacgctttcatcccggaagactttaaatattccacggtggttatctcgtgcgaacccatcattcgccagcggtttatgcacaaggtttactctctgctgtcatgccagttactggccagtttgtcgttctgctactgggctagcgtttccacttctttgcagaactttatcatgtcgcatatcgccctcttctacatctgcatggtggtatcgctagtatcgtgcatttggctggcagtaagtcctcgtcccgaagactacgaggccagtgttcccgaaccgttgctcacgggcagcagcgaagagccggcacaagagcaaaggcgtctgccttggtacgtcttgtcctcgtacaagcaaaagctcacgctgctctccattttcactctttccgaggcttactgtctgtcgctggtaaccttagcgtacgataaggatacagtactttcggctctgctgatcaccaccatcgtcgtagtcggcgtttccttgaccgcactatcagagagattcgagaacgtgctgaattccgcaacgtcaatatactattggttaaactggggtctatggattatgatcggaatgggtctcacggccttgcttttcggctggaatacccactcttccaagtttaatctgctttacggctggcttggtgccattttatttaccgcgtatcttttcatcgatacgcaactgatttttaggaaagtgtatcctgatgaagaagttagatgcgccatgatgctttacctggacatcgtcaatttgtttttgtctattttaaggattttggccaactctaacgacgacaattaa

SEQ ID NO: 78194 - DNA, 348 bp, Saccharomyces pastorianus
atgacgacattgcaaataatcaatcaatttgttgcgtttagtcttcgacaaattatacaacaagattcgcaggcagccattgtccaatacgccaatgtcattatatgtaccaatatagacgcattatacaatcctacaatttatatcattgtaaaattatttactaccacttattcttcaatggtgtttttaacgttttgtagaggaaaacttaaaagttgccatttttattcagatcgcaatccatggtttgacacattctatcttaaaaaaacaaaatctatttattttggtttcggctatattgatgatgatgaatgtacatataaaatggcaaaatttaaataa

SEQ ID NO: 78195 - DNA, 309 bp, Saccharomyces pastorianus
atgaaattctctactctctccaccgttgctgccattgccgcatttgcttccgcagattccacctctgatggtgtcacttacgtagatgttaccaccaccccacaaagtactacatctatggtctccaccgtgaaaactacttccactccatacactacaagtaccattgccactctatccactaaatctatcagcagccaagctaacaccaccacccatgagatcagcacatacgtcggcgctgccgttaaaggctccgttgcgggtatgggtgccatcatgggtgctgctgcctttgctttgttataa

SEQ ID NO: 78196 - DNA, 315 bp, Saccharomyces pastorianus
atgaaggcatccaaaatttcagacagccggcttcgaggaatagatggaacggttgacagtccctgtaggcattgcattgccagggtcgtcattttagcattccttgattggcaagccaacacgaaagggagtgcgaaatccggatgtctttctagctcctcaaaactatgtactcttttcaatatctcaatggatttatcactagcatggcgaatggttgaatttcttcttttcgattcggaagataaagaacgcaattctgcttcaagttgcctttgcatggagtcaaaccctccagtgttcatggccatatga

SEQ ID NO: 78197 - DNA, 1902 bp, Saccharomyces pastorianus
atgcagaacgatcaacagaggttctccctgcaaaataggacggtactggcgcatccatacaaaaggctaggaggggcatttacggtgaaatcaccgtctgttcctaactttcatgataaaatgcattcagatcatagttctagcgactcagctctggtgaacggaagctttagagcgaatgatcatcgctctgtggaaccaagttgtttgggccaagcatccccctctgaacatgatgggaatttaagcgttattgacctgtatggagacgaagtggaatcccaacgtgccgaaggagaggatgatgatgataataatggcgataatggtaacgaagatctggaggaagtgcacagtgatgacctcgatttggttcctgatgatgacaaccgtcagcgtgtagaattggagggtgccgctagtgccacaagtgcgaattccaatggaatcaacaatacccattttgatcgatacggtttcaaaaaacagaataattacatatctgaagcagaatatgataagtggtgggtagaatattcgcagtactgcgttcgccgtaagcacaaatggcaattgctgttggagaaaagtgggttgccagtgaccgatgattctccttcacgatttccatcaaagagtgaacggttaaaaaggtatgtcagaaagggcattccagcggaatggagaggaaatgcatggtggcatttcgctagagggcaagagaagttaaacaagaataaaggcgtctattcacaacttttacgaaagatgaagcagatcaagaaacaaaaccctaatgaaaaacaagttcaagacttggatattattgaacgtgacttgaatagaacatttccggacaatatacatttccaaagtagcttgcataacaaagagggacctccgattataaaatctttacgccgggtgcttgttgcgttctcactctacaatccgaagattggctattgtcaatctatgaactttcttgcaggcttgctattgttatttttagacgaggaaagggccttttggatgctagtgattattacttcaagatacctaccgggggtgcataatatcaatctagaaggtgttaacattgaccaaggggtactgatgctatgtgtcaaagaatatattccagaagtttggtcgtacattaagccttccattgaccaccaccaaaaaaataacaaaactttttctccgtcaaataacaaagttttattcaatatgcaaaagaatgagttcttgtacagacttccgcccattactttgtgcacggcgagctggttcatgagttgctttgtcggtgtagtgccgatagagaccacgcttagaatatgggattgtctgttttacgaggaatcacattttctattcaaagtttcgttggctgtcttaaaattgagcgagcatgacctttcgaaaataaaacctcgtaacaattcgttgaattattcttggggctctaacttaaaccagagaggcggatcaatgggtcaagaagatagcgatatggaaatttttcaggtcatacagacattccctaagacattattgaacccaaatgagatctttgagaaaatcattttcaaaaggagatttaatttaaataggttagatcaggatgaaatagacaggtgtcgaaaatttgttgccgctcagcgtctcaaatttaagacatatggtgaacttcttggaaattcaacatcagaggcagatttgccaattaatgataatacagataataaaggtatccacataacaagtgatgcagtcaatgaagcattatcttcagaggtatatgggtttaaaaagagcctagctggagttcattggaataatagcatcaaggagaaagtgaagcagatgaggaagaaaaaagacaagggtgactaa

SEQ ID NO: 78198 - DNA, 1212 bp, Saccharomyces pastorianus
atgaatggaatatttgctattgagaagcctagcggtattacatccaatcagtttatgctaaagttgcaacatgctttaactaaaagtcaagtattctcgaaggaaattcaaagggcaacagcggaaagaaagcagcaatatgaaaaacagacaggtaagaaggccagcaagaggaaacttcgtaaagtctcaaaggtaaagatgggacacggaggcactttggatccgttggcctctggtgtcctggtaattgggattggagcgggcaccaaaaaacttgcaaattatctttcaggcaccgttaaagtctatgaaagtgaagccttgtttggtgtttccactacttcaggagatgtagaaggtgagattttgtcccagaactccgttaaacatttaaatttcgatgatttaaagactgtggaggaaaaatttgttggacaattaaagcagacgccgccaatatacgcagctttgaagatggatggcaaacccctgcatgaatatgctcgagaaggaaagcctttacctagagccattgagcccagacaagttactatttatgacttgaaggtgttttcagactctcttaaacgtgatcatgactatcccttattgaggcccactacagaagaagctgttgataccgtgaaaaatttgaatgcaaacatgctaaacgatgttttatacttttcaaaagaatatacagagaagcacggccttgattctgaggtggcaaaggtagaagaaccatttccgctgagtgaacaagaagagcaagaaatccaaaaagaaggagattcttatagggctccaaaattgcacttcaaagctaatgtgtcttctggaacatacataaggtccttagtgagcgacatcggtaaatctatgaggagctcatgttatatggtgaaattgatacgtttgcaacagcaggactggtctcttgaaaaaaataatgtgttcccattaacggattttactgaaagagacgagaaggtgtggagtaaggtactggagaaggttctagacgagggagcaactgttgatgttatagaagagctaaagaaagcagaaaaggaaataccagcggacgtgaagggatgtatagtttcgagtgatcaacctggtgatgaggctacagctgaaacaattgaaactgctaacgccgaagaacattctaatacactaaaaagaaaaatcgaacaggtgtaa

SEQ ID NO: 78199 - DNA, 1023 bp, Saccharomyces pastorianus
atgtcgacaagtacagagaagaggagcaaagaaaaccttccatgggttgaaaaatacagacccgaaacgttggacgaagtgtacggacaaaatgaggtgatcaccacagttcgtaaatttgtagatgaaggtaaattgccacatcttctattctatgggcctccaggtaccggtaaaacttctacaattgttgctttggcacgtgagatatatggtaagaattactcgaacatggttttggagctgaatgcatccgatgacagaggtattgatgtggtgaggaatcaaattaaagactttgcctctacaagacaaatcttctctaaagggttcaagttaattatactggatgaagcagatgccatgaccaatgccgcacaaaatgcgttgagaagagttatagaacggtacaccaagaatacgcggttctgtgtattggccaattatgcgcataaacttacacctgcgttattgagtaggtgcacgagattcagatttcagcccttgccccaggaggccattgagcgtcggatagccaacgtcttggtgcatgagaagctgaagttgtctccgaatgcggagaaggccttaatagaactttctaatggggatatgagacgtgtgttaaacgttttgcagtcttgcaaagctactttagacaatcccgacgaggatgagatcagtgacgacgttatctatgaatgctgtggggcacctagaccaagtgacttaaaggcagtattgaagtcgatactggaggacgattggggtaccgcccactacacacttaataaggtacgcagtgccaagggtctcgcgttgatcgacctaatcgagggcatagtgaagatactggaagactacgaacttcaaaatgaggaaacaagagtgcatttgcttaccaaactggccgatatagagtactcgatatccaagggtggcaacgaccagattcagggcagcgcggtcattggcgctatcaaggccagcttcgagaacgaaactgttaaatccaacgtataa

SEQ ID NO: 78200 - DNA, 840 bp, Saccharomyces pastorianus
atgtgtgaatacagcaaggctcttcatattctgctcaagtcgccagtaacggatgacataataaaattcttaacagacacaacattgagggttgttccttcaagcaactaccccacgcctcccggttctccaggagagaaacacctcacaaggctgccatcgctaatgacttttatcactagattggtcagatacaccaacgtctacacacccactctgctcaccgctgcgtgctatttgaacaaattaaagcgtattctgcccagggacgctactggtctcccctcgaccatccatcgcattttcttggcctgtttgatactgagtgctaagtttcacaatgactcttctcctttaaacaagcactgggctaggtacaccgatggtctctttacactagaggatatcaaccttatggaaaggcagttgttacagctgttgaactgggacctcagggtgaacacagaagatttgatcctagatctgcagcctctattagagcccatcaagcaagacttggcaagatccagcgaccaaaggaagagaattaacatgatgatgtccatgaacagaaggacttgtgctggcacgagtcctatcagatcaaacaacagattcaaactctacgaaaaacagagaaacgtgtcgatagcatccgatttaagttctgctactctagtcgacagttgtaatgatctaagaaggctaaaagatgtaaccaacatagcgaacaacacagtcgctaacacgaattacgtcaggacggtagagaaatggaacgacaatgtcaacaggcaaagttgggatctggaacagatcatgagtcaacatgggttttaa

SEQ ID NO: 78201 - DNA, 1122 bp, Saccharomyces pastorianus
atgttttccgctcaaaagccaatatatggcaatggagcaggcgtgaacatgggtgatggtggtccttcaactaataatccaggatctatgtccatgcctggggttccaactccaatgggtccaggcatgaatcaacaaattccaagtggaggccccatgctaatgggcaatactccgaataataataatagcaatgaaaatggcgagaacaacggcaataacggcaataacggcggtaacgatgctaacgcaactcgaaacaatcccaacatggtcaataatagaggcgcagtgcatgctctagatgatcccaatgtataccactggatttgtcaattgacctacggccctcaaaaggaacaagcactgcttgaattaggtcgcaaaagagaacagtttgatgaccttgccgttgtgctttggtcttcctttggtgtaatgacctcattactgaacgaaatcatttccgtatatcccatgctgcaacctcagatgctctctaacaatctatcaaatcgtgtatgcaacgctctagttcttctacagtgtgttgcatctcacccagagacaaaacatctctttttacaggcccatattcctctctttcttttccccttcctaaatactacctccaggcaaagaacttttgagtacttgagattgacttcattaggtgtgataggcgcattggtcaaaaatgactcacaagacgtaataacgtttttgctaagaaccgatatcgtgccgttatgcctaaggatcatggaatcttcttctgagctttccaagacagtcgccattttcattttacagaaaatcctactagatgacgttggattgcaatacatctgtgccaccttggaaaggttctacgccgtaactaatgtcttaaaagatatggttgagcacttgaccgtgagcacaccaccgggacgactactgaaacatatcattagatgctacttaagattaagcgacgatctcgaagcacgcaggctattgaaaatagtcttacctgccaaactgagagataacacttttacggaagtactaagagacgacgtcgggtccaagagatgtctggcacaattgctactgacattaaacgaagaaacctcatga

SEQ ID NO: 78202 - DNA, 858 bp, Saccharomyces pastorianus
atggatgctgatgaattggaattgaaaggtcatttgaaaaaattgaaaaaagaagaattgcttagaaggaaacagttaaaagagagtaatcttcagaaaagagagcttgaatataataatgcctcaaaaaatacttcaatatatatttctggtcttcccacagacaaaacgacgaaagaaggactcactgagcaattttgcaagtatggaatgataagaaccaatcgagatggggaacccctttgcaagctatatgtgaatgataaaggcgctttcaaaggggatgctttgatcacttattccaaggaagaaagtgttacattagcaatcgaaatgatgaacgagtcgatcttcctgggaaaacagatcagggtcgaaagagcccaatttcaaaacaaggaaggtgacaatatgcacgggaaagaaaatgatttaaaggagttcaacggacctgagcctccaataaagaagctaaaaaaagcgaagtctgaaggagagggggaagtaatagattacaatgacgatgaaagcctagcaaaagctgatcgaacggtgatatttgccaacgtattcaatatttacaaatcatacacaaatgatgatataaatgatattcaggaagatcttttggaaggctgtgaagagataggtcaagtagacagtatatctgtatctcccaataagggggaagcgacggtcgtctttaagaacaataaagttgcattgcaatgttgcaaaatcatgaccggacgttattttgatgggcaaaagttgcttgctttcatttctggagatgagaacacttcaagcacaagtgacaagaatgaggacagcgaagtggaagatgaccttatatag

SEQ ID NO: 78203 - DNA, 969 bp, Saccharomyces pastorianus
atgaaagcggaaaggcaaacaggattaagaaatagttttacaaccgtaatcggtcgcaaactaataaatacttttgttccgtccatgatgttaactagcgtagctggtaacgatatttttttccgaggtttattcaaatcgccggtattagcatttcaaagttatcgttatgtttcgattttgggacaattgaaaccgtccgatggttctacaaagtctttcaaaagacttgggcgtggtccttccagcggtttaggtaagacatcagggcgtggtcaaaagggtcaaaaggcgcgtggtaaagtaaaatcgtggtttgaaggtggtcaaactccaatttacaagctatttcctaaaattggatttaccaacgttggcgccaaaccattaaaggaattaaacttgaaacgcattcaatggtttcatgataaaaataggctacatttgcaaccaggcgaggttttagacatgaataagatgagaaagcttggtctggtaactggtcccataaagtacggagttaaaattctagccagcggaaagttccactacaatctaccgattgctttggaggcttctagagcatccgctaaggctattgcggctattgaaaaagcaggaggtaagtttacagctcgttactacacaccgttgggtctaagggcacatctcaacccccagtggtttcttgagaagaggggaagagtaccactacaggctagacccacgaaaagaagggatattgatttctatagtaaagaagagaaaagaggttacctagtaatggaaaaagataaactcttacaagatatcaaagaagctcaaaataagggttctagacactttttaaaacagaatgtaaaaaagagctcattagaaatagagctagaagaactgtctccagagaaggattgggtgccagttgtgtctaattctaaagtcatgaacatcaaggctttggaccactaa

SEQ ID NO: 78204 - DNA, 588 bp, Saccharomyces pastorianus
atgtccgggtcgttaaaatctctagacaagaaaatagctaaaagaaggcaggtgtataagcccgtgctagacaatccgttcacaaacgaagcacatatgtggccgcgcgtgcatgatcagccattgatttggcagctgctgcaatcctctatcataaataagttgattcacattcaatcgaaggagaactacccttgggagctgtatacagatttcaatgaaattgtgcagtatttgagcggcgctcacggaaacagcgacccagtatgtctatttgtgtgcaataaggaccctgatgtaccgcttgtgctcttgcagcaaatcccgctattatgctatatggcgcccatgacggttaaactggtgcagttgcccaagagtgccatggataccttcaagtcggtttctaaatatggaatgctgctgctgcggtgcgacgatagggtcgacaagaaattcgtatcgcagatccagaagaacgttgatctgcttcagtttccctggttaaatgctatcaagtatcggcccacatctgtcaagctgttgaaaactacagtgccaattgtctcgaagaagaggcaaaagtag

SEQ ID NO: 78205 - DNA, 462 bp, Saccharomyces pastorianus
atggttgtcttgaatccaaataactggcattgggtggataaaaacaccttaccttggtctaaggactacttgaacggtaaattaacgagtttgtccactgtttcctctgatgggaagagcaaaattgagttaacccaggtgagtagcatcaccggtgactccaacgtatctcaaaggaagggcaagccgatttgctactttgacttacagttgtcgatgaacgtcaaagtgacaaatttggatactaataaggacgacgaggatgatgacggcatacttgcggacgggaaactagaaattccagagtttatgcatgacgagtctgatattccgattttgtcgcaagggtttgatgcttttgatggattggttaggtctgaatttgtccctaaagtagtggaaacgctactaaaataccaagatgacttgattaaagaacactcaaaggatatacaagtttga

SEQ ID NO: 78206 - DNA, 1317 bp, Saccharomyces pastorianus
atggtatcagctttgaatcccagaactacagagtttgaatttggtgggctgattggtgccttaggcatcagcatagggctgcctgttttcactatcatcttgaatcaaatgataaggcccgattattttattaagggatttttccagaatttcgatatagttgagctttggaacggtatcaagccattgcgctactatctgggcaatcgtgaattatggactgtctattgcctgtggtatggaatactggcagttttggacgtcattttaccgggcagagtcatgaagggtgttcagttaagggatggttcgaagctttcgtataagatcaatggaattgccatgtctacaactttggtcttagttttggctatcagatggaaattgactgatggacaattgcctgaattgcaatatctgtatgaaaatcacgttagtttatgcataatatctattttgttttcgttctttttggcgacgtactgctatgttgccagtttcataccattgatcttcaagaaaaatggtaatggcaaaagggaaaagatcttagcactaggtggaaattcaggaaacatcatttacgattggtttattggtagagaactgaaccctcgtctcggcccattagatatcaagatgttttcagagttgagacccggcatgttgttatggttactgatcaatctttcctgtctgcatcaccattacctgaagactggtaaaatcaacgatgcattggtcttggttaatttcttgcaaggattttacattttcgatggagtactaaacgaggaaggtgtattaaccatgatggatatcactacagatgggtttggtttcatgctagcgtttggtgacttaagtttagttccatttacctactcattacaagcgcgttacttgagtgtttcccctgtggaattgggatgggtgaaagttgtcggtatattagccataatgtttttgggtttccacatcttccactcggcaaataagcaaaaatctgagtttagacaaggtaaattagaaaatctaaaaagtattcagacaaagcgtggtacaaagttattatgtgacgggtggtgggctaaatcacagcatatcaattactttggcgattggctgatttcattaagttggtgtttggccacctggttccaaactcccttgacatattactactcgttgtacttcgccacgttgttattacaccgtcaacaacgtgatgagcacaagtgccgcctgaaatatggcgaaaattgggaagaatacgaaagaaaagttccttacaagatcattccatatgtttattaa

SEQ ID NO: 78207 - DNA, 189 bp, Saccharomyces pastorianus
atgacacttgcctattatggacagccagtaaagatgtgccatatattgccccctttacgctctctgccagtattagtggaaaaaaaaaaactgaaaaaaaaaaaatcgcagactactcataatcacgtgatatttcttttcactctcttcataaagttgctaaaaacacacaatcgaatgagcctctga

SEQ ID NO: 78208 - DNA, 1731 bp, Saccharomyces pastorianus
atgtcgaatgagagcacacgagttaccgttagtcgcggttgtacagcctccgacgagtgtgcgcaagtattggaacggacaaacgatgagctagacagagaatcatcggtatcagaaagtagaaatgatgaagagagccacgagaagttatcccgacgtcgattcccgacgctaggtataggcatatggctcgatttgaaggacagaataccgtattacaagtcagattgggtagacgcgtttaattacagagttattccctctattgttgaaacctactttaataacctgctacctgcaatagcctttgcgcaagatatgtttgataggactgataattcctatggtgtgaacgaagtacttctatccagtgcaatggctggaattgtttttggagttcttggtggacagcccttatgtatagtgggtgttactggccccatctctatttttaattatacggtctacgaaattataaagcctttgaataccagctattttggcttcatgttttggatttgtatgtggtctatgatttttcatttaattttagcatttacgaacgccgtttgcctcttgcaatacgtgactacgttcccatgtgacatatttggattatttattaatgtggtctacattcaaaaaggaatacaaattttaacaagacagttcagtgctaaatcaggggagaaatcagtacaagacggatttgctagtatcgtggtggcgctggttatgactgcgtttggtcttttctttaaattatttcattattaccccctcttttctcataggatcagaacattcatatctgattattcaactgcgctttcagtgctattctggtcatcatttacacattttggtggctacttgcatgatgtcaaatttaaaaaattgcctattacgaaagctttttttcctacttccaaagtcaataggcctcaaaatacttggctggcatatgaaccgattcctgttaaagacgtctttattgccctaccatttggtatatttttaacaatcttgttttactttgatcataacgtatcgtcgctaatggcacaaaggcatcagtataagctgaaaaaaccatcctcttttcattacgatttcgcactattgggacttaccacttgcatcagcggggttctaggaatcccggcgcccaatggtttgattcctcaagcaccattacacacagagacactgctagttagggattcaaaccaaaaggttatcagatgcgtagagcaaagatttacaaatacgtttcagggcctgatgattctagggacaatgacaagaccgttattggtatgcttaggagaaatccctcaggcagtactttccggattgtttttcattatgggcatcaatggcctaatgacaaatagtattatacaacggttggttttcctgttttcagaccctaacagaagagataatacttcacctttaatgaaagtatccaagaagtcaatgctgatatttctttcctttagcctgacggggtttgctggtgaatttgctatcacaaatactatagcggccatcggctttcccttagtattgcttttaagtgtgttagtttctttctcgtttgcttatattttcccgactgaagaattaaagattctcgatactaatgtggcacaaaaatttaccattaaaaatttgttattggaaaatattcgtgatgcaaagttctgtgataagcatgaagactaa

SEQ ID NO: 78209 - DNA, 2280 bp, Saccharomyces pastorianus
atggatgcttctgaggaagcaaaaagagtatcaatacaggttacatccctgtctacgcaattgatcgagagcgtggataaacagtcacacttagaagaacagcttaataaatccttaaaaacaatagccagccagaaggcagcaattgaaaactataatcagttgaaagaagattataacactttaaaaagagaattgtcagacagagatgacgaagtgaaaagattgcgtgaagatatagccaaagaaaatgagcttcgaactaaagctgaagaggaagcggataaactaaataaagaagttgaggatctgactgcttccctctttgatgaggcaaataatatggttgctgatgctagaaaggagaaatatgctatcgaaatcttaaataagagactcactgaacaactgcgtgaaaaggacacattactggacactttgaccctacagctcaaaaatctgaaaaaagtgatgcatagtttagataatgaaagcacagtcacgaataattcgaacagatattccacaatattgagtgattcagcaacttcttctagcacttctttgaataaagttccaacttcatattctcttgcttcccaagatatttatagcggaattgtgtactcgccaagcatttcatctattcgttatgatataagcctttacaatgaattcctaaaatttgtcgctgcactaccccgttgtgaaaacataaaggcaacttcaaccgaatcaaagttaatacgaagattggtaaatgatgaaatccagcctatacttaagattgataatgcttcaggcatcggctggttggttaaaaaaaccttactttccttgattatagatggtttggtggtagtggaacccctaagcggcgttaatgcaacctaccaaattggctacaactcaagtagccctgtaaagcaagctacttcgaatatgccaaaaatgttcaagtttcccttagattcacctccagttgcagtgcacgccgcatgttccttttgtggagaatctagagatgacattatcgaacacgcaaggatgtatatattgaaaacgttgcacaagactgacgacggtaaagaacaagttacgaatacgtatcccttgtgtcattggtgtttgctaaagttgcggcagacatgtgaaatctttgctttcctgagatcattgaaggtaggcgcatggcatttagaaaagctaacgacgcagaacattaccaaggaagatttggaaaaattctctgaagtaacgaagcataccaaaagagacggcagggtttcttctcaagacaaaaaaaccaaacgtttaagttttatggcaggacttggtatcaattcttcaacaaaaaataagccaaagatggagattttttcttctgaaacaaatgcaaagccaggacaacctaccactaatattcaaagagcatggctgcaattgtgtaaattgcgttgtatacttcattggactcatattggcatatgggcagtggatgattcaatttcttcaaaaattggaccgttagttgaggatgacagcgatgaggatcaaaacgatgctatatcggttcgcttgcaggacaaagctctttggaagcaggacgcaaaaagaccttttacttcatctagcgcagaagaaagtcaaaagagcgacgcttttgactttgaaagtggagatatggaaaatgaaattacgggtgaatcttcaagtgatgaatcctcttcagatgggtcatccacagataattcaaccgcagatagttcatcagaagatgaatcttctctagcagattctactacaagtagcgcggattctagttcaccagagagtatagacaatgatgaaggtgatgacacggtaacgaaagatgacaaaagtagcattaagtcggcaaataataatgaagaaaacagcgattgcggagataaaaaaggtcgttctataataaagaaaaaggctcctcaacgcaagatacaaaagaagaagttactccaagatttggatgatttagaagagcaatttagagaagaaagcgcaattgttcagactgaatttgaaaacgctgagtctaatgtaaaacaaaatatatcctcgaagggggcatcttctggagacgagaactctaagaaggataataatgaaaaaactttaaagacaaacttgacgataggcgacaaaacccaagaacaaataggggaaaatagtcctagtagcggattgcatgcgtcttcaagcaatgatgacaatttcgatgatgcccaggaacagcaataa

SEQ ID NO: 78210 - DNA, 1836 bp, Saccharomyces pastorianus
atgggcaggtttagtaacataataacgtccaataaatgggacgagaaacaaaacaacattggcgaacagagcatgcaggaattaccagaagaccagatagaacatgagatggaagcaatagatccaagtaataagacgacctcatactctattgatgagaaacagtacaacacaaaaaagaagcatgggtcattgcaaggtggcgcaattgctgatgtaaattcgataaataattcgttaacaagattgcaagttgtctctcatgaaacagatattaacgaggatgaagaagaagcccactatgaggataaacacgtgaagagagccttgaagcaaagacacattggtatgattgcactaggtggtacaatcggtactggtcttttcgttggtatctccactcccttgagtaacgctggccctgtggggtccctgattgcttacattttcatgggcaccattgtctacttcgttacccagtcacttggtgagatggctacgtttatccccgtgacatcatctatcactgtcttttcgaagaggttcttatcacctgcattcggtgtttctaacggctacatgtactggttcaattgggctattacttatgctgtggaggtttctgtcattggccaagttattgaatactggacagataaagttccattagcggcctggattgcgatattctgggtaattattactttgatgaattttttccctgtcaaagtttatggtgaatttgagttctgggtggcctctgttaaagttttagccattatgggttacttgatatatgctttgattattgtctgcggtggatcccaccagggccctatcggtttcaggtactggagaaatccaggagcctgggggccaggcatcatctccagtgataaaagtgaaggccgttttctcggatgggtctcctccttgattaatgctgcatttacgtaccaaggtactgaactggttgggatcaccgctggtgaagcggctaacccaagaaagaccgttccaagagctatcaataaagtcgtctttagaatcgtactattctatattatgtctttgttctttattggtctactggttccatacaacgattcccgtttatctgctagttctgctgttattgcatcatcacccttcgttatttccattcaaaacgctggtacttatgctcttccagatattttcaacgccgtggtgttgattactgttgtatctgccgctaattcgaatgtttacgttggttcccgtgttctttactctttagctaggactggtaacgcaccaaagcaatttggatacgtcaccagacagggtgttccatatctcggtgttgtttgcactgctgcattgggtcttttggcattcctggttgtcaataacaatgcaaacactgcatttaactggttgatcaacatttccactttggctgggttatgcgcctggttattcatctctttggcacatattaggttcatgcaagctttaaagcaccgtggtatttctcgtgatgatctgcccttcaaggccaaattgatgccttatggtgcctactacgcagccttttttgtcaccgtgatcatattcatccaagggttccaagcgttctgtccgttcaaagtttctgagtttttcacatcttacatctccttgattcttttagccgttatgttcatcggttgccagatatactacaaatgcagatttatttggaagctagaagatattgacatcgattccgacagaagagaaatcgaagcaattatctgggaagacgacgagcctaagaatttatgggagaaattctgggctgctgttgcataa

SEQ ID NO: 78211 - DNA, 945 bp, Saccharomyces pastorianus
atgtcttataatccgtacgcatatgcaacaagtgagcagaatggcgttaacgatcgcttttcccacactccacaacagcaacgaccaatgcaaattccgaggaacacgcccgtgaatggccaaggtaatgcgaatatgaatgcaaacgtaaatggcagtcgcggtggttttccattccaagatcctcgtggttcgatggcattccaactagggcagagcgcattttctaattttattggtcaggataactttaaccagtttcaagaaacggtcaataaagccactgcaaacgctgccggctctcaacaaatttcaacgtattttcaagtcagcacccgttatgtcatcaataaattgaaactcatcctagttccttttcttaacggaaccaagaactggcaacgaattatggactctggcaactttttgccaccaagggatgacgtgaactccccagacatgtacatgcctattatgggactagttacctatattctcatctggaatacgcagcaaggtctgaagggttcattcaaccccgaagacttgtactacaaactgtcttctactctggcgtttgtgtgtttagatttgttgattttgaagcttggcttgtatcttttgatcgattctaagattccaagcttcagtttggtcgaactgttgtgctatgtcggctacaaatttgttccattgattctcgcccagcttttgaccaacgtgaccatgccatttaacctgaatattttgataaaattttacttatttattgcctttggcgtattcctactaagatccgtcaagttcaatttactaagccgctccggtgctgaagacgatgatatacacgtttccatcagcaaatcgaccgtcaagaagtgcaattacttcctattcgtctatggcttcatttggcaaaatgttctaatgtggttaatgggttga

SEQ ID NO: 78212 - DNA, 1440 bp, Saccharomyces pastorianus
atgaatgtgaccactccggaagttgcttttagggaatatcaaaccacctgtctcgcatcgtatatttctgctgatccagacataactccttcaaatgtaatcttgcaaggttatagtggaacaggaaaaacctacactttgaagaagtattttaatgcgaatccaaatttgcatgcagtatggctggaacctgttgcgttggtttcttggaagcccttactgcaggcgatagcacgtactgtacaatataaattgaaaaccctatatccaaacattcccaccacagattacgatcctttacaggttgaagagccatttcttttggtaaagacgttgcacaatatttttgtccaatatgaatctttgcaagaaaagacttgcttgttcttgatattggatggtttcgatagtttacaagatttagacgccgcactgtttaacaaatatatcaaactaaatgaattacttccaaaagattctaaaattaatataaaattcatttacacgatgttagagacatcatttttgcaaagatattctacacattgcattccaactgttatgtttccgaggtataatgtggacgaagtttctactatattagtgatgtctagatgtggcgaactcatggaagattcttgtctacgtaagcgtatcattgaagagcagataacggactgtacagacgatcaatttcaaaatgtagctgcgaacttcattcacttaattgtgcaggcttttcattcttatactggaaacgacatattcgcattgaatgacttgatagacttcaaatggcccaagtatgtatctcgcattactaaggaaaacatatttgaaccactggctctttacaaaagtgccatcaaactatttttaagcacagatgataatttaagtgaaaatggacaaggtgaaagcgcgataaccacaaatcgtgatgaccttgagaacagtcaaacttacgacttatcaataatttcgaagtatctgctcatagcctcatatatttgttcatatctggaacctagatacgatgcgagtattttctctaggaaaacacgtatcatacaaggtagagctgcttatggacgaagaaagaagaaagaagttaaccctagatatttacagccttctttatttgctattgaaagacttttggctattttccaagctatattccctattcaaggtaaggcggagagtggttccctatctgcacttcgtgaggaatccttaatgaaagcgaatatcgaggtttttcaaaatttatccgaattgcatacattgaaattaatagctacaaccatgaacaagaatatcgactatttgagtcctaaagtcaggtggaaagtaaacgttccctgggaaattattaaagaaatatcagaatctgttcatttcaatatcagcgattacttcagcgatattcacgaatga

SEQ ID NO: 78213 - DNA, 222 bp, Saccharomyces pastorianus
atggcagagataaaacattatcaattcaatgtcgtcatgacctgctcgggatgttctggtgcagtcaataaagttttgacgaaattagaaccagacgtttccaaaatagatatatcccttgaaaagcaattagtagatgtatatactacacttccttacgattttattttagaaaagattaagaaaaccggaaaggaagttagatctggcaaacaattgtga

SEQ ID NO: 78214 - DNA, 2265 bp, Saccharomyces pastorianus
atggagtctctttttcctaacaaaggtgaaataatacgcgagttactgaaggatcctttaatattaaaaaatgacagcaaaaggtccaatggcagtgagttagaacttgattctagtgacctactacaacgcgaggcaattctagccaacgaactgaacatcctagataatttgaagacgtttttaaatctcataaaagaagttaaaactaatttgaacatactagaactagaaaactgctactattcgttgcagtcattgcgaaaaaagatgcgtaataatgctgcttatcttaagcaaagctttaatttccagcagtccatttctacctacgtcgacacactgcatttagaacttgtcagcacgttgtataaaattcttactaatggattttggaagattaccgagaatagcatccaatttacgcccacagtggaatggggtaaagacaaggttcatattgagtatgatacatttatggattttgtggcccaacagtattttcctaagggtagtttggacaatcaagcttggttcattttagatatgaccagtgccgactctcaagagcaggtaagagcaaaattgaatacaatcatgaaggagtatatgaacctttccaggattgtaagcatgatcaaaaattctatttttatatctggtaaagaaatctcatatgaaaacgaaaaaaacatacttgtcttttctaaatcctcttcgcatggccaacattgtgtgtctactgtattaacaagttttgaagcagtatgcgatttcatgttagacggattagcctttagagacagaaagaccttaagttatgagctaggtcccttgttcaatacggagtttaccaaatttgtgaaaaataatgcatcgataattttagaatcacttgattcaccgctaaaaaatctagtttctgtcataaataacaaactaactagactagttgccaaatcagaagttaccaattggacacattccggtaaagagattcaggatttgttaatgaacaaacgattatactacaatttattactagataaagttcttgaatcgcatattagtgagataagaagtatatttgaagatccaaaaaagagctggcaaaatttggaagtagttgagctcactactagctatactaatacgatgagcgaaaaaattggaaaaaatgattcagatgtacagaacgaaaaagaacaccataatgccgtatccaaagatgatgattggaattgggaagtagaggatgatgatgccgatgcatggggtgatgaaattgatgtaaatattgacgacgaggaagaaaaaacaaatcaagagaaggaaaaagaaccagaagaagaagaaaatgcctgggatgaagcctgggcaattgacgaaaatatagatgatgcttccctagaaaatggaaaggaacatttaaaagctcatgatgtaggatcacttgataaagaccacattgaagttacacagttaccaaaattgttcttggcaatttcacagaatttcaagagtagctttgcagatagccatattgatgagcaatactttgcgtacaaatacaaccttttgcagacatcgtatatggccatgtgcacagctaatttttctcacaattggtgccaattatatgtggatatgagatatctaatagaacgagatgaaaagctgtatagaataaaagaattaacaaggaacctgctggaaactaaactgaacatgaaatatcgtattgtctgtcaactaatcaggcatcaattgaccgaatttcgtgagaacgagagaaatccatcgtgggacgccaccattgagaaactgctaccttatatcttgaaggaaattgttcgtccactgcagaaaataagaggtgaagaaggttcccgttacttgttgtctttcttaaactttttatataacgattgcgtgacaaaggaaatattaaaatggcagattatctctgaggtcaattccgaaaatttgggtgagctcgtatctttattagtgaacaacaccgatatacaattattagcgaaggaaccaagttacaaaaagatgagagaaaaattcgccactatgggcaagtttctaccattacatttaaaggagattatggagatgttttacaatggggatttttatctttttgcgacagacgaactaatccaatggatagagttattgtttgccgacactcccctgcgaaggaatgccattgatgatatttacgaaattagaggcactgctctagatgattaa

SEQ ID NO: 78215 - DNA, 2595 bp, Saccharomyces pastorianus
atgataaattgcaaggtcatcgaaaacagaagaacaaggttttttcctttagtaaatgcaaaattagtaaaagtgatagcgtcttctttgattaacaagtttcaatctttgcctctggctatgtcaaagctattttctactgtcaattctgcaagacatagtgtaccactaggcggcatgagagattatgtgcacattaagaaactagagatgaatacagttcttgggcctgattcctggaatcaattaatgcctcagaaatgtctactaagcttagatatgggtacagattttagtaaatctgcggctacggatgatttgaaatattctctaaattatgcagttatttctcgtgatttgacgaatttcgtcagcaaaaaaaagaattggggttctgtttctaatttggctaaatctgtgtctcaatttgttatggacaaatattctggtgtcgagtgtctgaatttagaagtgcaggcggatacaacgcatattagaagtgaccacatatcttgtattattcaacaagaaagagggaatccagaatcacaggaatttgacgttgttaggatatctgagttaaaaatgttgactttgattggtgttttcacctttgagagacttaagaaacagtatgtaacgttggatataaagttgccttggccaaagaaagccgaattgccaccgccagtgcaaagcataattgataacgttgtcaagtttgtggaggaatcaaatttcaagactgtggaagctcttgtagaatctgtgtcagctgttattgcccataacgagtattttcaaaagtttccagattcgcctttggtggtgaaggttttgaaattaaacgcaatcacagccacagaaggtgttggtgtaagctgtattagagagcccagggagattgcgatggtaaatattccatatctttcccccatacatgaatcgtctgatattaagttccaattgtcttcatcacaaaacactcctattgagggtaaaaatacatggaaaagagcgtttttagcgtttggttcaaacattggggaccgtttcaaacacattcaaatggcgttgcaattattatcaagggaaaaaacggttaaattacggaatatttcgtctatttttgaaagtgaaccaatgtatttcaaagatcaaacccctttcatgaatgggtgtgttgaggtggagacattactgaccccaagcgaattattaaaattgtgcaaaaaaattgaatatgaagagttgcaaagagtcaagcattttgataatggtccgagaacaatagatctggatattgttatgtttttgaatagcgccggagaagatattatagtaaatgaaccggatttgaatataccgcatcctagaatgctggagaggactttcgttcttgagccgttatgtgaattaatatcccccgttcaccttcatcctgtgacagcggaacccattgtagaccatttaaaacagttatacgacaaacagcatgatgaagataccttatggaaattagttccattgccttatcgtagtggtgtagagcctagatttttgaaattcaagaccgctacaaaacttgacgaatttactggagaaacaaacagaattactgtttcacctacatatatcatggctatcttcaacgctacaccagattcattttccgatggaggtgagcattttgcggacattgaaagtcaattgaatgatatcattaaattgtgtaaagacgcattatatttgcatgagagcgtcatcatcgacgttggagggtgttctaccaggcctaactctattcaggcgtctgaggaagaagaaatacgcaggtctatcccattaattaaggccattagagaaagcactgagttaccgcaagataaagtcatactatccattgatacttatcgttccaatgtcgctaaagaagcgattaaagttggagtggatattattaatgatatttcgggaggtttatttgacagcaacatgtttgccgtaattgcagagaacccagaaatttgttatattttatcacacacacgtggtgatatttcaacgatgaataggctggcgcattacgaaaatttttcattgggtgattctattcagcaagaatttgttcataataccgacattcagcagctagacgacttgaaagacaaaacagtgttaatcaggaatgttggtcaagaaattggcgaaaggtatatcaaagcgattgataatggagtaaagcgctggcaaattctaatcgaccctggacttggttttgctaagacctggaagcaaaacttacaaattattagacatatccccattttaaagaactactcattcaccatgaactcaaacaattcgcaagtgtatgttaacctcagaaatatgcccgttttattgggtccatcgcgcaaaaaattcattggacatatcacaaaagatgtggatgcgaagcaaagagactttgctactggagcggtggtagcgtcgtgtattggtttcggcagcgacatggttagggtccatgacgttaaaaattgttcgaagagcattaaattagcagatgctatttataaaggtttggaataa

SEQ ID NO: 78216 - DNA, 1206 bp, Saccharomyces pastorianus
atggttgggcctggtctgggaattaatcgagtgaggagaaaaggtgtttattccacaaaaaagggaagtggtgataacttactgttaatgaaaagacaaggaaaacatgacatacatgatagagaaagtgacgacttatcaggccatgatgccttttccccctcaaaaaagcgcggcaaaatagacagtatcacagaagatgagattgaagtaaaaaagctttccactgtggccacatttgataaacttttgaggtcatttccaaattcagaagtacaagccgcaaagaatgcagcactcagaggaaaagaaaaagaagaagagaaggtcgtttctatcccactaatacagaatttgaaaaatgaagatatcgagtctatcaaatgcaggaacaacaatcttttagacggtaaaaaattactcttggaggcagaactatcggcagttgaagataaccaaatcttctcctcttcatttcccgaggataaaaagctatcgttacaaagttgtttgagttctaaagagcagataatcaagaaacttcaagtaagggaagaatacatgagcaagttcaaactaccacccatgttgttttcggatgagctactcactgaagtagaacccttcatgcccattgtaatggacatattggagggaaagatatcgtctgcatactattttgaagcaaaaaatgcattcaaaaactcacaaaaggcttacttgtccgtagatgagtttagaaagttgaatttaaacaaatttactgctggattttacggcctgaaaaggcaattgagggttggcgaagaaatcgctaagagatataaaagggcactcacgcacaatcagcccgcaaccttaaaatggtgggggataacagatttctgtaactacgttttggctccagaaacccttacgtctttttgtatttaccaattaaatctctcgaataaatcttgctcgtcgaagacaccgaataaacatccaaagcaacaattaaacgagaaggaatattactacgatcccgaattaaggatgctagcctatgacttactcgaggatacagttgagtacggtatcatagtagccgactctgatccaattgagcaatgggaagctgccatagaggaagaccgtctgcgggaactgaaactcgatgttcataactattccagcaggagatggcgactggatacgcacgattaa

SEQ ID NO: 78217 - DNA, 1269 bp, Saccharomyces pastorianus
atgtcgacaattggagctgttgatattcttaatcaaaagaccataacttctgaagtggctgcctcagtgacttcaaaatatctacaaagtacgttttctaaaggtaatacaagtcatatcgaagataaaaggttcattcatgtcagttcgcgttctcattcaagattcacctcgactcccataactccaaatgaaattctttccctaaaatttcacgtatcaggttcatcgatggcgtatagtagaatggatgggtcattgaccgtttggtttattaaagatgcaagttttgacaaatctgtagaagtttatattccagactgttgtggttccgataaattggctactgatttgtcctggaaccctacttctttaaatcaaatagctgtcgtgagcaattcatcagagatatccttactcttaatcaacgaaaaatcgctaacggcatccaaattaaggaccttgtcattgggaagcaagactaaggtcaacacatgtctttatgatccattaggaaactggttattagctgccaccaaatctgagaaaatctacttgtttgatgtgaaaaaggatcacagctctgtctgttctttgaacatcagcgatataagccaagaggataatgacgttgtgtattccttagcatggagcaatggtggaagtcatatatttattggctttaagagtggttatttggccattttaaaagcaaaacatggcatattggaggtttgtaccaaaattaaagcacatactggtcctataaccgggatcaaaatggacccatggggaagaagcttcattactgggagtatcgatgggaattgctacgtatggaatatgaagtcactatgttgtgaattaataattaacgatttgaactctgcggtaacaacactagacgtctgtcatttgggtaaaatactaggaatttgtacagaagatgaaatggtatatttctatgatcttaatagtggtaatttactccactctaaatctttagccaattacaaaaccgatcccgttttgaagttttatcctgataaatcatggtatatcatgtcaggcaagaatgatacactatcaaatcattttgttaaaaacgaaaaaaatctaataacttattggaaagacatgttcgataacacgatgattgaaaaacgtaggaaaaacaacggtggaggcaacaaccacaataaaaggacgagtaagaatactgataggatcggcaaggataggccgagtagattcaactcaaaaaaataa

SEQ ID NO: 78218 - DNA, 1728 bp, Saccharomyces pastorianus
atgcagcaggacgacgattttcaaaattttgtagctaccttggaatcattcaaagatttgaaatcaggtatttcaggttctcgtattaagaaactaaccacttacgcacttgatcacattgatattgaatcgaaaatcatatctttgataatagactactcaagactttgtcccgattctcataaattaggttctttatatatcatcgattcaataggtagagcttacttggatgaaacaagatcaaattcaaacagcagcagcaacaaacccggtacttgtgcccatgccataaacacgttgggcgaagtaattcaagaactgctatccgatgctattgcaaaaagtaatcaagaccacaaggaaaaaattcgtatgcttttagacatttgggacaggtccggcttgtttcaaaagagttacttgaacgccatcaggtcaaaatgctttgctatggacatatcgaataacaccgcgaacaccgcttcacaacaactatcactggatcccaagcagaggtcgaaacaaatcttgtcaaatctaaagaaaagtcctcctttaaacttgaacataagtcttccaactgatttgacttccacagatccagccaaacagcaagcagctcttttccaagtaatagcggctctgcagaaacattttaaaactttgccttcacatacatccgtgggtacagtcgcacctccccaagcccatacgattaccgaatatggtagcagacgtgaacgtgaacgtgaaagagaaagatataactcaagaaggaatagatcaagatctcctccggcaccattttctcagccatcgacaggcaggaaggaccgctatccatctgtggcccaggaccaatacagcataggcgcccccaatacgacatttggcacaaacaatcaccacttataccccgatgagcttaatgtttccaataatcctcattatagaccaaaaccagtaagttacgactctacattgccaccagatcatattaaagtctacagccgtactcttttcatcggtggggtaccactaaacatgaaggaatgggaccttgctaacgttttaaaaccttttgctgaagtacaaagcgtcattctgaataactccagaaaacacgcttttgtgaaagtttattcaagacatgaggccgaaaatgttttgcaaaacttcaataaagatggagccctgccattgagaactaggtggggagttggttttggtccaagagattgttgtgactatcaacacggttacagtattattcctatgcacaggctcacggacgctgataaaaaatggtcagtaagtgcgcaatggggtggcacttctggtcaacctctcgttaccggtattgttttcgaagaaccggatattatcgttggtgaaggtgtttcttccaaggcaatatctcaaaagatgcctactgattctggcagaaatgggccacgttctggtaaacctaacaaatctggtagcatatcgtcgatatctccagtaccctacggcaatgcaccattggcatctcctccaccacagcaatatgtgcaacctatgatgcagcaaccgtatggttatgcccccaaccaaccattaccttctcagggacctgccgcagcggctccccctgtacctcagcaacaatttgaccccactgctcaattgaattctttgatgaatatgcttaaccaacagcagcagcaacaacaacaaagctaa

SEQ ID NO: 78219 - DNA, 3939 bp, Saccharomyces pastorianus
atgagcgctatctataaattatctattcagggcatacggtcttttgactccaatgatagggaaactattgaatttggcaagcctctgactttaatagtcggcatgaatggttcaggtaaaacgactatcatcgaatgtttaaagtacgctaccacaggtgatctaccgcccaacagcaagggaggagtattcattcatgacccgaagataactggtgaaaaggacattagagctcaggtcaaactggcgtttacgagtgccaatggactcaatatgattgtcaccagaaatattcagttgctaatgaaaaagactactactacatttaagactttagaaggccagttggtcgctataaataatagtggtgaccgcagtactttgtccacccggtctctggaattagacgcacaagtacccctgtatctgggagttccaaaagcgatcttggaatacgtgatattctgtcaccaagaagacagcctgtggccactgagtgaaccatccaatcttaaaaagaagtttgatgaaattttccaagcgatgaaatttacaaaggctctagacaatttaaaatccataaagaaagacatgtccgtggatatcaagttattaaagcaatcagtagaacacttaaagttggataaagacagatcgaaagcaatgaagctcaatatccaccaattgcaaactaagatagatcagtataatgaagaagtgtctgaaattgaatctcaattgaatgaaatcactgagaaatccgataaactgtttaaatctaatcaagatttccaaaaaatactatccaaagtagagaacttgaaaaatacaaaactctcaattagtgatcaagtgaaaagattgtcaaactcaattgatattctcgatttatcgaagccagatttgcaaaacttattggcaaacttctctaaagtcttgatggataagaataatcagttgagagatttggaaaccgatatttcaagtttgaaagaccgtcagtcatccttgcagagcctttctaattccctcatcaggcggcagggtgagttagaagctggtaaggagacatacgaaaagaacagaaatcacctttcatcgctaaaagaagccttccaacataagttccaaggcctttcaaatattgaaaacagtgatatggctcaagtaaatcacgaaatgtcacagttcaaggctttcatctctcaggatttaactgacactatagatcaatttgcaaaggatattcaactaaaggaaacaaatttatccgacttgataaaatcaataaccgtcgattcacagaatttggaatataataaaaaggacagatctaaattaatccatgactctgaagagcttgctgagaaattgaaatcatttaaaagtttgtctactcaagatagcctcaatcatgaactggaaaacttaaaaacatacaaagaaaagctgcaatcttgggaaagtgagaatattataccaaaattgaaccagaaaatagaagagaaaaataatgagatgattatcttagagaatcaaattgagaaatttcaagatcgcataatgaaaacgaatcaacaagcggacttatacgccaaactaggactaataaagaagtccattaatactaaattagacgagttacaaaagattacggaaaaattacagaatgattctagaataaggcaagtatttcccctcacccaggaatttcaaagagctgatttagaaatggattttcagaaattattcatcaatatgcaaaagaatatagcgatcaacaacaaaaagatgcacgaattggatagaagatatacaaacgctttgtacaatttgaacaccattgaaaaggatttacaggataatcagaagtcgaaagaaaaagtgatacaactactaagcgaaaacttaccagaggattgtactattgatgaatataatgatgtcctggaagaaacggagctctcctataagactgcgctggaaaacttgaaaatgcatcaaactactttagaatttaatagaaaagcattagagatcgctgaacgtgacagctgctgttatttgtgttctagaaagtttgaaaatgaatcgtttaaaagtaagttgttacaagaactaaaaacaaaaacagacgcaaattttgaaaaaactttgaaagacactgtccaaaacgaaaaggaatatcttcatagtttaaggctactggagaaacatattattacactaaattctataaatgaaaagattgataattcacagaagtgccttgaaaaagctaaggaggaaacaaaaacttccaaatcaaaactagatgaattggaagtagattccacaaaattgaaagatgagaaagagttagctgagtctgaaattcgtcctttgattgagaagtttacttacttagaaaaggaacttaaggatcttgaaaacagttctaaaacgatatctgaggagctatcgagttataataccagtgaagatggtattcaaactgttgatgaattaagggaccaacaaaggaagatgaatgattctttacgtgaactgaggaaaaccatttcagatttgcaaatggaaaaagatgaaaaggtgagagaaaattcaagaatgattaacttgattaaagaaaaggaattaacagtttctgaaattgaatcatctttaacacagaaacaaaatattgatgattctataaggtcaaaaagggaaaacatcaacgatatcgattctagagtaaaggagttagaagcacgtattatttcattaaaaaacaaaaaggatgaagcgcaaagtgttctagacaaagtaaaaaatgaacgtgatattcaagtacgcaacaaacaaaaaaccgttgcagatattaatcggttaatagatagatttcagaccatttataacgaagtggttgattttgaagctaagggcttcgatgaattgcaaacaacaataaaagaactagaattgaacaaagctcaaatgctggaactaaaggagcagcttgatctcaagtcaaatgaagttaacgaagaaaagagaaaacttgctgactcaaataatgaggagaaaaacttgaaacagaacttagaactaattgaattgaaatcacaacttcagcacattgaatctgagataagtagattagacgttcaaaatgcagaagctgaaagggacaaatatcaagaggaatcactaagactaagaacaagatttgaaaagctgagctctgaaaacgcaggtaaattaggtgaaatgaaacaattacagaatcaaatagattcattgactcatcaactgcggactgattacaaagatatcgagaaaaattaccataaagaatgggttgaattacagacaagatcctttgttactgacgacatagatgtctattcaaaagcattagatagtgctattatgaaatatcatggattgaaaatgcaagatataaacaggataattgatgaattatggaagcgtacgtatagtggtactgatatagacaccatcaaaattagatcagatgaagttagtagtacagttaagggaaaatcatacaactatcgtgttgtaatgtacaagcaggatgttgaattggatatgagaggacgatgttccgcgggtcaaaaagttcttgcatcgattattatcaggctagctctatctgaaacatttggcgcaaattgtggcgtaattgcactagacgaacctaccaccaatttagatgaagaaaacatcgaaagtttagcaaaatctttacacaatataattaatatgagaagacatcaaaagaatttccagctaatcgtgatcactcatgatgagaaatttttgggtcatatgaatgcagcggcatttactgatcacttcttcaaagtcaagagagatgataggcaaaaatcacaaattgagtgggtcgatattaacagagtcacttattga

SEQ ID NO: 78220 - DNA, 327 bp, Saccharomyces pastorianus
atgtccattgagaatctgaaatcatttgatcctttcgccgacacaggagacgacgaaaccgccacttcaaactatattcatattcgtatccaacagagaaatggtagaaaaactttaactacggtgcaaggtgtcccagaggagtatgatttaaagagaattcttaaggtcctaaaaaaggactttgcatgtaatggtaacattgtcaaggatccagaaatgggggagattattcaattgcagggtgaccaaagagcaaaggtttgcgaatttatgatctcccaactgggattgcaaaagaagaacattaaaattcatgggttttaa

SEQ ID NO: 78221 - DNA, 1515 bp, Saccharomyces pastorianus
atgagtgaaggccccgtcaaattcgaaaaaaataccgtcatatctgtctttggtgcgtcaggtgatctggcaaagaagaagacttttcccgccttatttgggcttttcagagaaggttaccttgatccatctaccaagatcttcggttatgcccggtccaaattgtccatggaggacctgaagtcccgtgtcctaccccacttgaaaaaacctcacggtgaagccgatgactctaaggtcgaacagttcttcaagatggtcagctacatttcgggaaattacgacacagatgaaggcttcgacgaattaagaacgcagatcgagaaattcgagaaaagtgccaacgtcgatgtcccacaccgtctcttctatctggccttgccgccaagcgtttttttgacggtggccaagcagatcaagagtcgtgtgtacgcagagaatggcatcacccgtgtaatcgtagagaaacctttcggccacgacctggcctctgccagggagctgcaaaaaaacctggggcccctctttaaagaagaagagttgtacagaattgaccattacttgggtaaagagttggtcaagaatcttttagtcttgaggttcggtaaccagtttttgaatgcctcgtggaatagagacaacattcaaagcgttcagatttcgtttaaagagaggttcggcaccgaaggccgtggcggctatttcgactctataggcataatcagagacgtgatgcagaaccatctgttacaaatcatgactctcttgactatggaaagaccggtgtcttttgacccggaatctattcgtgacgaaaaggttaaggttctaaaggccgtggcccccatcgacacggacgacgtcctcttgggccagtacggtaaatctgaggacgggtctaagcccgcctacgtggatgatgacactgtagacaaggactctaaatgtgtcacttttgcagcaatgactttcaacatcgaaaacgagcgttgggagggcgtccccatcatgatgcgtgccggtaaggctttgaatgagtccaaggtggagatcagactgcagtacaaagcggtcgcatcgggtgtcttcaaagacattccaaataacgaactggtcatcagagtgcagcccgatgccgctgtgtacctaaagtttaatgctaagacccctggtctgtcaaatgctacccaagtcacagatctgaatctaacttacgcaagcaggtaccaagacttttggattccagaggcttacgaggtgttgataagagacgccctactgggtgaccattccaactttgtcagagatgacgaattggatatcagttggggcatattcaccccattactgaagcacatagagcgtccggacggtccaacaccggaaatttacccctacggatcaagaggtccaaagggattgaaggaatatatgcaaaaacacaagtatgttatgcccgaaaagcacccttacgcttggcccgtgactaagccagaagatacgaaggataattag

SEQ ID NO: 78222 - DNA, 1476 bp, Saccharomyces pastorianus
atgagtgctctactgtccgagtctgacctaaacgattttatcagtcccgcccttgcgtgcgtcaaacctacccaggtgagcgggggcaagaaggataacgttaacatgaacggagaatacgaggtgagcacggaaccagaccaactggagaaggtctctattacgctatcagactgcctcgcgtgttctggttgtataacgtctagtgaagaaatcttgttgagtagccaaagtcactcggttttcctgaaaaactgggggaagctttcgcagcagcaagacaaattcctcgttgtgagtgtctcgccacaatgcagactatctcttgcgcagtactacggcttaacattggaggcggccgatttgtgtttgatgaattttttccaaaagcatttccagtgcaagtatatggttggaacggagatgggcagaatcatatcgattagcaaaaccgtagagaagatcattgcgcataagaaacaaaaagaaaataccggtgcggaccgcaagcctctattatctgctgtgtgtccgggatttcttatatacacggaaaagaccaaaccgcagttggcgcctatgctgctcaatgtcaagtcgcctcagcaaattacgggctcgttgatcagagctacgttcgagagtctcgctatcgcgcgtgagtccttttaccatctgtcgctgatgccatgttttgacaagaaactagaagcgtcaaggccagaatcgcttgacgatgggattgactgtgtcattacgccacgtgaaatagtgacaatgttacaagagttgaatttagacttcaagtcgtttcttactgaggacacaagtttatatgggcggctatcaccgccgggatgggacccgcgagtccactgggcgtcgaatctgggaggcacttgtggtggctatgcctaccagtacgtaacggctgtccaacgactacacccaggaagtcagatgatagttctggagggtagaaacagcgacattgtcgagtaccgattgctgcacgatgatcgcataatagccgccgccagcgagctttccgggtttagaaacatccaaaatctggtgcgtaaactgacctcgggctccgggtcagagcgcaagaggaacatcaccgctctgcggaagagacgaacaggtccaaaggcgaactcacgcgagatggcggccgccacggccgccacggccgatccctaccactcggactacatcgaggtaaacgcgtgtccgggtgcatgcatgaacggtggtggcctactcaatggcgagcaaaacagtctcaagcggaagcagttggttcagacactgaataagcgtcacggagaggagctagcaatggtagatcctctaaccctgggacccaagctagaagaggcggcagcccgcccgctttcgctagagtacgtcttcgcgcccgtcaagcaggccgtcgaaaaggatctcgtctctgttgggagcacctggtaa

SEQ ID NO: 78223 - DNA, 2445 bp, Saccharomyces pastorianus
atgaaagtgaggaaatatattactttatgcttttggtgggccttttcaacatccgctcttgtatcatcacaacaaattccattgaaggaccatacgtcacgacagtattttgctgtagaaagcaatgaaacattatcccgcttggaggaaatgcatccaaattggaaatatgaacatgatgttcgagggctaccaaaccattatgttttttcaaaagagttgctaaaattgggcaaaagatcatcattagaagagttacagggggataacaacgaccacatattatctgtccatgatttattcccgcgtaacgacctatttaagagactaccggtgcctgctccaccaatggactcaagcttgttaccggtaaaagaagctgaggataaactcagcataaatgatccgctttttgagaggcagtggcacttggtcaatccaagttttcctggcagtgatataaatgttcttgatctgtggtacaataatattacaggcgcaggggtcgtggctgccattgttgatgatggccttgactacgaaaatgaagacttgaaggataatttttgcgctgaaggttcttgggatttcaacgacaataccaatttaccaaaaccaagattatctgatgactaccatggtacgagatgtgcaggtgaaatagctgccaaaaaaggtaacaatttttgcggtgtcggggtaggttacaacgctaaaatctcaggcataagaatcttatccggtgatatcactacggaagatgaagctgcgtccttgatttatggtctagacgtaaacgatatatattcatgctcatggggtcccgctgatgacggaagacatttacaaggccctagtgacctggtgaaaaaggctttagtaaaaggtgttactgagggaagagattccaaaggagcgatttacgtttttgccagtggaaatggtggaactcgtggtgataattgcaattacgacggctatactaattccatatattctattactattggggctattgatcacaaagatctacatcctccttattccgaaggttgttccgccgtcatggcagtcacgtattcttcaggttcaggcgaatatattcattcgagtgatatcaacggcagatgcagtaatagccacggtggaacgtctgcggctgctccattagctgccggtgtttacactttgttactagaagccaacccaaacctaacttggagagacgtacagtatttatcaatcttgtctgcggtagggttagaaaagaacgctgacggagattggagagatagcgccatggggaagaaatactctcatcgctatggctttggtaaaatcgatgcccataagttaattgaaatgtccaagacctgggagaatgttaacgcacaaacctggttttacctgccaacattgtatgtttcccagtccacaaactccacggaagagacattagaatccgtcataaccatatcagaaaaaagtcttcaagatgctaacttcaagagaattgagcacgtcacggtaactgtagatattgatacagaaattaggggaactacgactgtcgatttaatatcaccagcggggataatttcaaaccttggcgttgtaagaccaagagatgtttcatcagagggattcaaagactggacattcatgtctgtagcacattggggtgagaacggcgtaggtgattggaaaatcaaggttaagacaacagaaaatggacacaggattgacttccacagttggaggctgaagctctttggggaatccattgattcatctaaaacagaaactttcgtctttggaaacgataaagaggaggttgaaccagctgctacagaaagtaccgtatcacaatattctgccagttcaacttctatttccatcagcgctacttctacatcttctatctcaattggtgtggaaacgtcggccattccccaaacgactactgcgagtaccgatcctgattctgatccaaacactcctaaaaaactttcctctcctaggcaagccatgcattattttttaacaatatttttgattggcgccacatttttggtgttatacttcatgttttttatgaaatcaaggagaaggatcagaaggtcaagagcggaaacgtatgaattcgatatcattgatacagactctgagtacgattctactttggacaatggaacttccggaattactgaacccgaagaggttgaggacttcgattttgatttgtccgatgaagaccatcttgcaagtttgtcttcatcagaaaacggtgatgctgaacatacaattgatagtgtactaacaaacgaaaatccatttagtgaccctataaagcaaaagttcccaaatgacgccaacgcagaatctgcttccaataaattacaagaattacagcctgatgttcctccatcttccggacgatcgtga

SEQ ID NO: 78224 - DNA, 1380 bp, Saccharomyces pastorianus
atgacagcagccaataagaacattgtcttcggattttccagatccattagcgcaattctactaatatgctttttctttgaaaaagtctgcggtgatatggagcatgatatgggcatggatgatacttcgggatacacgagaccagaaattgtgcaggctgggtcgaaatctttccactggctctgcactttgggattcttgttgcttttaccatccgtggtgacgtgcctttcgttcgccggcaggatatattcagctaccctcttacaatgcacttgtgccgtttacgctttcttagaagctgccgtattaagatttcaagacaatgatggggtagaaaatagaacttcaaggggaaccgcatggtttttggtgggacttacttggataaccttattctttggtggattagctggaggaactggtttcttagtgaaaagcaagaggttgcaaacgttcatatcaaatgcaggtgagaaaaggttgtcatatatccatcgtggtttatcctttctaactgttctaacaggttgggttaaagtctgtttggcacctgttgcgctctttgggttttgtagagaggcacacacagggcaatgcatcgctcatggtatcatgggatccgcgtttgtgttgtacgggttcatttatgtactggttttggttataccatggattcgcagtgctcaaacctcatattcacaggattacgtcgacagttgggttatgtgcatatggggcgttgtaaatacttttactgaacacaggtggggacgtgaaggatggagtgttcacgattatcaacacacgtttatgggaattatctggtggactggtggaatactcgggattttcctttccagaaatggcagaagaacatttgtaccaagtttgattattattttcaccggatgggccatgtctgagcacgcccagcacttgataattagcacaaaagtccataatatgtttgggctagttttaatgtgtggaggcgctctaagaattatcgaaatatcttttttactacgtgataaaagaacgctggacaaaatacattcattccaataccttgctcccttttgtttagtatgttcaggtctcctatttatgggcgcaaacgaagaacaactcattttagtgttgcgattgggaggcgaccatagtgcgtacgttctaattatcgtatcaggcgcatttttggtctacttctggatgattgcatgtttggaattctacctatatctacttgaaaagggaaaacaaggattccttccgaaatcatacgaacttgaagaggaaaacaataacgtgagctttgagctagataacatatcgaacgaagatgtggatgaagataccactccctttaacgtttga

SEQ ID NO: 78225 - DNA, 2925 bp, Saccharomyces pastorianus
atgatgattggagagcatttaatgagctggtctaagaccggtattattgcatacagcgactcacagtcctcaaatgccaatatttgcctcacatttttagaatccataaacggaataaactggcgatttcatacgccgcaaaaatatgtattacacccgcaattacacgaagttcaataccaagaaagtagtagtactccaagcactcactcgacaacaacttctgtcaatggatcaactacagccggggttggaagcactccaaacttcggaggcaacagcaacaagtcccctccacagttcttttataatatatcttccattcattggaacaactggtttagtttaccaggggacatgttagctgtatgtgacgaattaggtaacatgaccatgttaattactggacaacgtcccgatcgggccaccacatacgaaaagttaacgatggtatttcaagataatgtttacaaaatttataaccacgttatgcctttaaagcctgtagacaagctaaagcctatgaacattgaaaggaaacaaacaaggaaagaatacaatacatccatcttggaatttcgctggctcacctcttcaaaatccgtaatcgtttctcaattctgcgcatttgatagtagttctaatacatatagaagcagagcacagcaagtgcctccatatggtgtgtaccatccacccttcataaaatatgcgtgcttggcaataaggaaaaacggtcaaatagatttttggtaccaattttcaaactcaaaggatcataaaaaaataacgttacagctgctggatacttcaaatcaaagattcaaggatcttcaatggcttgaatttgctagaattacacctatgaatgatgatcagtgtatgttgataaccacatattcaaaattatctaaaaatatctctttttacaaactacacgttaattggaaccttaatgcgaccaaaccaaacgtcctaaatgacccatcgttgaaaatacaatttatattaagcactactttagatccaacggatgatgaagggcatgtgttgaagttagaaaacctgcatgttgtgtctaaatcatcaattgagaaagatccctccccagaaattttagttttgtataatgtttgcgatacatcaaaatcattggtgaaaagatatagactagctccaacacaactttcagctgagtatttggtgatattgaaaccagatttaaatatcgatcgaaataattctacgaatcaaatattccaatcacgccgttacaaccttcgtcgccacagtgatatcgttctcgacaaaaaagtcaccttgataacttctgagatgttcgatggatttgtttcattttactttgaagatggtaccatcgaatcctacaatcaaaatgattggaagttggagactgaacgacttataagtcagagccaattaggaaaattcaaaaatattattgcatccccactaagcgcaggatttgattatgggaagctccctttacctccatcggttgagtggatgaaggtttcgccatctatgtgtggggttatcgttaaacagtataataaaaaatggccacagttttatgctgctgttcaaaaaaactacgcagatcctgagaaggattctataaatgctacagctttggcatttggatacgtgaaaagtttacataagcaaatatctgccgaagacttgaccatcgctgcgaagacgcacatactcagaatttcattcttggatagaaaaagggccaaagaatttattacgactttgttgaaaagcctatactcgtttttcaacatttctcctgatgcgcctaaagagattatggataaaataataacaagtaggccacttcaaaagattatgctattgcagctggaacttggcagttgtttttcacaagaaaatattgaagaaatggcgagagttatactctacttgaaaaatgttttgtttgcgttcaatggtgtggcgaggaattttcattttgcgattgaacaaataagtaataattctaaccaacaacaaaacccgaagttgttccagactatattttcaaaacaggatctcattcattcattgattcctgttgctaaatggtttgtcaaatttatcacttatttgacccaagaaattttaattttaataaacgatcccacaaacaaggaatacacactagttcacggaatatttggagccaaaatgtccagaactttgatattgtctattcttaacgaaatcaagaaagtcacccaaatagtggcaaaatttccagaaacatcatacccaattttaaacgagtcatcaacttttttgaaactagtcttatctgaatcaccagtggatttcgaaaaatttgaaacgtttttagttgatgtaaacaacaaatttatcgcgctatgcgaacaacagccatcacaggaacgtgagttttcgttgttggtgaaagctgaaatccccccagaatatgccaaagtgggagatttcctcctgcagtatgctaataatgcagtgatttcccatgcgaatgcggctgcggtatattttgcagatacaagtggcttgaaaatatctaattcagagtttttcaatcccgaaatatttcatttattgcaaccattagaagagggattaattattgatacagataaactacccataaaaaatagaacctccaaatcttttagcaaattactgtacgacgatgtaacctgtgacaaactgagtgtatcagaaatatccgatgggaaacttaagagatgcagtaggtgcggttccgtcacaagagcaggaaatataatatcgagtgataagactattgtacccactagcatccaaaccaaaagatggccaaccatgtatacaagactgtgcatatgttcaggtatgctttttgagatggacggctaa

SEQ ID NO: 78226 - DNA, 1281 bp, Saccharomyces pastorianus
atgacaggagaaaaaatacttcattcgcagttgttaaccaacagcgacatgtctagcgggaatgtccaccatacgaaaccgatgatgtacaacgtaaccctgccttcctacaacagcagtagtataggtccagtcgataatttgaaaataaacgagagacctggctctcatgatcattccatgagaagtgaaatgtcatccaaaaactccggaagcgattttatgccacaatctatttcacgttccgaaggtagtgtctaccaggtcaagatagatcgtggtgactccccgaatacagaaggattcgactttaaagttaatgcaagagatctgctgttacttcgaatgtcctgggatatcctcctcagggagtatttaacacctaaagaattaaaagtttttcaagcacttctgtattccaataaacatattacttcaacagaaagaccctatttgaatactgctcctgacggtatgatttccaaaactattgaccctactgccaggccacgtaaaacaaaacaaagggacaatgataacaaggttgatactgcactattttgttcacagttttatgacaatttgattgcaatggatcccttgttagaagaatattttccatcattaaaacatcaagcagtttcgttctgtaaggtccttgattctgctattgacaaccttgaaaacgttcatgtcctagatgattatattgtgaaattaggaaaacgccattccagaattctcggcatcaaaaccgttggtttcgaagtaatgggaaaagcatttatgactacattgcaggacaggtttggatcttttctcacactggaactcaaaaatctatggggacaactttactcatatttggcaaattgtatgattactgcagggaaggacccaatggaaaagattcaaccagatttttcgtataatggtgactctgtggttttaaatttttccattcccaaacttgcgatgcatgatataagtacagttaacaagctacaaatggtgaaaactaaaaacgctactatacctcataatataacacaagtaccgacaaataaaattcctacagaaatactcttagacaattcttctactccaataaaaagcgaccgtgaatcgacgcctccaatctcaccaaagggctctggaagtacaaaaccaagcatcggtagcagtaccgtcgtggaaagtaataccaagaaaaataattatgatgaaaaaatccatttattgcaaaaaactgctcagcagaagaactgctcgattatgtaa

SEQ ID NO: 78227 - DNA, 2679 bp, Saccharomyces pastorianus
atgtcggatagtatttcagattcaaagtcctcagaacttttaaattctactttttattcgtcgacgtcgataaatacacttgatcatgctagaacctttcgaaattctctgatattgaaggagatatcagatcaaagtctaaattcatcaataaagccatgcgaatccgtccttgatagggatgttgaaagctcagttctgcagcggtcgtttggagaaagtaatgcccgagactcagaagtacaaacggtaaatatgacaacttccccctcattaagtgcattggctgctattctgaacgaaagatccaaatatgctgaccaaaaaactagaaaggcacaaaatattgagtcttccataatagaagaagaagaagaggccgaagagcaaaacaactcgatcaactatcacgaggatataacgggattcagactgtctgtacgagaggaagcaaatgaaaacttggcgatgacctctccaaaccttattgacattgacggatccaatagtattcaagttgcccctttaagtttaccgtctttcgaagaacctgactttttatccactcctagagtaaaacctgattctcagggacctcggagcaaagttagtacacaacgtactattctcgaacgagacaacaatttaccagttaagcgggaggaaaatactatcattaattcagaaactgaaagcacaacacatagcgtaccatttttaaaagaggatccgaaaccctcgcctccttcgagtaaattatacaacccaaaagttcgtttaaacaaagcagaagcgcgaaagtatactgattcttctgcccaaaggactacttcagcaggctcggtacttgaagacacttctatgcataaaaagaaaaagagtatattttcatttctgaagaagaaagaaccgaaaccagttattggtaataatagtgtaacgaatgaaaaaaataagatgtcttcatcgagcactttctcaatgaatattcaaacctctttaaaaacgcctgaaaaactaaagaagaagtctcacagtagcagtagcattttcaattccttcctaaagggaaaaattgaaacatcagactcacctcgaaaggaaccaataaggcaaaaaaaaagaaccccaaaatccaaagacaaaaagcaagatactgaacaaataattgacgccgcatcagtgttatccactgaatcacctcaactacgaaaaaaccacgacaatactcccgtgaaaatagatcacgtaacgagatcaattgatcagagaaaacctactcctttaaacatggatctcatattgggaggtgataaacagataaataccccgctacaagaacacgtaagagaagatgatgatgccaaaaatgatcttcaattaccaaccaaggataattttttatcactggactacgaagcaccctcaccagcattttccaaacacgatacaggtgaggttcttttcccaaaatttttggataatcatgaagtcgactcgatcgtttctttagaaagaacaagatctacaaagtctaacaagagaagttcaatgaactcgcaaagaaggtcgttgacagatacgctatcgatcaaagcgcaaagtgagggaatgttcatcactgaggcatcttcagttatattatctactccagacttaacgaagtctcctgctagcagcattttaaagaatggaaggttcgaatactcagataatttctccagggaacactcttacgaaggtaccacaaatgaggactttttagatatcaaggacgatagtggtccactaaaaaaagatgacatatttttagagtctattgaacaaaaatttgaccagctagtgatggcttctgatgaagaaaaaactgaagttgaaagggatgtaccaaaaccaagagaagaacctctgaagaaggattctgaaaggcaaagtgtttatgcagatgatgataacgagttaatttctgatataatggagtttgcaagttttattaacttcggtgatgatgatctcaatctagacctagacttgggagatacaacggcctcatatgcaacagaaacccctgaacctgttggaaatgatgaagtaaatcgctctggtacttttgatacacgaaataacaaagaggatagttacaaagaaaaagaaactcaatcttattccgctgctggagctactacatacggagatgagcgtcaaggtcaattacatacatttgaacaagacggaagtgaaataaatgacaacgaatttgagaatgaagatttcaacaaacacatagaacagcccatagaagttactccaagaaataatgcatatttaccagaattcgaacccaatagacctgtttcaatgtcctttaaaggactaaaagccccaagaatgaatacttcttttattgactccatgacgcctgattctcccgtaaaatcagacttaacaagtctaggtgaggtgtatgtaaacagtaataatgaccagggtgtccggttttcgtcccagataatactttacgacacttatggagaattcgaatatgatagacatccagaaatttccacttgtaaccagcttactccacaactggctcaaatgatcaaattggaattaaatgagttaaagagcgcaatggaagtacacgatgattcgcgatgttacacacatttttattag

SEQ ID NO: 78228 - DNA, 879 bp, Saccharomyces pastorianus
atggcatgcaattttcagtttccagaaatagcttatccaggtaaactaatatgcccacagtacggtacggaaaataaagatggcgaagatataattttcaattatgtgcccggtcccggaactaaactaattcaatatgaacacaacggacgaactttagaagctataactgctacactagttgggacagtgaggtgcgaggaagaaaaaaaaactgatcaggaagaagagcgtgaaggcactgatcaatctacagaagaagaaaaatcagtagatgcatcacctaatgatatcacaagaagaactgtaaaaaatattctggtttcagtgcttcctgggacagaaaagggtcgtaaaaccaataaatatgctaataatgattttgccaataacctaccgaaggaaggtgatattgtgctgaccagggtgacaaggctttcgttgcaacgagccagtgtcgaaattttagctgtggaagataaaccatctccaattgatagtggcatcggcagtaatggatcgggaatagtcgctgctggcggcggttctggagcagctacgttctctgtttctcaagcatcatcagatttaggtgagacattcagaggtataatcaggtctcaggatgtacggtctacagacagagatcgtgtgaaagtgatagaatgtttcaagccgggagatattgttagggcgcaagttttatcattaggtgacggaaccaactactatttgaccactgcaaggaatgaccttggggtcgtgttcgccagagctgctaatggtgctggtggattgatgtatgctacagactggcaaatgatgacttcaccggttacaggcgctacagaaaagcgcaaatgtgccaaacctttttga

SEQ ID NO: 78229 - DNA, 1056 bp, Saccharomyces pastorianus
atgttcaagagatttagcaaaaagaaggaggctccagaaggcccaaaaaatttgattaatattgataagcctatcaaagaacttcctgcttcgatagctattccaaaagaaaaaccacttacaggtgagcaacaaaaaatgtatgacgaagtgctaaaacatttcagtaaccctgacttgaaggtttatacaagtgaaaaaaataagtcggaggatgatcttaaacccttagaggaagaagaaaaggcatggttgacaagagaatgttttttacgttacctaagggctactaaatgggtgctaaaagactgtatcgatagaatcaccatgactctagcgtggagaagagaattcggtattagtcatttaggtgaagagcatggtgataaaataacagctgacttggtggccgtcgagaacgaatcaggtaagcaggtgattttgggttacgaaaacgatgctagacctatcttatatttgaaaccgggcagacaaaatacaaagacttctcacagacaggtacagcacttggtcttcatgttggaaagagttatcgattttatgccagctggtcaagactctctagctttgctaatagactttaaagattaccctgatgttcctaaagtacctggcaatagtaaaatcccacctattggtgtagggaaagaagtgctgcatattctacaaactcattatccagaaagactaggaaaagcacttttgacgaatattccttggttagcatggactttcttgaagttaattcacccttttattgacccactgacccgtgaaaagctagtttttgatgaaccatttgttaaatatgtccctaagaacgaactagattcgttgtatggtggtgatctgaaattcaagtacaatcatgatgtttattggccagctctggtggaaaccgcgcgtgaaaaaagagatcattattttaagaggtttcaaagcttcggtggtattgtaggtttaagtgaggttgatttaagaggtactcatgaaaaacttctttacccagtaaaatcggaaagcagtaccgtgtaa

SEQ ID NO: 78230 - DNA, 1140 bp, Saccharomyces pastorianus
atgaaaagtttacaaacactatgtgaaatctcattgatgagaaatcattcaaacatacaatctgtgagtaatgtcccctatcacttattaaagaggatactgcagaaagtaaaaataccacaactattaaaacttgagaaaagcaacgtactattgatatttgacgatgatgaactatggttagaatttttaaggcaagatttcccgactaatgtacacgaacaatttgtctctaagagagacattatttgcaaatattactttgatttcgttaaggaaaacgatatagaactgtaccattcgaatcaggatttattgaagtcttgcgtgcgtcaatcagtcgtcaaagacatccgaaacaacaagtaccgaataccatacagaatgttatactcaaagtaccaacaagaagtggaaaagaaacaagaggaaagcgcagagagattaaggctggaaatgcagaagttgcagcaagaaagagaaaaaaagcaaaccatagtggttgaccacactgtttacttcaaaaagaggaacaccaagaagactacaaggttgcacaacgaaccccattcgcaattatacatgaaatcgttgaaagatcacgagtccagactaaagcatttcaaagacggcggattcaacattgcaaaaaggcatgcgcaacgtgtggcctttggtggccaagcgggcggacaatcgtcttcccccaagaaaggcccattgtccatcaaaccggagcctgttaaggtaaatcgtcaaatggataatgtcacagcagagaagaaagatgttacgcagcccatcacgccggtgaagaagagaagatccgaatcaccgtcaatctttctcaatcgtaaaaaacctgcgctattcaggcctactccgaagacaaacgctgcaggttctcgaccccatacaacagcgatcaccaacgatcaccgtactacttctcatccttatccccacaaagatgttgtaacttcaatatcaagtgtcaccgcaaatcccgtaacaaagggccacaagaagaagaaatccggaattttcgtacgaaatgccggatctgacggagatagttttccgcacgtgaccgcaaccggccctactacccgtccgtatatctatgagccacggaaatag

SEQ ID NO: 78231 - DNA, 777 bp, Saccharomyces pastorianus
atggtttggtgtcactattttcttttggtcttgactttctttcttttcactacgtttttcactgccgcatgccctgctatcttcacgtggttgaatagcttatttcgactatcaaatgattctccgcatgtagtgcacacctcgatcgcggaggttggagacatagaggacggtagagtcgacaaggacggagtgctttttgtggatttagaattctttttaggttgtttgcgctttttctttttcgctttagtagaccaatcttcatcgtcatccgtttgtaagcccttgtctcctagtgatgctaaaagatcatccaactcattactccgtttgtctttagtatcatcgaacgattcagattcctctgtttctgtgtcaacctttgctttttttttcttttttcttttctttttattcttcgtattcacatgtacattttcatccgaactgacgtcttctacctctatatccatttctatgttgagattgtcatcttcactttcgtcttcagaagacgattctgccagttttctttcaatttcagcgagttcagcttgcaatgcttgcagatcaatatcttctttttctttaacactttcatctgctgaatcaaatttctcgagatcggagagattatccaacccaagcgttatgttttcctcttccatttctttccgtatctcttccatatttttcttatgcagtttagtgtttatgtggtttttcaattgcttttccgacttaaatgtcttgttgcagataaaacactcgtaa

SEQ ID NO: 78232 - DNA, 411 bp, Saccharomyces pastorianus
atgctctttcctgggggtcagacagtacttcataagcggctcgaatcacagcaaatttttgtgtggcttcttcaacattatctgggtttttatctgggtgatattgtagggcctttttacggtaagctttttttaactcaagatcagaagcatgcgtttcgacccctaaaagctcatagtagcaggtcttcatccgttatttttgaagtagtaggatatcactatactgatattaactcttggctggtcagacttttactatgtaaaaagagctactttgcgatgacttcaaatttttttcacgtatattttttttctattcttaaaacaagaaaaagtgtaaacataaaatgttggccgcttaagccctccaattttacaacaaatgaatattttatacatacttcctag

SEQ ID NO: 78233 - DNA, 1746 bp, Saccharomyces pastorianus
atgactgatttcgatttaatgaattttccatttcatgagcgtttggattctcctgtatcagagaatggggaaattaaagacggagagccaatcccacaaaactggctaaatgaaaatcatgtcggaaaatccatcttacctttattcgttaaccctgaagatgtcatcaattgcaacttttccaatgctagagactcatatgaagagaacaaatcaccatctatggatcaaatgaattatgctagaaatactagttatcaggaatctccaggattacaagaacgaccaaaaaacgaaaaagataagtctcccataggtactaatgttcataaaaaggatgtacccaatttcatacactctactcctagagaaaactcttcgaagcattttacgagggcaaatgaacaggcttctgctcaaccaactgatgaacatacatcgccagatatctcgatagaagactgtaacggtgccaaaatttttctacaaaactccttatcgaaagaggattttcgaatgttagaaaatgtgatactggggtatcaaaaaaaagttattgaattgggtagagataatctaagacaagaggaaagagcaaactctttacaaaaggagctcgaagcagctacgaagtcaaacgacaaaaccttagataacgaaaaaaaaattgaagaacagacagtattgattgaaaacctaacaaaggacctttcgctgaataaagaaatgttggaaaaagccaatgatactattcagacaaaacacactgcattactaagtctcactgactccttaagaaaggccgagctgtttgaaataccgattggtatattgtttttcgatttgtatgactcggaggaaaattcttcaaaattagatcacatattacaagaaaaatatcctaatattaaagggtttttatgtgcatcacagcaagaagagctgagccgcatttctcagcgatttaaaaatgcaaaagcagaagctgaggatctccgaaatgagttagagaataaaaaaattgaaatccagaccatgagagaaaaaaataatactttaattggtacaaataaaaccctttccaaacagaacaaaatactatgtgataaatttgacaagttgacaatcgatgagaaggaaattttgaaaggatgtaatgaggaaataaaaattaagctggaaaggttgaatgaaagactaggatcatgggaaaaaagcaaagaaaaatacgaaacatcattgaaggataaagaaaaaatgctagcagatgctgaaaagaaaacaaacactctatcaaaggaactggataatttgaggtcgcgatttggaaacttagagggaaatacttctgaaaggattacaataaaaaatatcttacagtcaaggcccgatatttcggcagaagaatgtaatttccttatggttgaacaaattgattcagcaaatttgacgactttacaaaatactgtcaaagaaattgttttggctgttggtattccttatccaaagttaaggcgaaagattccgttgctggctatcaaattgaaatatgaaaacatcatgctgtccaattttgctcaacgtctgcatagacaagtatatagtcaagaaatgaatctaaagaaatttacggatcaagcatactatgattttatgtcaacgcgcaggatggattccatagatcaccatttggagagatgtctggaccatctgtatgatcatatcctggagaagatggtgaagtga

SEQ ID NO: 78234 - DNA, 2304 bp, Saccharomyces pastorianus
atggcaaaaaggcatagtcattatcaaggaagcagacgtaggcatgcacgtggtagcaattccaagaaagctggcagggggaatgctagaggcatacaaggcagaaagataaagaaaaaacctactcccactaacagttggcataactcatctataccactaggagaaggtgatcttgatgatgtaggcgccgacttcaacccaggaagagcattcatatcaccaaaaactatagaagactattattttggtcgcgatgccaagagccgttctatgaaaatgggtggtttaagaccaggtaatcgatatgattcttcaaccgacctacaagcaggaagggcagcattccgcaaaagacctatgcaatttgtaaaagctaaggaagtttacgatccatcccacaatatgattcaaaaactgagagcaaagaacgaaacaaagaacagtgaagaaattgtcgaaagggaagcagacgtttttgaagaaccaggaaagatgacttctgatgttgaatatattgacaataaagacagtgaaaacgaggatgatgatagtcagaattcaccctcgacggaccactcgctgtcttcgaatgaaagcaaagttgaagatggtgacctgttttttgtagatgaagaggctcagcaatcgccggatctaaccaaaataaaaagagtatgtatcgaggaaatcgcaaggccaagagaagttgcgatagagttcgatcctatcttaacaattggaaaggttgaacttagcgtttccgaaggtaacgaaagcaaggaaattagtgttgacgttccaaataagggtaataagacatatcatccatttgctggttacatttccaacgtattacatggtatgcatactagcgactcggacaatgatgaactagactacgaaatagaaacagagaataatagtgaacctttgtacgaatcctcagcaagttctgaggttgatcaagggtttaattatgttgaccaacgtcacaattcccgagctgacaacaatcttttaccaagccctagtccgcagttgacagaagatataaaatgtctttcaataaatggtaccaaaacatccgaaggcaataatgataatctgccatctcctgctagcgaagagttagaatttggattcaaagaagaagattttgtcataaatactaatgacatagtggtctccaatataagaatgggtggagtagacaattcatattatctacggtgttacagattactgggagattacgactttcattggattgaccaggacttactcacagacttcgttgtagacgagttaggtcttcctgaagatagattacctgcatatttgaattttattaaaaattctcttataccaaaaattgaaccagctgagccaacctactcagatattccgatttctgattcgagtgatgaaggtgacagctatgaaggcgacagctatgaagatgatgaagatatgggctcctcggttatgcatagcgacattgaagagggtctggacgacctaattgcatatacattgaaacatgatacagaaagattcaaaacatttgaaaccaagtccttggaaactaagggtaaaggtaagaagaagaagctactcatcgatgacgccttagcgctggatacagaaacgttggagacgttacaaagtaagtttagtaaacgcatagaaaccaaagcaaagaaaagaaaagccaaagaagatttcattgatcaggagaatagaaattcgaacgatatgctcaagaaatacccatatggtctccatattcaaaatattaaagatgaatttgagtcctttttgtctaggaacaatgatagactgactttccctccattagatcctcatggaaacaagaccgtaatgaaaattgcgaagcattataatatgaagagttcaaaaattgggaaagcaaatcatacgtcggttgttgtagaaaaaataaagaaaacgaaatggtcttctccgaattatagtctcattgaccaattgatgaggcagaggccagtattcatgagaatagatataagaagaccgagggaggaacaagctgctttcgaaagaactaaaacaatcagagggaaatttcatgttaaagaaggtgagattgttggtcaaaacgctccagagattggaaacgaaaatatcggtagaagaatgttggaaaagcttgggtggaaaagtggagagggccttggtattcaaggcaataaaggtataagtgaaccaatttttgccaaaattaaaaagaatagatcgggtttaagacacagtgaaagttaa

SEQ ID NO: 78235 - DNA, 1521 bp, Saccharomyces pastorianus
atggacgacttcttatcacgtataggagtgatatacatgcagaggtggctacaactgtggaaaatggatttggtacaaaaagtgtctcatggcgtttttgaaggctcgtccgaagaaccggttgctcttatgaatcatgattatatagtattaggggaagtatatcctgagcgagacgaagaatctggcgctgaacaatgtgaacaagactgtcgatatcgcggtgaagcggttagtggcgtgtttttaagctctctttttggtagggaaatttcttcttacacaaaggaatttcttttggatgtacaatcaagggtcaactttacatatcggacaagatttgttcctatagcaagggcgccagatgggccttcacctttaagtctaaatttattagtacgtacaaatccgatcagtacaatagaggactatatagcaaatcctgattgctttaacactgatattgggtgggggtgtatgataaggacaggacaaagtttgttggggaatgccttacaaatccttcatttgggcagagatttcagggtaaatggtaacgaaagtctggaaagagaatcaaaatttgtaaattggtttaatgacacgcctgaggctccattttcgttacataactttgtttctgcaggtacagaactctctgataaaagaccaggtgaatggtttggtcccgcagctacggcaaggagtatacaatctttaatatatggcttccccgaatgtggcatcgatgattgtatagtatctgtttcatccggcgatatctatgaaaatgaagttgaaaaagtatttgctgagaatccaaatagtagaatattgttcttgttgggcgtgaagctcgggattaatgcggtaaatgagagctatagagaaagtatatgtggtatcttaagttcaacacagtcagtaggcattgccggcggtaggccgtcttcatcgttgtatttttttggttatcaaggaaatgaatttttacatttcgatcctcatattcctcaaccggcagtagaagattcatttgtagagtcgtgccataccagtaaatttggtaaattgcaactatcggaaatggatccctcgatgctcattggtattttgattaagggcgaaaaagactggcaacaatggaagctagaagttgcagaatctgctattatcaatgttcttgctaagagaatggatgactttgatgtgagttgtagtatggatgacgtggaaagtgtaagttctaactcaatgaagaaagatgcaagcaataatgaaaatctcggagtactagagggagactacgtagatattggtgcaatattcccacacacaacaaatacagaagatgtagacgaatatgattgttttcaagatattcattgcaagaaacagaagattgttgttatgggaaacacacacactgttaatgcgaatttaacagattatgaagtagaaggcgtccttgtagagaaggaaacggtaggtattcacagtcctattgatgaaaaatgctag

SEQ ID NO: 78236 - DNA, 621 bp, Saccharomyces pastorianus
atgcctagtcatcgcaattcaaacttgaagttttgcacagtttgtgcatcaaacaacaatcgttcaatggaatcgcataaagtcctgcaagaagcaggctataatgttagctcttacggaacaggttcagctgtgagactgcctggtctatcgatagataagcctaatgtgtactcatttggtacaccctataatgatatatataatgatcttttatcacaatcagcagaccgttacaagtcgaacggtttattgcaaatgctggatcgtaatagaagactcaaaaaagcacctgaaaaatggcaagaaagtacaaaagtcttcgacttcgttttcacttgtgaagagagatgttttgatgccgtttgtgaagatttgatgaatagaggtgggaaattaaacaaaatagtgcatgtaattaatgttgacattaaagatgatgatgaaaatgctaaaattggtagcaaagctatattggaattagctgatatgctcaatgataaaatagaacaatgtgaaaaagatgacattccctttgaagattgtataatggacattttaactgagtggcaaagctcacattctcaactaccgtcattatacgctccttcatattactaa

SEQ ID NO: 78237 - DNA, 2628 bp, Saccharomyces pastorianus
atgagcgggagtttgtctagaggaaatggtggaaagaaagttcttaataagaatcaattactgaagcgaaatcgcataagaaatgctagatcaattagagcagaggccgtagccgcttcatcaacaaaaactgggacaccgagtgatctgagtgaatcgggaagtaagctaaacgtggaccaattcatcagttctcgacaattcgaggttaagcagttgcaattggccatgcataattccaaagcagccagctcaacgagaatatttcaggcattgcctcgaaaattgcgtcgtagaacggcttcgcataatgttcgtagaattccaaaaagaatgcgcaatagagctttgagggaaatgcgtaaaagtgatcagcaggatgtgttgaaggggtcttcagcctcttccagaaaagctcatggcctaaatgcaaagcaactttataaagctagaatgtccataaagctgctacgattggctagcaaatctacttctatgaaactcagcatgccaccagaggttacatcatctaactgccacgtaaggcagaaaatcaagacattaaagcgaatgattaaagaatcatcaacagcaaatccaaatataaagttactcaataatcgtatggggagctatgattgcactggtgtcaatgaattagcacctattcccaagggcagggtcaaatatacgaagagacagaagcactttgcttggctacccacccacatttggaatgctaaaaggtcgcacatgatgaaaagatggggatatcaaatggcatgggcacctactcaaaaatgctttaaattgacgcataggttgggcggtgatacctgcagctccgatggggccttatgcatggattcaagttatattggtacaataattgtaaaagacaaaagcaatgacagtgagggggactttttaaaatccattataggaaagttaacagctgaaagagcaaacttaaggaaatatcgcgaaggccaggttttattccaagggttaatttatagtttcaatgaagaaaacggtgaggattctactaagccactgggtccatgcgacgtattttgggtacaaaaggatactgcaattataaggttacacccttcaatttatactcaggtttttaacattcttttgcaacataaggaaaaactaacagtacaagattgtcgatactcattagcaagcgtgacattgaagggagctaaagctctagagtcattagcatcgtgtttaaggagcacagagtactctaaatcgtttgaacaatttaaaatggtttcaatgattaccgatcataatgccctaccacagaggtgtacgtttgcatttgaagccatagatccgcgtcatctagctgctccaaagaaattaaatgattcacagaggaagactgttaattctgacgacattttatcactgcatgaaaactatcctcaagacgaaataaacgccgtttttaacgaattatgtgaccctgaatcacgtactcaatcatacaacaaccaaaacacattaaaagaaatttctgcgagacgttacaaattgctaactgccacaccgaacagcatcaataaaactacagtcccgttcaaagaaagtgacgatccttctattccattagtcataataagaaggctcaagaccagggattggattgttgtgttaccatggttctggctgctaccgttatggcatctactgaactggataccaaggatgtatcacattggcctcaggcaattccagcaaattcagtacgagaataagcaattatattttccggatgattatccattcactcaattgggttatatagaaaactcattttataaaaaggaggcctccaagacgaagtgggataggaagccaatgggaaaaaggattaatttcgagaagatcaaagacatccataacactaaattaccggcatatagcggagaaatcggcgattttttcagttcagactggagatttttacaaatactgagaaatggaattgattatttacagcggaatgataaaaccttagaactgatggacagtaagaagaccgggcaatttaacgctcagggtgtaagagacatcaactgtgtaaatgatgttttggagttttgcaaagattatgaagccaagaccaaggctatgtcgttgtcgattgaagagaacataccagttgcattgtgtaaaaatcggaaatgtcaatttcgcactcctgatagcattagcgtcaatagttcttcattctcccttacatccttcccatgttgtatcattgctgtatcttgcacactactcgaacgaggtcacccaaaggacaatgcaagaatatatcaagttccagaaaaggacttagagcattggctacaattggcaaaaggggtttaccgcccaaacggaagaaaagatcatgatttgaaaattccacttccagaggtacatgatttgattggttttattaccagcggcacctaccacttaaattgtggaaatggtatgggaatcggatttatagatcatcatgcggccatccggcaaccaactaggtatgtactgatcagaaatgtaggtgccaacacttataggttgggggagtggtcgaaaatatccgtataa

SEQ ID NO: 78238 - DNA, 1302 bp, Saccharomyces pastorianus
atggttaacgttgtattgggctcccaatggggtgatgagggtaaaggtaaattagttgatttactggttggtaaatatgatattgtagcccgttgcgccggtggtaacaatgccgggcataccattgttgtaaacggtgttaagtatgatttccatatgttaccatctggtttagtcaacccaaactgccaaaaccttttgggtaatggtgttgttattcatgttccatcttttttcaaagagttggaaaccttggaagctaaaggtttgaagaacgcaaggagtagattatttgtttcttccagagcacatttagtctttgactttcatcaggtgactgacaagctaagagaattggagttatcaggtcgttctaaagatggtaaaaatatcggtactaccggtaaaggtattggtccaacttattccacaaaggcttctagatctggtttgagagttcatcatttggtgaatgatcaacccggtgcctgggaggaatttgtcgctagatataagagattattggaaacgagaagacaaagatacggtgatttcgaatacgactttgaagccaatcttgctgaatacaagaagttaagagagcaactaaagccattcgtcgtcgattctgtcgttttcatgcacaatgctattgaagcaaagaaaaagatattggttgagggtgctaatgctttgatgttggatattgattttggtacttatccatatgtgacttcttccaatactggtattggtggtgtcctcaccggtttaggtattcctccacgtactattgatgaaatttatggtgttgttaaagcctacacaactagagttggtgaaggtcctttcccaacggaacaattgaacgaaaatggagaaaaactgcagaccattggtgctgaatttggtgtcactactggtcgtaagcgtcgttgcggttggctagacttggtagtcttgaaatactcaactttgatcaatggatacacgagtttgaacattaccaaattagacgtcctcgatactttcaaagaaatcccagtgggtatttcatattctattcaaggtaagaagctagatttgttccctgaagacttgaatattcttggtaaagttgaagttgaatacaaagttttgccaggttgggatcaagatattaccaaaattacaaagtatgaagatttgccggaaaacgcaaagaagtacttaaaatatattgaagattttgttggcgttcctgttgaatgggttggtaccggccccgcaagagaaagcatgttgcataaagaaattaaatag

SEQ ID NO: 78239 - DNA, 1764 bp, Saccharomyces pastorianus
atgagtaacaagaggacatctgtagaacagctcatatcatgcccaatttgttctagaaaagtctttttttccttaatcaactctcatcttgacatatgtggcaaggaaaagtcaaagccttcgagtaggccacaaacggtgtcaagtcttttggcaggcccaaaaaagaggaaacaagctaactcagagaagttcattgatcttgaaaataaggaccatgaaattaagccaggtcttaagagcgagagtgatgatattgagattgttgaaaatgaaagcaaaagatttaaggcagcaccatccacggattttgcgaaatcaatagtggagcctgcttcgagcagagatcaacttcacaacgattacgaaagcagatggttgcagaaaataagccatttgccacttagtgaaaaattgaggccaaaagaattaagagattatgtaggtcagcagcacattctctctcaagataatggtacattgttcaaatatataaaacaagggactataccatctatgatactctggggccctccaggtgtaggaaagacttcactagctagactattaacgaaaactgcgacaaccagtagtaatgaatcaaatgttggttccaggtacttcatgatcgaaacaagtgcgacaaaggcaaatacgcaagaattgagaggtatatttgaaaaatcaaaaaaggaatatcaattgaccaaaagaagaactgtactttttattgatgaaattcacagattcaataaagttcaacaggatttgttattgccacacgtagaaaacggtgacattattttgattggtgcaacgacagaaaatccaagttttcagctgaacaatgctctcattagcagatgtctgatttttgtcctagaaaagctgaatgtcaacgaactgtgtattgttttatcaagaggaattgcattattgaataaatgcaggaaacaagtatggaatattgaaaatcctttgaaattgtctagaagcatactggagtacgtggtagatctgtcggtgggtgatacaaggagggcgttaaatatgttggaaatgatcgaagtttcaacaagagagcgcaaggccgacgaggaagaattatctatcgatgatgtacgagacataattaagaacaacagcagcaacgggttgaatacatactatgacccaaagggagataaccattatgatacaatctctgcgtttcataaatccattagaggtggggacgaaaacgcctcactgtactatttagcaagaatgttgcagggaggagaggacccattgtatgttgcccgaagaatgattcgaatagcttctgaagatatcggattacgggatagttcattattgcccttggctgtcgccgcacatgacgcagtaatgaaagttggtttgccagaggcagaccttgcactggcgcaatgttgtgttgctttggctagggcaccaaagtcagtagaactatatagagcttggaagaaattaagggcaatgatgagcgagaacatgtacagtttagcaagcagtgagataccgatgcatatcagaaatgcgccaaccaaattgatggaggagctgggttatcataaaggctacaagtacaatcccgattatattgaaggaaaagtccaacaagactactttcccaaagaagtgctcgagaaatgtccaaataaaactgacttaaagttcctggacggcaaacatttaggagacaaagaagatcctgacttgagacagtcatatcagggttag

SEQ ID NO: 78240 - DNA, 2484 bp, Saccharomyces pastorianus
atgtctagtccagatgattttgaaactgcaccagcagaatatgttgatgcattggatccgagtatggtcgttgttgacagtggttctgctgcagtcacagcgccatcggattcagccgctgaggtaaaagctaatcaaaacgaagaaaacactggtgctactgctgctgaaactagtgagaaagtggatcagacggaggtcgaaaagaaagatgatgatgataccactgaagtcggtgtaacaactaccacgccttccattgctgatactgctgctaccgctaacattgcttcgacatcaggtgcatctgttactgaacctactactgatgacaccgctgctgatgagaaaaaggaacaagtaagtggtcctcctttgtcaaatatgaaattctatcttaatcgcgacgcggatgcgcatgattctttaaatgatattgatcaattagcgcgtctgattagagcaaacggtggtgaagtgctagactccaagccaagagaatcaaaagagaatgttttcatcgtgtcaccctataatcataccaatttaccaacggtaactccgacttatattaaggcatgttgtcaaagcaactcgctactgaacatggaaaattatttagtaccatacgataactttagagaagttgtcgatagtaggttgcaggaggaatcgcattctaatggtgtagataatagcaatagcaatagcgataacaaggattctatcaggcccaaaacagaaataatctctacgaatactaatggcgctacggaagactcaaccagcgaaaaagttatggtagacgctgaacaacaagctagattacaagagcaagctcagctccttcgtcaacatgtaagcagcaccgcatcaatcacaagcggaggacacaatgacctggtccagatcgaacaacctcaaaaagatacctccaataataataatagcaacgtcaacgacgaagacaatgatcttttgacacaggacaacaaccctcaaacagcagatgaggggaatgcatcttttcaagcacaaaggtccatgatttcgagaggcgctttgccctctcacaataaagcttcttttacagatgaggaagatgagtttattttggatgttgtgagaaaaaatccaaccaggcgtacaacacatactctttacgatgaaatatcccattatgtgcctaaccacacgggtaattctattaggcaccgatttagagtctatctttccaaaagactagagtacgtttatgaggttgacaagtttggtaaattggttagagacgacgatggaaatctgataaagactaaagttttgccaccatcaattaaaaggaaattttcagcagatgaagattacactttggcaatcgcggtcaagaagcagttttatcgtgatttgtttcaaatcgaccctgatactggaagatcacttatcacagatgaggatacacccactgctatagcgaggaggaatatgacaatggatccaaatcatgtgccagggagtgaacccaactttgcagcttacagaacccaaagccgtaggggaccgattgcacgagaatttttcaagcattttgccgaagagcatgcaacacatactgagaatgcttggagagataggtttaggaagtttcttctcgcttacggcattgatgattatattagttattatgaagctgaaaaagctcagaatagagagccggaaccgatgaagaacctcaccaatagacccaagaggcctggcgttcccactcctggcaattataactctgccgccaagagggcaagaaattatagttctcaaagaaatgttcagcctactgccaatgcagcgtccgctaatgctgctgccgctgctgctgccgctgcttccaactcttacgctataccagaaaacgaattactggacgaagataccatgaatttcatttccagtttaaagaatgatctatccaatatttcaaatagtttgccctttgagtatccacacgagattgcggaagctataagaagcgatttttcgaatgaagatatatatgataatattgatcctgataccataagctttccaccaaaaattgcaacaacagatcttttcctgccattgttctttcattttggcagtacgagacaatttatggataaacttcatgaagttatttcaggagattatgagccatcacaggctgaaaaactggtacaggatctttgcgatgaaactggtatacgtaaaaatttcagtacgagcatattgacgtgtttatccggggatctgatggtctttcctcgctatttcttgaacatgtttaaggacaatgttaatcctcctcccaacgttcctggtatttggacacatgatgacgacgaatcgctaaaaagcaatgctcaagaacaaataaggaaactggttaaaaagcatggaactggtagaatggaaatgaggaaaagattttttgagaaggacctgttatga

SEQ ID NO: 78241 - DNA, 963 bp, Saccharomyces pastorianus
atggacagtgaagcaagtgacattgaggcagagttatccgacagcgtctcagctggtggggaagaatacattgacgatgatgattatacggaagatattgacgatcagatagtcacagccaaatcatctagaagaacagcacgtaggagtgtacctaagggtgtaagaacctcaaaacgcattagagataaagaactttctgtggaggttgatgaagattatgatgaggaggaagatgtattgagcccttctaagaagcgccatctacacaccagatcaatggacaaaaggcaagttgccccaacagcttctgaaaaatctgatattggtgatagtaaaggtaatgatggcgaaatagaagacggtatattggaagaagaagagagcttagagaaggaactgaatagaggtggaggaaaggaggtagagaaaagtgaagaatcttacgacgcccaaaacgatgttggacagaagggggaggaagaacaagatggggaatctggaggctatgaagataatgaacccagtataagtaaagagtcagacgaattggtctctgtggtaaacggtaacggtaacgaagaggatgatgaagtggaggcaacaaaagaaaatacaacagattctactagaagtactacgactcgaagcaagatgctgttagatttgctggaagatggtgggtctaaaaagaaattaacagatgaagaaatccagctgcgaagagccgaaaatgcacgtaaaaggaagaaccttagcgagaagagactggaagaggagaagcaggacacaatcaataagcttttgaagaaaagggccggtaagtctaggagccacttaccaaatgatgatgaaaagaatgatggctcttcaagtttcgtgaaaccacgcaggccttacaatagcgagggtatgacaagaattctgcggagatatgaagaagacttattttgtacattttaa

SEQ ID NO: 78242 - DNA, 600 bp, Saccharomyces pastorianus
atgacatcgattaacagttttcccaggaatattgactggccttccaacataggcattaaaaaagtagagggaactaatccaacggtgaatgccatcaagggcttgttatataatggtggatcaatttatgcatttctatattttgttattgctatgtttgttgaaccaacgctacaaaagcagtaccagcagagaaatgatttttccttgtttgttttgttgcgtttgagaagaatcatagcgcaattgcaaaaacgactggtgatgaccccagtatcctcgttggggttcaacgaacagaataactttgtggagaggtccactcaaacttcagacgacaatataatacgagaagataatagccattgggctgaaatgatttatcaactgcaaaatatgaaacaagaattacagtattttaacagatcctcaggccaaccatctgaaagtatagacgattttgtctttcaaattaagatggtgactgaccaggttgagttaacagataggtcccgagctttctcaaataaatcaagaaatattatacagggaatccgagaaatcaaaggttggtttgtgaatggccaagtgccaaggtaa

SEQ ID NO: 78243 - DNA, 645 bp, Saccharomyces pastorianus
atgaacattctgcgaatagcatgtcgttcttttcattgcctgcgctgcggtccattactcaatgagaacaggggatggtcatccaaaaagattattaaattagtcaataaatcgagtttgtccaataaagagtttacagaaaaagtacgagatggtacgaaagacattcctgagtggaagaagcagaaaatggcagttagaaaaaaattgcaaggccagaggtggaacccaccaaaaaagatatcacaggaacaaatggaggctctaagactattgaaattcaactttcctgaactgacagcatctgatcttgcagaccggttcaaaatttctcccgaggctgttcgaagaattttgaagtccaactggaagcgtactgatgaggaaaacaataacacctacgagagatggaaaagaagaggagaacggataaaagaaatgtatcaaagaaaagaggatgccgattttgtatccaatcaaattgttactagcagaaagattatacttgggtccaactcaaattcacctgaattaatagcaaggaatgttcgcacttttaaacctttcaagcctaacaacagtacacctggaaagaaaaacaccaacaaactatacattttgaagcatttgggctcgaaacaataa

SEQ ID NO: 78244 - DNA, 261 bp, Saccharomyces pastorianus
atgcctccaagaagtatagaagaatggttttactacaagttactgagtagtccaggtttccatagatttgtacgcaaggtatataggaaagtaaatggtattaaagaagatcctttcactgaccaatcaactgcttttcaatatctttataagccaactccacgacagaaatttaaggctttaaggcttttattttgggatgaaatgagatctacttttgggttcagaaggagactaggagaccgctttaaaaaagattaa

SEQ ID NO: 78245 - DNA, 813 bp, Saccharomyces pastorianus
atgagtaaccaacacagccctcagccattttgtttggacaccaaattggtgaaactattagaagagctccaggagggaaagcaattcaacaataaaaacatattcccggaaaaagcattatatttgaagctcgctcttgattattctttcttcagaaagaatttactagagttttgcgtccaccttgacaagataaaaggagtcattagaccaaactatgacactatatatattttgtgcctgttggaggtggatctcctcaatctggtatttaccgacaatatattggaaatatgtttgcccaggtttgtttcaagggaggacttgagggtttttaataatactttttacacatatcacgataaccgcctacgtattctccaagaagacttttctcaattgttcaaaaaaatcaaaactaaggcttctgtactatgttttacagttgaggaaatttttctgacaaaccaagaaattttacctcaaaactcaacagtggcagaactgcaaaagagcactaataaagtacagacaaatgggccgcaacggcacgatttcatagtcactctagaaataaaactgaacaaaacacaaatcactttcctcattggagctaaaggaacgagaattgaaagtttgagggaaaaatcaggcgccagcataaaaataatacctattagtgataaaatgactgcacatgaaaggaaccaccctgaatctgttcaacaaacaatactaatttcgggtgacttatactcaattgcattagccgtcaccagtatagagtctgcattaattactttggatttatag

SEQ ID NO: 78246 - DNA, 1842 bp, Saccharomyces pastorianus
atggctgaaggtgttttccaaggtgctatcggtatcgatttaggtacaacatactcttgtgttgctacttatgaatcttccgttgaaattattgccaacgaacaaggtaacagagttactccatctttcgttgccttcaccccagaggaaagattgatcggtgatgctgccaagaaccaagctgctttgaacccaagaaacactgtttttgatgctaagcgtttgattggtagaagattcgacgacgagtctgtccaaaaggacatgaagacctggcctttcaaggttatcgacgtcgatggtaacccagtcattgaagtccaatacttggaagaaaccaagactttctccccacaagaaatttccgctatggtcttgaccaagatgaaggaaattgctgaagctaagattggtaagaaggttgaaaaggctgtcattactgtcccagcttactttaacgatgcccaaagacaagctaccaaggatgccggtgccatttctggtttgaacgttttgcgtatcatcaacgaacctactgccgctgctattgcttacggtctaggtgctggtaagtccgaaaaggaaagacatgttttgattttcgatttgggtggtggtactttcgatgtttccttgttgcacattgctggtggtgtttacactgttaaatctacttccggtaacactcacttgggtggtcaagatttcgacaccaacttgttggaacacttcaaggctgaattcaagaagaagactggtttggacatctccgacgatgccagagctttgagaagattgagaactgctgctgaaagagctaagagaaccttatcttctgtcactcaaactaccgttgaagttgactctttgtttgacggtgaagatttcgaatcctctttgactagagctagatttgaagacttgaacgccgcattgttcaagtctactttggaacctgttgaacaagttttgaaggatgctaagatctctaagtctcaaatcgacgaagttgtcttggttggtggttctaccagaattccaaaggtccaaaagttgttgtctgacttctttgacggtaagcaattggaaaaatctattaacccagatgaagctgttgcttacggtgctgctgttcaaggtgctatcttgactggccaatccacatctgacgaaaccaaggacttgttgttgttagatgttgctccattatctctaggtgttggtatgcaaggtgacattttcggtattgttgtcccaagaaacacaactgttccaaccatcaagagaagaaccttcacaactgtcagtgacaaccaaaccaccgttcaattcccagtctaccaaggtgaacgtgtcaactgtaaagaaaacactttgttgggtgaattcgacttgaagaacatcccaatgatgccagctggtgaaccagtcttggaagctatcttcgaagttgatgctaacggtatcttgaaggttactgccgtcgaaaagtctaccggtaagtcttctaacatcactatctccaacgctgtcggtagattgtcttctgaagaaattgaaaagatggttaaccaagccgaagagttcaaggctgctgatgaagcttttgctaagaagcacgaagctagacaaagactagaatcctacgtcgcttccatcgaacaaaccgtcactgacccagtcttgtcttctaaattgaagagaggttccaagtccaagatcgaagctgctttgtccgatgctttggctgctttgcaaatcgaagacccatccgctgatgagttgagaaaggcagaagttggtttgaagagagttgtcaccaaggccatgtcttctcgttaa

SEQ ID NO: 78247 - DNA, 1278 bp, Saccharomyces pastorianus
atgaaattggatacttctcatatgagatatttgacaactgatgattttcgtgtcctccaggccgttgaacaaggttctagaagtcacgaagtcgttccaactcccttgattcatcaaatctcggggatgagatcgcagtccggaacaaaccgagccattagtgatttggccaagcttagccttatttccaaaatgagaaatgtcaaatatgatggttacaggctaacttataacggtattgattatttggctttgaaaaccatgttaaacagagacactgtctattctgtcggtaacactattggtgttggtaaggaatctgacatctataaagtaagtgacaaaaatggaaaccctagagtaatgaaaattcacagattaggtagaacctcctttcattccgtcagaaataatagagattatctgaagaaatccaaccagggggcaaactggatgcatctttcacgtttggcagccaataaagaatatcagtttatgtccatgctttattctaagggtttcaaggtccctgagccattcgataactcgcgtcatatagtcgttatggagcttatcgagggttacccaatgaggagattaagaaaacataagaatatacccaagctttatagtgatctgatgtgtttcatcgttgatctagcaaatagcgggcttatccattgtgattttaatgagtttaatattatgataaaggacaaactagaggatgaaaacgattgtgggttcgtagttatcgattttccacaatgtatatctattcaacaccaagacgccgactattatttccaaagggatgttgactgtattcgtcgtttcttcaaaaagaaactgaagtacgaaccaaaacctgattcatcaatgctcgacactgaaggttttggcgatggttataaatatgcatatccagatttcaaaagggacgttaaaagaaccgacaatttggatgaattggtgcaggcttccggatttagcaaaaagcatccaggagataggggcctggaaactgccgttgaaagcatgagaaatgctgtttataattcagatgacgatatgtctaatgacgaggccgaagaagaaaatggggagggcgattattcagaagagggtgaatactatgactccgaacttgataatgaaagttctgaagatgacagtgaagatgcacaagaagaggagaacgaacgtattatagaggcgctttccagtggtgttgaaaatctaaaaatggataaactaggaaactatatactagagtag

SEQ ID NO: 78248 - DNA, 1368 bp, Saccharomyces pastorianus
atgtcaaaattgttcttagatgaactgcctgagtctctcagccgaaagattggtaccgtggttagagtgctgccaagctcattagaaatatttgaggaattgtataaatatgcattgaatgaaaatagcaacgatagaagcggacaccataaaaagcccagaatagatgtctcttctgacctgcttaaaacagatgaaatttcggaaaccaatactattttcaaattagaaggtgtttctgtactgtcaccattaaggaaaaagcttgatttggtgttctatctttccaatgttgacgggtctcccgtaataacattactgaagggaaatgacagggaattaagcatttatcagctgaacaaaaatatcaaaatggcttcgttcttgccagtgccagaaaagcctaatctaatatacctttttatgacttacacatcgtgcgaggataacaagttttctgaacctgtggtaatgaccttgaacaaagaaaacacactaaaccagtttaaaaagttagggcttcttgattccaatgtaacagactttgaaaagtgcgtcgaatatataagaaagcaagccattttgacgggttttaaaatctccaacccattcgttaacagtacactggtggataccgatgctgaaaaaataaactcatttcacctgcagtgtcatagaggtactaaagaaggcacgctatattttttaccagatcatataatttttgggtttaaaaagcccattttgttattcgacgcttctgacatcgagtctataacctattcgtctattaccagattaacattcaatgcaagcttagtgacaaaagatggtgaaaaatacgagttttccatgatagaccaaactgaatacgctaaaattgacgactacgttaaaaggaaacaaatgaaggataagtctatgtctgaggaattgaaagctaaatccaagagcaaaggccaagcaactgatggcacagccgatcagccatctattctacaggaagctacccgtcaaatgcaagacgagaaaaaggcaggtatgttttcagacgatgatgaagaaaatgaccaaaatttcgaagctgagagcgacctttccgatgggagtggccaagaatcctcagacggtgcagaagacggagaggaagcagaagaagatgatgaagaagacgatgaagaggaagacaaaaagggccaaagcgctttgaatagagataatagttttgcttctataaatggtcaaccagaacaggaactccaatacaaagagtttaaggagccgttagaactcgaagacattccgatagaaattgataatgatgacgatgaagatgatgaggatggatccggagtagaatacgattga

SEQ ID NO: 78249 - DNA, 903 bp, Saccharomyces pastorianus
atgcgtttgtttgaaaatagtaaagatatggaaaaccggaagagattgttacgtgccaagaaggctgccggcaataacaattgttttgaatgcaagagtgtcaatccacaatttgtttcttgcagcttcggcatatttatatgtgttaattgcgcaaaccttttgagggggatgggtacgaacatattttgtgtaaagtcaataacaatggataattttgaagaaaaggatgtcagaagagtagagaaaagcggaaataacagattcggttccttcttgtccaaaaatggtattttgcagaacgggattccattgcgtgaaaaatatgataatttgtttgctaaaagttacaagaggaggctggccaatgaagtgcgcagtaatgatattaatcagaacatgtatttgggattcaataatttccagcagtatacaaacggtgcgacgagccaaataagagataggacgttgagggaaatatctaataacagcaatgcttcggaaggggcggaatttgtactacctgagaaggtgttaggctctgacaattttcaagactgcgaaagatttcccgcttgtttgagttccgaaagaaacctggacgagaataacgttacaagtgctacgagtacgttaacaattgaaaaatttcaaaatgaccccataggaaccatttctagaagttgggtgttgctttcagatgcattatacaaatcatacgaagactttaaaggctcggttgttcagccaacgattgaaaacattcaacaaaggaatttgccgaatgatatcaagagatcattcgtgcactttaatgagaagttgcatgaaacgccccatttaccctcgccagttttttcttgttttactgggggagatattctccctccagaattcaattag

SEQ ID NO: 78250 - DNA, 612 bp, Saccharomyces pastorianus
atggaaccttttgacttttttaactccttcaagcatgccttggcggtattaaaacttcctagtaaatctatgtcaacaacagatttgaaggcgtttggagagaggttcgcaaaatcgcacacaaaatttccagcagcaccggcaatgacgaaatcgatcttaccgaacttctctacggtctttttaaccgcattctccacttgttcaaaattgcgaatatcgacgtttgcaatagccaagactgcatctttgtcctttgctaactgcgaaataccttttgctgcctgttctgttctttcttggtccctgccgacaatagccgccttacagccaagaagaaccaaggcttctgtctgcacccgacatatcgtgccagctccaccagtgacaaatgccactttacccttaaataaatcaggtctccaagaaccctcagtaacgaatttgccgtccaaagtgtttgctgtattcatagtatccatgactcgaacatacgacctcccaaactctaaaagtgtaaatattagaaattacgaacttcttttcaaatttagattatctttgatttggagccttactcttatacctatcctttttggtaaactccaatag

SEQ ID NO: 78251 - DNA, 888 bp, Saccharomyces pastorianus
atggatactatgaatacagcaaacactttggacggcaaattcgttactgagggttcttggagacctgatttatttaagggtaaagtggcatttgtcactggtggagctggcacgatatgtcgggtgcagacagaagccttggttcttcttggctgtaaggcggctattgtcggcagggaccaagaaagaacagaacaggcagcaaaaggtatttcgcagttagcaaaggacaaagatgcagtcttggctattgcaaacgtcgatattcgcaattttgaacaagtggagaatgcggttaaaaagaccgtagagaagttcggtaagatcgatttcgtcattgccggtgctgctggaaattttgtgtgcgattttgcgaacctctctccaaacgccttcaaatctgttgttgacatagatttactaggaagttttaataccgccaaggcatgcttgaaggagttaaaaaagtcaaaaggttccatccttttcgtctctgccactttccattattatggtgtgccgtttcaaggacatgtgggcgctgctaaagcgggaatagacgcattggcaaagaatttagcggttgagttggggcctctgggtatacgttcgaattgcattgctccaggtgctatcgataatacggaaggcttgaagagattagccggcaaaaaatataaggaaaaggccttggcaaagataccattacaaaggcttggatctacacgggatatagccgaatctactgtttatattttttcacccgccgcatcgtatgtcaccggtactgtcttagttgttgacggtggtatgtggcatttagggacctattttggacatgagttgtatccagaagccttaataaagagtatgacatctaaattataa

SEQ ID NO: 78252 - DNA, 2577 bp, Saccharomyces pastorianus
atgtcattaccgggtacacctactacatctccgaccccgatggatgaggatactgaacaagccgtttcggttaatactgaacccaaaagagtaaaggtttacattttagagaacaacgaatggaaagacacaggtacagggttttgtataggggaggtggacgaaggcaagttcgcatatcttgttgtctcagatgaagactccccaactgaaactttactaaaatccaaactagaaggaaatattgaatatcaacggcaggaggaaacgcttattgtttggaaggatttaggggggaaagatatagccttgagttttgaagaaagtatgggatgtgacaccttatgtgaattcattgttcacgtccaaaggaacatagagtcaaatatttctttagtcaccgtaaaatccagcgacaacggactcgggtctgttcacgacattataacgggccctgtgaccttgccctccaacgaccagcaacagaatagtcaaactttactagaggctctaaagattttgaatgaaaatacttctttcgattttttgaaaaacgaaaccattgagtttatcctccagtcaaattacattgatacactgatttctcatttccacaaagcagaagaagaaaagataccgaaggatttatttttgctaagtaacatcatcaaaactttgatactttacaatcaaagagacatattggagtcaatggtggaggacgataggattatgggaatagttgggattttagaatacgatactgaataccctacatcaaaggcaaatcataggaaatatttaggatcaaaaggtcccaatttcaaagaggttattccattggaaaatgaggacttaaaaataataatggaaaaatgttttcgcttacagtttttaaaagatgtggtattagtacgatttttagacgatcataattttaacttaatctcggaaattgtcatggacctggaaacgtgtataatcgactttcttcaagtagggacgtttttggacagactaatagagctttatgataccaaaacccttccagaaagctcttcagagaaggagaagtttgtacaaaaacgaaaagacgggattagattgttgcaacagtgtgttcaaatgtcaatcaatttagatgcggttgaccgttctaagttctataaaacacttgttcgaaagggtctattcaaagttttagattatgcatttcacatggagacggatagtaatgttaggattttagctacggatactatcattactataatcgaacacgatatcttgttaattcacaacgttcagaatgaagattctttcaaacggcaacataaatcagggcccgaggacaagtcttcccatcggaaatatccgcaggattacagctccagtactgattccaagttgttattgatactttcaaccattcttctgtccgacaggagtcccggattgcgagagcaagttgtgcaagcgctaaatactttgcttcaccctgaaggatgtgtgggtaatggagaaggttcatatgatcttatgggtagatcaaattatgaagctaagaacacatctgaagatttcccaagtttcagttatggtttaaactcggattcaatcaatttaaataactatcactatagcagcgatgaaatgaataatctagagccagaatctgaatctgaatttcaagtaatggaatattttgcaaatttctataataaaatcgcacccatactgtttggtccattaatcaagaaggatatcacaacggaaatggcagaaatagatgggcaaatagaaaaggttacaaaagacgatcttttgttaattcatttagtaaaattggtatcatttgtttgcactgagcatgatcgtgtcttatccagaagattcgtattagaaaacggtatactagattctgttagcaaacttatcggcggtaatcatatgatgcagctaaggttaacagcagtaagatgcattaaaaaccttatgtgtctcgatgataaatactatcatcgatatatgatttcaaaaaatttatatgcgccagtttttaaactcttccaggagaacatagataagaataatcttgcaaattcatgcattcaagattttttccgcattattataacagaatgtagagcttatcaaaatgatggccataacaggaaggaaaaaaccaatggttcttatgatggcaacggtaatgacgtcaaaacgaacgtgaacaacaataggacaaactttaccattttaaacaaatacttagttcaaacatatggtgatgtcttgagaaaagctactgatatccctttcatccaggatatgctagaaaccggggaagaaaaccaacccgatcattctagctttgaaaatagcattgaaggggggaatgacatttctgtaaatatgtcaacagatggatttgcttcgaatcatttagaagatattgacattaaaaacgtcaaaagattacattctgagattgaacactttgaaaatgacccccattattctggtgatcagttagcatttaaaaaaagcgttgaccaaatgaatgcaagtacttga

SEQ ID NO: 78253 - DNA, 741 bp, Saccharomyces pastorianus
atgtctacgttgaaagttgtttcatcaaagcttgcagctgaaatcgacaaagaattgatgggtcctcaaatcggattcactctacaacagctaatggagttagctgggtttagtgtcgcgcaggctgtatgtcgccagtttccactgagaggcaagacagaaacggaaaagggcaaacatgtatttgttattgctgggccaggtaacaatggcggggatggtctcgtgtgcgcaagacatttgaagctttttggttacaaccctgttgttttctaccccaagagaagcgagcgcactgaattctacaaacagctggttcaccaattgaattttttcaaagttcctgtcctgtctcaagatgagggaaactggctggaatatttgaagccggaaaagaccttatgcattgtagatgcaatatttggttttagtttcaagcctcccatgagagagccattcaagggcattgtcgaagaactgtgcaaggtgcaaaacattatcccgattgtttcggtggacgtccccacaggttgggacgttgacaaaggtccgatctcgcagccctcaattaatcctgctgttcttgtatctctgactgtccccaagccatgcagctctcacataagggagaatcaaacaactcattacgtggggggaagattcattcctcgagatttcgccaataaattcggctttgagccatttggatatgaatccacagaccaaatattgaaactctga

SEQ ID NO: 78254 - DNA, 1605 bp, Saccharomyces pastorianus
atgcatcaccaaactaagttagatgtattcataatcagagcttataatttactgtctaacgagtctgtcattagtggtgcttccttgcagagtgttacaaactcgccacagacgacaacgaacacgccctcaggtatggttaacggggcggttggaacagggatagctaatccaacagggttgatggggtctgatagcacacctaacatcgatgagattataactagcactggtagtaatgctctgacgaaaaccaactcagatagcgctaattgtacgccgaatggtaattcaagttctacctcagccattagcaatgcaagcaatcctaccactactggtaataatgcgagctctagtgccacctcaaatggaatatatacgcaagcgcaatattctcaacttttcgccaaaatatcaaaactatataacgctacactatcatctgggtcaattgacgatagatcaacatcaccaaaatcggcaatcgaactatatcaaagatttcaacagatgattaaggaactagagctgagttttgacgcaagtccttacgcaaaatacttccgccggttggatggaaggctttggcaaataaagacagactcagaattagaaaacgatgaattgtggcgattagtctcaatgagcatatttacagtattcgatcctcagaccggccaaattctaactcaaggacgcaggaagggaaactccttaaatacatcaactaaaggctccccatcagatttacagggaataaacaacgggaacaataatgggaacaatggtaatattggaaatgggagtaatattaagaactatggaaataaaaacatgtcaaacaaccgaacgaaaaaaagaggcaccagggtggctaaaaatgctaaaaatgggaaaaacaataaaaatagtaataaagagagaaacggcattacagatacgagcgcattcagtaatacaacaataagcaacccaggtaccaatatgctttttgatccatcattgtctcaacaattacaaaaacgactgcaaacgctatcacaagatgtcaattctcgttcgttgacaggatattatacacagccaaccagtcctggctcaggaggatttgaatttggtttgagtcatgcagatctgaaccccaatgcttccagtaataccatgggctataatacaatgtccaataatggatcccattcatggaaacgaaggtcactgggatcgttagatgttaatacgctggatgacgaagcggtggaagaacttttggaactgacaaatacgagtaagaggcagaggccgatgacaactgcagcagagggtgcgttaataaatgatggtccggacactaatttaaacgcgaataacacccaaatgaaagttgatttaaatccttcaaacagcatgggacctatagatacagaagccgtgatacgcccattgaaagaagcttatgacgcaatcatttctgaaaaaggccaaagaattgtgcaattagaaagagaattggaattacagcgccaagagacgcagtggttaaggaaaatgttaattgaagacatgggttgtgttagaagtatgttaagggatttacaaagatga

SEQ ID NO: 78255 - DNA, 303 bp, Saccharomyces pastorianus
atgtcttttaatggaacctcaatacgggtaataacgtcatatttcttatttttcttagacaatttgtccaaaataaaattttcacgacttttctccttcaagtaccgcgacttctgcgatagttgtccgttagacataataatcattaacgcatccataaggtgcttgcggtctgtatttgactttcttcacattcttacgcctagactgaatgggaaaacaaccaagaaaccaaaaaggaacctgagaacacaaagagtatttgacgaaaagttacactcacataatgcatcaccaaactaa

SEQ ID NO: 78256 - DNA, 897 bp, Saccharomyces pastorianus
atgatgaataaagtagatcaaatcatcggttacaaaaagtacgaagtgaaactaccaaaagatcgacaagtaaagaaaaataaatcaaaaggtggaaatgttgatcaaatagatactaagagggaaaaggataaaatgagagcttttggtgaagaaaggaaaaagttcttagataaaatggctaaaaacaaaaaaaaaaatacaagtagaaaagatagagagaagccaaaagaagtagaaaaagaaaactacaaaagagaagacaaaaggctaaaagaacagaaaaaattatcactggcaaaagaatttcgtttcaaagaaccgaattcagaagccattaatcagaacacagcagctgaaaatggtaaacctaaaccacagactggactagattttgacatagaccatcaaaccgtgtccaagatcatgatagatcaggctattcaaacatctagtcctcttaatgtccaactcacggaacttttcaatgataacgtcctcgacgtctcgaaagatagtcagtttgtccttcaagacatggagttcacctcctgggaacgacgctggtcaaactgcagcacgaccagtaatgcgactacggtctcatcagttcctgatcccaaatataatatcaactacaacgacataacctccttcaattcagtagcgctaattaccgaagatcttaacatatctgcatcatctaatggtctgcatgagagaggtaaaaagctactgcagcaagagatggaatactcaaacaaggtcaaaaatgtcaccatcgggcttgaaagattgtgtatggatgaaaaaccagtcccagatgcaggaataaccatgcaacaagcgtcgcgctggtcagaattccccacttgttgcgatcaagctgctatttag

SEQ ID NO: 78257 - DNA, 906 bp, Saccharomyces pastorianus
atgtcctacaaaaagtttgtgtactttattaaccttttctttctactaggggctacattgttgactttttttctgatactagcaggtggcaggaccacaggagtgttgaagaatttttattggtttcaggcatccacttcgggctttaactcggcgccctccgtaaccagatggtacaattataactggtgcggctgggaaagccgcggaatagcagtcaactgctcttctaagatggcagctcagccgttttcaccaagggacaactttggcagttcccccctcatgccctcaacttttttaaacaacagaaatgcctactattatctttcaagagtgggctgggcaatgcttctaatcgggcttttctttttgttaatcacgttagtttcggttattgccagtttaatcagatacaatagacgtaccgccgctctggcaactgcaatgagctggatcacgcttttcttcataaccctatccgcttgtctgtacacaggatgttacgctaaggcagtaaaggcgtttcaccatgagaatcgtgatgctagactaggtcccaagaattttgggcttatttggaccacagtatttttgttaattgtaaacgccatttgctgtactatcatggtggctactcataaaagaaacgagtacatctatgaccgcagtttcgcttctaccaagacagtggactcacaaactccaactccagttccaacaaatggaggaataccttcctcggtgcctgtaactgaggtccaacaatctcaatcccaccagaatcataggttctttaagaaattgagaacgaaaaagagaactgtgactagcgcaggcgatgaaccagaccgggttcaagaggaacgcgtctatactgaacagaatgttcctgttgtatcatag

SEQ ID NO: 78258 - DNA, 1677 bp, Saccharomyces pastorianus
atgggacctccgaaaaatttcaagcatttcagtaagagtaataaacacaaaaaggagcagaaagccctgattactcaagaagatttctacctggcagcgatcgactgtgaagaacaagcagaccgttggttgctatcggacataaagaaatgtttgcggttctatctaaaggctctagagcactacgaaaatggtctgactgctttagattccacgcaggaagggaaatataatatctattataatgaaacaaggctttttttgcaaatttatacagattatctggccaataacggctacattaatatcttgcaatacgtgaaaatggatgatatgcctgatctttccaatttggtgttatctctgccacagattatccaacggtttgaaattgtttatgagactttcccagaacagagaacttgggatcttcaattcaatctattgacatgttatttgactctcatagagtccctagacgacaccgtttcgcccaccgttgcaatggaaggtgcagacattttaactttgactaacaagtatattgaaatctttcaacacctggttaattatctgttacaagaactacaaaactggagtgaaaatgcagaacaagattccgatgacacagatacggaattgcaaagagatactttggatgaagacgcgatgcaagttaccagagacggaagtggtatccgaaccaatggacctgtacaacctccagcagaagttatggacgtttctgaacaagtgactccgtcttcacttaccgaagtactcgccaactctttaaagttcaaccatgctttgatggaattggttattgagtcgaaaatatctaatgaaaaaaatgtcgaaacgaaaatcttgaatcctattcagattaatttcttggaagatacaaccaataaattctatttacaactatgcgacattatagactccatttccgccgccattccattagatttgaaggaaatcggtttagccaagactttaattgaaggtttgaacatcattagctccggaaccttcgagtcattgcaagattttgttctgcaaaccgcctcctttaccgatctgcttgatgaaaaagatgtacagggtaagattgatctttcgttgattagagttgatatcgttgaatttgccattctatgtttaaacgattattcttcagatgcatcttggaaactctctgggttattgaccaaagttcttacagaggctagaactttattaacagactatagaaatcaaatcttgtttctgaaaaatcagacattgaacgaacaattgagtcacgtagtttttcaactttgtgatgtcttagtaaattcctccgataatgaactgagaaggtacgctataaaagaatcaactgaaaagtcacaaaaaacccccgggggagcgcatactttaaacatattgatgaaaaacgctaacgtttttctgaataatgctgtcgctatctcatcaaaacagtgcgggttacaagaaacgattattgataaactgaagaggaactatatccataatcaagccaaggaaagactacttttcttacagaggctggaacagaagtcaaatgaggatgacggtacttctgcttcgcctaccgcaatgacgttcgatatgccaccagaacaccctttttatagccactatcggtag

SEQ ID NO: 78259 - DNA, 1074 bp, Saccharomyces pastorianus
atgtgcagattcttgattttcaaaggcaaacaaccgattcggctatctcatcttttaacaagaccagctcattctatcataaaccaatcatttgatagcagattacggctagacagaagaaggccaatgaatggtgatggttttggtgtcgcttactatccattggataccgagttaagcgaggacggtccatgccttttcaaagctattactcccgcatggaacaaccaaaatttgagtacattagcagaaaaaactaaatctgatctggtctttgcgcacgtaagagcttctacatatggtgtcctatctgagaccaattgccatccgtttacataccacagcttatgttttatgcataatggcggtatatctaatttcaaaggaatcaagagaaaattattgaatcatatcaaggacgaatacctgaattttattcaagggagcacagactccgagtgcgcatttgcattattcttagacactttagacaaattgggttacgacccaaagaagcaggacggcgatttcggtaatgttgcactgagaaaggcaatgttacgaacgattgactacatcagagattggactaaagaagcgaacaaggacgaggcacatgtggaaccatctctcttaaattttgctgtaactgacggatccaccgttgttgtttccaggtatataacttcaaagacggacgaggcagcatctttgcatttcagttgtggttccagctttgtagaaacttcaccaggagaatacagagtagaaaggttggatagaaaccaagatgtaattatggttgcatcggaacctttgactttcgaaagaggtgattggactgcagtacccaccaacagcatattgaccattaagaaacagacaatattactacaccctattatcgatgagtactaccaagaagatccgttatacctaagaagttcaaccctcgcagaaagcaaggggctcatgggttctataccactagcaaaagccgtagaaaagaacgttcctccactagaaagagagggccgtacgagacctccaaccgctgtcgcacatatagcatga

SEQ ID NO: 78260 - DNA, 615 bp, Saccharomyces pastorianus
atgaagttctcttctgttactgctattactctagccaccgttgccaccgttgccactgctaagaagggtgaacatgatttcactaccactttaactttgtcatcggacggtagtttaactactaccacctctactcataccactcacaagtatggtaagttcaacaagacttccaagtccaagaccccaaaccacactggtactcacaagtacggtaagttcaacaagacctccaagtctaagactccaaaccataccggtactcacaagtatggtaagttcaacaagacttccaagtccaagactccaaaccataccggtactcacaagtacggtaagttcaacaagacctccaaatccaagactccaaaccacactggtacccacaagtatggtaagttcaacaagacttccaagtctaagactccagagcataccggtactcacaagtatggtaagttcaacaaaaccaaacatgacactaccacttatggtcctggtgaaaaggcccgtaagaacaatgccgcccctggtccatctaatttcaactccataaaattgtttggtgtcaccgctggtagtgctgccgtagccggtgccttattactattataa

SEQ ID NO: 78261 - DNA, 1302 bp, Saccharomyces pastorianus
atgaatgtaacttctccaaaagatgggaatcacagtttctcgaagaaaaatagatttactacaaataaaccgcgattccacaaactaaatgagcaggcgcagagtataaatttaccagaagaccgcgattcaattgtttcaagtaatacaacgtcaattatgacagatgatgcatttgattacaatgagggcattgcatcgcgtaccaaaaatattaattctgatagtgatagaagcaatgataccataaaacaaaacaactacaataaaagggagaccggatataaccctttctacaatggatcagggatcaatcagcgatatacacagtttcgaaaaagagagtttgaaccaacacttgcagaaaacaaagccgaagagtacatatcggacgaagataatgtaaaaattgatgaagataatatagagaacgaactccagtttacgccgaaaattaaagaggctagtatactccgatctagtttactaggacaaagaaatgttttaaatactcggaatccaatatcaaaagaatcacacattaaagtaaaacctatcatcaataacaagagctcctcacaaagaaaatctagtgcagcacttcggaaacaattaggaaaacccctaccgctgccgtatttgaatagccctaatagtgatagtacacccacattacagagaaaagaagaagtattcacagacgaagtggttcaaaaaaagagagaattgattgagtctaaatggcatagacttctctttcatgacaaaaaaatggtggaaaaaaagctagaaagtttaagagaatacgaaaggaaaagaatgcctccacgaggaactgatgtttctagctctgagcaggacaattctttcaaaatatcgacgccaacaaaatcgtatgtttctttggagcaaaaacccttaccaaatctctctgctataaataactttaatgatgttaccgacaataaggagaaagaagaaacgaacaacaatatactaaagttccaagcgcaacgagatccattacaaatactacagtctgagatcgaaatgcatactaagaaacttgacacgataatagagttactaaaagacgatacagattcaaaggaaaaaaggaaagtagtaactaatgacaacgcagcgcctgaacaaatggtcaacaaaggatggcggaaaaacgtgatgatgatctataaaaaatcaggaaatattatgaaaaagtatagggaatatttcttatggacaatttgtattttaatattgttatattgcaatatatatgtgtattataggttctaa

SEQ ID NO: 78262 - DNA, 2319 bp, Saccharomyces pastorianus
atgaccactcaagaatcgatcaaacctttggtagatagaatcctatcaaatcccctgcagttcaatgctgcaatgatctctaacaaatcgaataataatgatacttccgccgcgccggaaaatagctcgtatattgtgataggaaaacagcataataacaatagtaatagcacagctattgctgcaacggccgaatccaagcaaataaaagaaaataacttgatagacaggccaaacggaaagaaaaccaacactgttcctaaatctatggctgaagctttattgttgtatacttctaaaaatgataaagatgctgcagatactactggtgccaagaagtcagcggagctttctacggagctttctacggagcctccttcctcttcttcggaagatgacaaagtaggaaaagaggaagaggaagagggtgaaatatttcatgaggcaagagactatgtagaaccccgaaaagctattttgaaggaacgcgacaacgcagataagggcgatggtgaagacattggtgaaaacttgggttctccattagcaaccattgatgattcatctaatgagaatgaaaaggaaaaaagaaaggaactgtctacaagcgttagcagtgatgacgaaatagaagacgacgaggatgaggatgacatggattatgattctagtgctatggaaaaagagctccctgaagaagaggagaacgattccagctccaaaatttctgaaggcgaaaaaaagagtttatatcaagatttaatggaaaatagtacagtggaagtaaatcggtacgaaccagtaaacaacaccaaagaaaatggaaacaggaatccaaagggagaggaggaggaagaagaggaagaagagctgaaacataaatctaggtcaatcacccctccgattacaatatcaaacctatcaaacttttaccaattcaatgaaaatatcaatgatcgtggttctttaaactctactagaattgttaaaaattggggcgacaaattcaccaatttgaagcctcgtggccttttgaatcatggtgttacttgttacacaaatgctgctgtacaggctatgttacacattccttcgatacaacattatctttttgatatactaatggggaaatacgatagcaccatctcaaaaaattctgtttcctatactttagctgaaacaagtaaaaaaatgtggttaccggtctcaaaaaaccctagaaagaacgtttcagcttcctacatcaatccaaaacatttgatttccagattggatgacattaattgtatgatgagcgaatggcagcaggaagattcacatgagtacttcatgtctctgatgtcaagattacaggaagattctgttcccaagggtcataaacttatagaatcgataatatatgacatattcggtggtcttttaaagcagatcgttacttgcaaatcttgtggcagtatatctaaaacagaacaaccattttacgatttatcgttgcacttgaaagggaagaaaaaacttgatccaaattctgacctgtcgagtgatagcattaacggcacttcagtcaccacttctaccactacctccaatgctgccacaaaaccatctctttcatcctcttcatctgtcaatttaaacaatggctcaccatttgccgctgccagtgatttaagttcagccaaccgcagattttctattgaaaaatcaattaaagatttcttcaatcccgaattaatcaaggttgacaaggagcaaaagggttacgtttgtgagaagtgtcacaagaccacgaacgccgtgaaacatagttcaatattaagggctcctgaaactttacttgtgcatctgaaaaaattcagattcaatggcacgtcctcatcaaaaatgaagcaagctgtttcttatcctatgtttttagatttgacggaatattgtgagagtaaagagctacctgtcaaataccaactattaagcgtggtggttcatgagggccgttccctttcttcaggtcactacattgcccactgcaagcaaccagacggtagctgggccacttacgacgacgagtatattaatataatatctgaaagggacgtattaaaggaacccaacgcatattatctcctatacacgaggctaactccaaaatcggttccattgccattggcgaaatctgccatggccactggtaatgttacctctaaatccaaacaggaacaggctgttaacgaaccaaataaccgcccattgaagattaatagcaagaaaaataacagaaaaaaatggaaaaaaaataaaaaaaggaagttcaccaaatga

SEQ ID NO: 78263 - DNA, 477 bp, Saccharomyces pastorianus
atgtcacaggcagcaaaaaacgtgatagtaaagctaatagtaggagcaggccaagcggcaccatcacctcccgtggggcccgcattgggctccaagggtataaaagccattgacttttgtaaggaatttaatgcaagatcagcaaactatcagccaggtgtaccagttccagtattaatcacaataaaacctgatagaacatttacgtttgaaatgaaatctccaccaaccggatatttgctgctaaaagctcttaaaatggacaagggacatggacaaccgaatgtggggacaatgttaggcagtgcacctgcgaagggaccaacccgtgctttaggagagttatcgctgaagcacgtttacgaaatagccaagataaaaaagagtgatgaaaggcatagtttgttggagatggaaggtattgttaaatcaatagttggcgttgcaaaaagtatgggtattaaggttgtaccttga

SEQ ID NO: 78264 - DNA, 2373 bp, Saccharomyces pastorianus
atgtcttcattaactcgattgctacaggaaaaacgaaaaaatgaaacttcgaactcatcaccgagaacttctgctgatacgttgaccacgacgcccgagtcacaatcgcttgaccttcactctaggaataagagtagtagtcatattggtagcgtgagtaatagcagcagtagtgatcgtaatagggctaacgtgccagttcctggcagtgtcacaactgttactcaaatatactcagaggaagattcatcatcaacagctggttcctctctcgacgataggaatcagttttcctccagcttccttaatgcaaactttgctcacactgcatcattctacggcacaagtgcacaaagtagagatagatttggatccttaataaacgatcaaggtactgcaggactttcctcacatggtggttcttttgctgcacagaacagaatcacaagtagattatctgccacgtcacatacttcaggaagggccattccttctttatcatcaagtataccttactccgtgccaaattctaacaaagataacaatagctcgaatagcaacagctcctctttgtcttcttcatggctcgaaacatatgcaggcggtatgcccaataatatttctgcaatcgattcaaatgttatatcctctccaaaagtagatagcgtggaaccacgttttgttatctccaaacaaaaactccaaaaagcatcgatggatagtaataatgcaaatgccactcaatcaagatctatatcccgttcaggttcattctcttcacagcttgggaattttttcttttccaaaaagtcaaaagaatcttcaaatcctaactctgcaggcatgtctttttctgccaattccaatggtccttctccaaacattaagaatcccaatgttaccaatggttcgacgcctatcccgaggcctatccgcgcaagacaaagcagcatatattctgcatcaagacagccaactggttcctatactgataacttttacggttccccctcatctgtacatgaccacttacctccaagtcaaagtgttccaaggtcacaacattcttccatcggtgatttaaagaggttcttcaaaaaaagttctaacagtaacctttcctcgaatagtaacaacgtgatcccgaacggatcacctctttctagcggaattgctgttccgtcacactctcattcatcgtctcattttgccgcagggaataactcatattccactagttataacggaaatggagatactatttattctcatagtcacggcggttcaggaattccgttctcaataaggtacatcaaaaccggtgccgatttaggcgctggagcaggaggttctgtcaaattagctcaaagaatttcagataacaaaatatttgcagtgaaggagtttagaactaaatttgaaaatgaatccaaaagagattatgtcaagaaaattacatcagaatactgtattggtacaactttgaatcatcccaatatcattgaaacaattgaaatcgtgtatgaaaatgatagaattctccaagttatggaatattgtgaatacgatttatttgctattgtaatgagtaataaaatgtcctatgaagagatttgttgttgcttcaaacaaatacttactggtgtacaatatttgcatagtatcggcttagctcatagagatctaaagctagataattgtgttataaacgaaaaaggtattgtaaaattaatcgattttggtgctgctgtggtattttcatatccattttcaaaaaatcttgtggaagcaagtggaattgttggaagtgatccatatttagcacctgaagtctgtatatttgcgaagtatgacccacgtcccgtagatatttggtcttctgcaatcatttttgcatgtatgatactgaagaaatttccatggaaaattccgaaattaagggacaattcattcaaactattttgttccggacgtgattgcgactccttaagtagcttggttacaagaactcctgatccaccttcctacgatgaatcgcactcaacagaaaagaaaaaacccgaaagctcttccaataatgtatcagatcctaataatgttaatatcgggccacaaagattgttgcactcattaccagaagagactcagcatattgttggacgcatgattgatttggcacccgcatgcagaggaaatatcgaagaaatcatggaagatccttggatccgtagcattgatatgtgccacttggttgaagatggattatcgttcaaagtggttagaggagaagaccatcatcacacacaagtggatcaaagtgaagcacatattgcaggcctagaaaagaaaaagaaaaagcaaaataatcaataa

SEQ ID NO: 78265 - DNA, 1668 bp, Saccharomyces pastorianus
atggatgagcaagttatttttacaacaaatacctcaggaacaatagcttctgtacactcatttgaacagataaatttgaggcaatgctccactcaatcaagaaatagctgtgttcaagtaggaaataaatacctttttattgctcaagcacaaaaagcattaatcaatgtctacaatctgtcaggttctttcaaaagagaatctgttgaacagcgcttaccattacctgaaatcctaaaatgtctggaagtagttgaaaataatggtgtgcagtatgatagaattcaaggtgttaatcataatttaccagagttcaatcttccgtaccttttacttggctccaccgaatcgggtaaattgtacatatgggagttgaattcagggattttattgaacgtgaagcctatggctcattaccaaagtatcaccaagattaagtctattttaaacggcaagtatattattacttctggtaacgattcgagagttattatatggcaaactgttgacttggtatcagcgtccaatgatgatcctaagcctttatgtatccttcacgatcatactctacccgtgacagatttccaagtttcttctagtcaaggaaaattcttatcatgtactgatacgaaactcttcacagtatctcaagatgctaccattagatgctatgatttgagtttaataggcagcaaaaagaagcagaaggcaaacgaaaatgacgttagtattggtaagaccccagtattgcttgcgacatttacaactccttattctatcaaatccattgtactggatcctgccgacagagcatgctatattggtactgcggaaggttgtttttcattgaatttattttataaactaaagggtaatgctatcattaatctgctacagtccgccggagtaaacacagttcaaaaaggtagggttttttccctagtgcaacgtaactcactaactggcggcgaaaatgaagatttggatgcactatatgcaatgggccaacttgtctgtgagaatgtcctaaattcaaatgtgtcatgcctagaaatatcaatggatggtacattattattgatcggtgatacggaggggaaagtttctattgcggaaatttactcaaaacaaatcattagaactatccagactttaactacatcacaggattcagttggagaagtgaccaatctcttaaccaacccttacaggctcgaacgtggaaatttacttttggaaggagaatccaaaggcaaacaacctagtaataataatggtcacaattttatgaagataccaaacttacaaagagttatctttgatggtaaaaacaaaggccatttacacgatatttggtatcagataggagaaccagaagcagagacagatcctaacctcgcattaccacttaacgactttaatgcctatttggagcaggtcaaaacgcaagaatcgatattttcacatatcggtaaggtgtcaagcgatgtgaaagtgattgacaataaaatcgacgccacttcatctttagacagcaatgccgctaaagatgaggaaattacagaacttaagaccaacatagaagcattaactcatgcctacaaggagttacgtgacatgcacgaaaagctgtacgaggaacaccaacagatgcttgacaagcaataa

SEQ ID NO: 78266 - DNA, 1224 bp, Saccharomyces pastorianus
atgcctttgaatattattgggacggctctcctagacgggactgacaagattccttactatcaaacaattaaaaaggtggcaccttatgtgctagcggctggtgccattaaatattggtcgagagggccatcaaatacatgggaaagaaagttgcacggtaaagtttacttggttactggcgctacctctcaaggaatgggaacatccgtggcttataaaatggcagagttaggtgcacaattaatcatcttgactagggaagtagatgaatgggttactgaatggtgcgaagaattacgtgaaaagacaaagaacgagttgatttttgtagaaaaatgtgatttgagcaatttgtgggagattcgtaagtttgccacaagttggttagacaattcgccacctagaagattagatggcattattgtcatgtccggtgatatggaaccatggggtatcccgaaaatatctttgccacagaggagatcatctaaggatgggctggaattgcaaattgctacaaactatgtagcaattttccatcttctaaacttattacagcctagtttcaaggctcaaccgcctgatagagatgtaagaataattcttgccacctgctggttacaagttgttggtgatattaatatagaagatccgttgtggcaaaatgccaaatacaaaagcgccttgaagtttttcgcaagcagcaagctacaattgggattgagtatgatggaattgcaaagaagacttaccgaagacataaaaaaccaaaagacgaatggcgctgaaagaacaggaaaaaatgttaccattactatggttcaacctggaactatgagatcaaatagcctacgccgcgtcattagtaatggttcggtggtattgttaataatactttactgtattctgttgtaccccatattgtggctgtttatcaagagtggtcgtcgtggtgatcaaagtttcttgtacgctttaatgacaccggaattggaggaagtaaacttaaaagacacgaaggttaagtatatctcagactgttcaattgtgaaatttgctcgtaaagaatttgatgacgaggaattacagaagaaactatttgataatacggaaagagatattttacaattggaaaagaaagtcgcggcaaagagaaatgccaataagaccgggaatcaaaattctaaaaagaagagtcagaacaagagtagaaaagatgattag

SEQ ID NO: 78267 - DNA, 723 bp, Saccharomyces pastorianus
atggtcgctttaatctctaagaaaagaaagctagtcgctgacggtgtcttctacgctgaattgaacgaattcttcaccagagaattagctgaagaaggttactccggtgttgaagtccgtgtcactccaaccaagaccgaagttatcatcagagctaccagaactcaagatgttttgggtgaaaacggtagaagaatcaacgaattaactttgttggttcaaaagagattcaagtacgctccaggtactattgtcttatatgccgaaagagttcaagaccgtggtttgtccgctgtcgctcaagctgaatctatgaaattcaaattgttgaacggtttggctatcagaagagctgcttacggtgtcgtcagatacgttatggaatctggtgctaagggttgtgaagttgtcgtttccggtaaactaagagctgccagagctaaggctatgaaatttgctgacggtttcttgattcactctggtcaaccagtcaacgacttcattgacactgctactagacacgtcttgatgagacaaggtgttttgggtatcaaagttaagatcatgagagacccagctaagagcagaactggtccaaaggctttgccagatgctgtcaccatcattgaaccaaaagaagaagaaccaattcttgctccatctgtcaaggactacagaccagctgaagaaactgaagctcaagctgaaccagttgaagcttag

SEQ ID NO: 78268 - DNA, 1212 bp, Saccharomyces pastorianus
  modified_base (949)..(993): a, c, g, t, unknown, or other
atgtcagaaacagaactgtcgaaagaagatgctgttacaaaaaaggataacgaggaacaagtcaagaaggctttactcgatccaacaaaaaagagaaaagctgaagatgaaattgagattgacctgaaaagctccattcccctatcaaaaaaacagaaacgtctcttgagaagaggcaaagttactctagaggagttgaacgcgaagtacaatatcgaccctaagtcaatcgaggaatacaaagaagatgctgaaaagaaaaagtctggtgcttctgagaaagatgcccagggtgaagaatctacaagcaacactccaacaggagatgaatctggcgaggttgtaaaaaagaagaagaaagatgaaaataaatatggtgtttggattggtaacttatccttcgacaccacaaaggacgatttagtaagattttttattgctaaaacaaaagacaacgaggatgaaaagagcagagtcaccgaacaagacataaccaggttatccatgcctcgtgttgctgccaagaactctaacgccatgaaaaataagggattttgctacatgtttttcaagaacgtcgagcagatgaaagcggtcttagaattatctgaatctcatttaaacggaaggaatatgctaatcaaggactccgaaaattattcaggtaggccagacaaggacgatttagttgctatgtccaaaaatccaccgtcaaggattctatttgtcggtaatttgtcattcgatgtcacagatgatctgttaagaaaacacttccaacattgcggtgatatcgtgaaaatccgcatggcaacattcgaagatagcggtaaatgtaaaggattcgcatttatcgacttcaagaatgaagaaggatctactaatgcattaaaggataaaagttgtagaaaaattgccggaaggccattgcgaatggaatacggtgagnnnnnnnnnnnnnnnnnnnnnnnnnnnnnnnnnnnnnnnnnnnnnagaaacaattcctcatcatttgatatctctaacaacaaaggatacgatcgtgcgggacaggataacggcagcaaacccgaatacaagcggtccaacgccaacagacgtccacctgtagattccaataaccgaactaagagcagtgtagctttagccactgctcagagaggttctgcagctattgtcccatcacaaggtaagaaagtgaagtttgactaa

SEQ ID NO: 78269 - DNA, 573 bp, Saccharomyces pastorianus
atggcgttagagttcttggcagcaacacgaggcatggataacctggttatgtcttgttcggtgactctgctcttttcatcctcgttgtcttttgttttagcaataaaaaatcttactaaatcgtcctttgtggtgtcgaaggataagttaccaatccaaacaccatatttattttcatctttcttcttcttttttacaacctcgccagattcatctcctgttggagtgttgcttgtagattcttcaccctgggcatctttctcagaagcaccagactttttcttttcagcatcttctttgtattcctcgattgacttagggtcgatattgtacttcgcgttcaactcctctagagtaactttgcctcttctcaagagacgtttctgtttttttgataggggaatggagcttttcaggtcaatctcaatttcatcttcagcttttctcttttttgttggatcgagtaaagccttcttgacttgttcctcgttatccttttttgtaacagcatcttctttcgacagttctgtttctgacattctatctcaaattatagaaagttgttgggtttag

SEQ ID NO: 78270 - DNA, 369 bp, Saccharomyces pastorianus
atgtcatgtacccctttcataaaccaagttatacacaaagattacaccttaccccagttttggaaccttttaaagctagtcttaggtacccaaataaatattcttgagttttgcattattcatcatgtggtccaaagcttttgtaccacaattcgagttggcaatccaaaatatctccactgtttttatctgaacacagcaaacctaaattataagattctgaatctgttaatgctgtattatttcctgcactcaaaagagtatcgagttctaccattgtcaaatcttgaatacccaaactttcaaccagttgcgaagaggtggtatttccttgttcattttttaggtttaatcttgaataatttttag

SEQ ID NO: 78271 - DNA, 396 bp, Saccharomyces pastorianus
atgaaaggggtacatgacatggctaaaattcttcagacgaacatctttaatctaaagtttacatctaacaagtccaatctgaaaaatgtacagcgtataattttacatacctccaaaagaagaattaaatcaaagtgtgcagataatactatatacagcaaaataaatgctaactttacatatgattgctttcattttaaatcattctttccaattatgcctaatttctgtcccatcttaaccttatcaccaaccctaacatcgaatttaaattcggtgggagcttcaaaacaaagtacaacagtgctacccaattcaaagccacccatttcttcacccttaaccaaaggcatccctcccaatattttacttgcattctcatatactgcctggtag

SEQ ID NO: 78272 - DNA, 1506 bp, Saccharomyces pastorianus
atgtcaattatgccagttaagaacgccttggcgcaagggaggacgctcctcatggggaggatgcctgctgtaaagttttctacaagaatgcaattaagaaatagaactgcggtgctatggaatagaaagttttccacgcgtcttttcgttcagcaacgacgcagttctggagagattgtggatcgtgccaaagctgctgctgcaaatagcggaagaaaacaggtctccatgaaatgggttgttttaactagtttcaccattgttctaggaaccattttactagtgtcaaggaatgatagtacagaggaggaagatgctacagagggcaaaaaagggagaaggacaagaaaaatcaaaatatttaacaataattggctctttttctgctattctactttaccgctgaatgcgatgtctcgattatggggccaagtaaattctcttacgttacccatttgggttagaccatggggttacaggttatattctttcctttttggagttaacttggacgagatggaagatcctgatttgacacattatgcaaatttatccgaatttttctatcgtaacataaaaccaggcacacgtccagtggcacaaggcgaagacgttatagcttctccaagtgatggaaagattttacaagttggtataattaactctgaaactggcgaaatcgaacaagtcaagggaatgacatattccatcaaagaatttcttggcactcactcccaccccttgatgtctaagagtgcatctagtctagatttgacttctgatgaggaaaagcatagagaattcgccagggtaaatagaatacaattagcgggttccgaagacactgaacagcctcttcttaacttcaaaaacgagggcgatcaatctgttcaagagttcaaaccaagtgtgtccaaaaatatacatcttttaagtcaactttctttaaactacttctctaatgggttttcgtgctctgagcctcatgatacggaacttttctttgccgtcatttatttggctcccggtgattaccatcatttccactctccagttgactgggtttgtaaggttcgccgccatttcccaggtgatttattctccgtggcaccttatttccagcgtaacttccctaatcttttcgttctaaatgaaagagttgctttgttgggtagttggaagtacggattttttagcatgactcctgttggtgcaacaaatgttggttcaatcaagttgaattttgatcaagaatttgtgacaaattcaaagagcgacaaacacttggaaccacatacctgctaccaggcagtatatgagaatgcaagtaaaatattgggagggatgcctttggttaagggtgaagaaatgggtggctttgaattgggtagcactgttgtactttgttttgaagctcccaccgaatttaaattcgatgttagggttggtgataaggttaagatgggacagaaattaggcataattggaaagaatgatttaaaatga

SEQ ID NO: 78273 - DNA, 780 bp, Saccharomyces pastorianus
atgagctacaattatctgaaggcagctagaaaaattatatgcattgggcgtaattacgcagcgcatatcaaagagctgaacaattcaactccaaaacaaccgttttttttcctaaaaccaacctcgagtattgtgacaccattgtcttcatcattggtcaagaccactagacctgcaaactcgactttcaatggtttaaatgaagacggaactaacccagggcccatttttatcccacgcggtgtgaaggttcatcacgaaattgagttggcattgattgtgagcaaacatttgtccaatgtcactaagatgaaacccgaagaagtctatgactctattagtggtgtagctctagcattggatcttacagcaagaaatgtccaagatgaagccaaaaagaaggggctaccttggacaataagcaagggttttgacaccttcatgccaatctctgctatagtctcccgcgagaagttctcatcctacaaatcaaacttacaggatattttcagagtcaagtgctctgttaacggacagttgagacaagatggtggtactaacctcatgttgcacccactccataaaatactgcaacacatatctaccatgatatctctggaaccgggtgatatcattttgactggtacgcctgcaggtgtaggcgagttaaagcctggtgaccatgttcactgtgagctattgcagaataatgacaatattgtcgacatgaacttcgaatgtgaaaatcggccaggaccatatgaatttagagaaacataa

SEQ ID NO: 78274 - DNA, 1347 bp, Saccharomyces pastorianus
atgggcttggaccaggacaagataaagaagaggctctctcaaatagagatagatatcaaccagatgaaccagatgattgacgaaaatttacaattagttgaacctgcggaggacgaagctgtcgaagataatgtcaaggatacgggtgtggtcgacgctgtaaaggtggcagaaacggctctttttagtggcaatgatggagcggatagtaacccaggagattcagctcaggttgaagagcacaaaaccgcacaggttcatattcccactgagaatgaagcgaataagagtacggatgacccatcccagctatcggttactcaacctgttatagcgaaagagcagataactcacaccgccattgctattggtgactcctataattcatttgtcgcaaattccgctggaaatgaaaaggcaaaggactcccgcactgagaacaaagaagatggtacagtcaatatagatcaaaacaggggtgaagctgatgttgaaactatcgaaaataatgatgatgaatgggaggatgaaaaatcggatgttgaagaggggcgcgtagataagggaacagaggaaaacagtgagattgaatctttcaaatcacccatgccccagaataacaccttgggtggtgagaacaagttagacgctgaacttgtattagacaaattttcttccgctaataaggatctagatatacaaccgcaaaccatagttgtaggaggtgacaatgaatacaaccatgagagcagccgtttagctgatcaaacaccccatgacgataattcagaaaattgtcccaatcgctctggaggaagcactcccttagattctcaaactaaaatttttatccctaaaaagaattctaaagaagatggtaccaatataagtcactttaattcagatggtgatggacagaaaaaaatggcgaatttcgagacacgacgccctacaaatccgttcagagttatctcggtgagcagcaattccaattcaagaaacggaagtcgtaagtcttcactatataagtatgattcgccagtctcctctcctatcacatcagcgtctgagctgggcagtattgccaagctggaaaaaagacacgattatttatccatgaaatgcattaagttacaaaaggaaattgactatctaaacaagatgaatgcacagggttctttatctatggaagacggaaagagactacatagagccgtagtgaagcttcaagaatatcttgacaagaaaacgaaggagaaatatgaggtcggagtgttattaagtagacatctgagaaagcaaattgatcgtggcgaaaatggccaattttggattggaactaaatga

SEQ ID NO: 78275 - DNA, 1221 bp, Saccharomyces pastorianus
atggatagagtacgctctttgattggaaatcgccggggacgcggacataatcgccaacatcctccgtatcctcacagtgggtctccatccaccgtcaatctcttgggagctaatggttatggagacgaccaatctacaatatttgcacgagaaaatgaatctctggaaacctctgccaacgagggcgatgatagtgcagatgcagctactttgaatacagcggtatcagaaggctcaacaattggagacctacaaagacagggttatgttaacagagccccaagattcacgtcagaaagagccatgccattcgtttcggtgctactacaacgagggttttttgcattccccagtgaagaatctctccagctatttttacacaacaagaggaagctcgataacattgatccaaagacgggtctaggatttcccctatttcacgccatttctttaaacctggtcaagtcgcttttcagtgatcaaaatacaccggtaatgaggatatataaatacgttatgatagactcccaatgcgataaacctccattaaactcagaagtggtctctcgaataaacgaaaatgtctccatatataaatatgaattctgcactattttaaaaaaaatggaaagccataatttttcgagcagggtagagcacgattttatatttcatagaaaagatgaacctgatgttcatatccccatgattaattacaatcaaaggaaaaatgcggatacggcaattcatggattaaatcttcgttggtacgggacaactagtttagcttcaccttttggctcaaatagcatcaacctacttgtactcgatgatacgatggcatcctacatgaaccaacaaactattgaagagtttgattcttacagccgttcccgtcccacaagaccgctgggttatctcccagtatgggccagatacacagatgataaagttagtgtcataccgaaaaaaagaactttgagagtagctaccttgtacttacaagaaactgattcgtttgatgatggctctagtttaacatctaccaattatactgaaatgggctctaatatcattgaaaatgtgccgtgggatagtcagatacttacttgcatgtgcatgctattacatgaatatgaatcaagaaaggagaaacgccacaccgcatggggcagctcgaccacatatatgctaaatggaccggcaggattactgatgtaa

SEQ ID NO: 78276 - DNA, 3327 bp, Saccharomyces pastorianus
atgcctagagtggaatcggagacttacaaacgtctgcaaaatgacccttcctgtataagaaatatatgtattgttgctcatgttgatcacggtaaaacttcactttcagattctcttttggcttcgaatggtattatatcacaaaggcttgccggcaaaattcgattcttagatgccaggcctgacgaacaactacgtggtatcacaatggaatcatcggctatctctttatattttagggtattgcgtaaacaagaaggttccgatgagcctcttgtaagcgagcatctagtaaacttaattgattccccaggtcacattgatttttcaagtgaggtcagtgcagcttcaagactatgtgatggtgctgtcgtactggttgatgtcgtagagggggtatgctcgcaaaccgtcacagtgttgagacaatgttggacggagaagctgaagcccattttagtattgaataagattgatagattgatcacagaactacaactaactccccaagaagcttatattcacttgtccaaagtcattgaacaagtcaactcagttatcgggtcctttttcgcaaacgagagacaattggatgatttattttggagggagcaattagaaaagaacgaaaacgcggaatatattgaaaaggatgattcgggtatttactttaaccctactgataacaacgttatttttgcttccgcaattgatggttggggtttcaacatcggccaattggccaaattttacgaacaaaaattaagcgctaaaagggaaaacctacagaaagttttatggggtgatttctatatggatcccaagacaaaaaaaattattaacaataaaggccttaagggacgatccctgaaaccccttttcacatcgctaatcctcgtaaatatatggaaaatttatcaaaacataatcacatcgagagattctgaaatggtcgaaaaaatagcaaaaactttaaatattaagctacttgcacgtgatctaaggtcgaaggacgataaacaattgttaagaactatcatgggtcaatggctacccgtcagcacagcagtattgttaacagttattgaaaaattaccttcacctttggaatcacaaaccgatcgtttgaacactattttggtctccgaatccgacacagcagccatggatccaagacttctgaaagccatgaagacatgtgataaagaaggaccagttagtgcatacgtatctaagatgctttcaattcctagagaagaattacctgttgaatctaagaggatagcatcttcggatgagctgatggagagaagtagaaaggcacgtgaggaagcacttaatgctgcaaaacatgctggtatggtagaaaatatggcaatgatggatttgaatgacaattctaaaaatacatcagatttatataaaagagcaaaagataccgttatgacccccgaagtaggagaacagacaaagccaaaaccttcaagaaataatgatgttttctgtgttgtttcagagccttcttccgccttggatttagagtttgaatatgagggggaggatgattcagatagtcaagataacttcggcttagattttgtaccaactgacatagatccaaatgaccctctaagttcaatgtttgaatatgaggaagaagatccacttttggagagtattaagcaaatttcagaggatgtgaacgatgaagtagatgatatttttgacgaaaaggaagaatgcttggtagcatttgcaagaatatacagtggcacactaagagttggtcaggagatttcggtattgggtccaaaatatgatccaaaatgtccagaggagcatattgaaactgcgattattacgcatttatatttgtttatgggtaaggaattggttcctttggacgtttgtccatcaggaaatatagtcggtattcgtggtctggccggtaaagttttaaagagtggtacgttgatagagaagggcgtacaaggcgtcaatctagcgggcgtcaatttccattttacgccaatcgttcgtgttgctgtggaaccagccaatcctgtggaaatgagcaagttggtacgaggattaaagttgttggatcaagcagatccttgcgtgcacacatacgttgaaaatactggtgaacacattctgtgtacggccggtgaattacatttagaaagatgcctaaaagatttaacagagagatttgcaggaatagaaattacacattctgaaccggctattccatatagggaaacatttttatcagcctcagatatgaatccaccgcagaattcacagctgggaaggggtgttcatgaactactattgagccagtacaagattacattcagaacgttcccattaagcggtaaagttacagactttttatctcaacatcaaaatagcattaaaaacattttgaagacgtccacttcaagcatggatcccgtcatagaatcaactggaagttcttttctagacaaaaagtctttcctcgttgcttttgaagaggtcataaatcaggaggagaagagcagagaactattaagtgggtttaaagtaaagttagcaggttttgggccaagtagagttgggtgcaacattttgctgtcgcaggataatcttcttggaagcctatttgaaggtactccagcagcctttgagtattcagattccatcaaaaatggcttccaactggctgttagcgaaggacctctggcaaatgagcccgtacagggaatgtgtgttcttgttgaaagcgtacataagatgtcacaagacgaaattgaatctattgaagatccgcgctaccaacaacatattgtggacttatcagggaggttgataacttctacaagggacgctatacatgaggcctttttagactggtccccaagaattatgtgggcaatttactcatgtgatattcaaacctctgtcgatgtacttggaaaagtgtatgccgttattctacagaggcatggtaaaatcatttctgaagaaatgaaagaaggtacaccgttttttcaaattgaggcacatgtgcccgttgtggaagcattcggtttaagtgaagatattcgtaaacgaacatctggtgcagcacaacctcaattggtattttccggattcgagtgtatcgatttagatccattttgggtcccaaccacagaagaagaattggaggaactaggtgatacagcagatagagagaatattgcccgtaagcatatgaatgccatcagaagaaggaaggtctattcattgaagaaaaagttgcgaaaatgcgaaaaacaagtacttgaaaagaattag

SEQ ID NO: 78277 - DNA, 219 bp, Saccharomyces pastorianus
atgtctgataagcccgactcccaagtattttgtccagattgcaatgaaagacttcaaaagtgtttaatacagcaaaattatgccattataatatgtcccagcttagtctgcggctacccattcaatcaaagagaagtactcgaaaatctaacgtatgtagacgataatgacgtcttaaaagttgcaaaaaaaagattatcttcacgaagcaaaccataa

SEQ ID NO: 78278 - DNA, 1065 bp, Saccharomyces pastorianus
atgaagttccaagttgttttatctgcccttttggcatgttcatctgccgtcgtcgcaagcccaatcgaaaacttattcaaatacagggctgttaaggcatctcacagtaagaatatcaactccactttgccggcctggaatgggtctaactctagcaatgttacctacgctaatggaacaaacagtactaccaatactactactgccgaaagcagtcaattacaaatcattgtaacaggtggtcaagtaccaatcaccaacagttctttgacccacacaaactacaccagattattcaacagttcttctgctttgaacattaccgaattgtataatgttgcccgtgttgttaacgaaacgatccaagataagtcatccgccggtgccgttgttgttaccaacgccaagtctttggaagctgtctccttcttcttctctatcatttttgacaccgaaaagcctattgttgtcactgaagatcccgcttatgccattccagtcgctaataataagaacgctaccaaacgtggtgtcttgtccgtcacttctgacaaattagtgtactccggtgtcttcactccacctactgcttgttcttacggtgctggtttgcctgttgctatcgttgatgaccaagacgaagttaaatggttcttcgatgcttctaagccaactttaatctcttctgactcgattatcagaaaggaatacagtaacttcactactccttatggtctattagaaaacggtgttccaattgttccaattgtctatgacggtggttactcttccagtttgattgactccttgagttctgccgttcaaggtttggttgttgtttcttctggttctaccaactcaacctcatctactattgaaagcactgaaatcccagtcgtatatgctcaagctaacactccattaaactttattgacaacaaagatgttccaaagaacgctgtgggtgctggttacctatccccaattaaggcccaaatcttgttgtccattgctgccgttaatggtgtcacctccaagtccgctctggaaagcattttcccatga

SEQ ID NO: 78279 - DNA, 870 bp, Saccharomyces pastorianus
atggcgaggcctcaaaatcatcgccgcagtaattggacagaaagagacgataatgatgattatctgtttcagcgatttctagaagaatcggaaacgaggcatagtagagagccttcacctgtaaccgagcaatctcagcaagaactacagcaggatgtacagcaagcaatcgatggaatatttaactcccttaggaggaatatgagttctacttcaaatataaatagagcagctaatatggatgcaaccacaaacggaaatggaggaatcaatgcagacactataagagccaccaacgccaatacggccgattccccattcacagcaaggcagcagagccctctcagaacttttcttagaaatttattcattttagattactttattgggctaattttattcccattttccgtatacaacatattaaggagcgggttcaattcaatgaccttttcagagaatgattttataatcgaaatcgtgggatactggaaatttgccaagatatttggttctggtggcacgacattaatagcatataaggatactggtaaattagggttgcttggaaagtttcataacatcattgtattttactcttcacctgtgataaaacatattatgaaaagtagagatggcaatgaacccaacttaaattggataagactaatgttcgctaaagctttcgagctatttgtcaaagtctctaccattctgatctatttagcttatggcgtgagtggtaccgtttacatggttactgctgggtttttcttcgtattgtgtctattattcactgttattagaagatataaaggtgtccatagaatgttggtgagccaaaggattacagggccaggcgtattctga

SEQ ID NO: 78280 - DNA, 597 bp, Saccharomyces pastorianus
atggtccggcctcagaatgttcactggtttatcgctacaattgtatttttcatcggatttgtacacgctaatacagaatcaatcttatataaggttcctcacaactttcccctcaaaaaaccaagagacagctctacttatgcaagagatgtaaacttgatatcttccatatcactatcgggagaagcaatgagtcagatcactatcgaggccaataccactgacttggagttgcataatactacgtatattgaactggcggacttacagcgagacgaaacatatcagattaaagtgtgttggtcagcaatacatcaaatttccattaataatctccaaactatcacaataccacgtttcactgaatttcagggaactaagtcagactacgcgagaatactagtgactttccaggtcttgtctgactcgtatcctagtgagcatgccatggttccaatacaagtctcattaatcaccactcggctaggtatccccgtggatatttacccaacattaatcgttatggtgctattagtagcagggcttgttgttacccgggcaccacacgtattgaacgatcttttgctgaaattttag

SEQ ID NO: 78281 - DNA, 507 bp, Saccharomyces pastorianus
atgtcgaatgaaaacttatctcccaatagtagtaacccagatttaactaaactgaataacggcgaaagcggaactattgataccagcaaattctcgcccaacgaaatgaagctatacaaaatgtacggaaagctgccatcaaagaaagatatttttaagcatgccatgcagaaaagaaaatatttcgacagtggtgattacgctttgcagaaagctggcattcaaaacaatgatccaataaactatggaaagaataacctgccattgacaaatcccagcaaactacgagaagatataataaaaagaaggataagcacttgtccgtcaactgcctcaaccgctggtgtagtagataatgcgacgttgatacaaaaggagggaagtatatcgagtggaccaccatcgtctaataacggtactattggaggtggtagtacaagttcaacgccagttgggaaccacagctcttcgtcgtccagtttgtataccgaatcacccattagataa

SEQ ID NO: 78282 - DNA, 900 bp, Saccharomyces pastorianus
atggccaatagaggagaaccggatccaaagaagagcaccgaatcaatctgctctctgactaaaccgcagctttattcattatatgatgatgacgtcgtgagatcggaagataacgaaatttacgaagaattgaaacgctctgtctctatagattctaccaaatatagtagagatcaaactattgattcgactttttacttggccgataaggttggcggctcgctgccaaggaacacagtatcttctaataatttggaaaggatattatcagcatcatccattcacgaaaactttccgtcaagaacgagacaaactcgtcaaaatatccttcattacctgcaagctgtattaattttgtcattgagcggtttcgcatatcatgaactgtccagaaacttgcacgataatcatctcttacatccagattttgcatcgagaccccttctactgggtgtcaaactttgtaactggctatccaatggggttctgccaaactggttaggttacggtgttgaaggactgttatttggttctgttgtaccaattctggataatatttttcaaacagaggttgttaagagctctgtccaccatgacagtttgacctctgttattagaagtatcaatgccatgttgggagtcacatttgggatcaggaaaatacagtggaactcctctttgcaggcggcaggggcatgggggcttctgaatattatactgtggttgttttttgacggctcaatatccatgttaatgagctgcatctgcattggggtgggttgttgtatctcttgctacaaagatattatcgacggttcccaatttttatatttcatggatttttatttccttggttctctaatgtttggaaaactaggaagatatctatattctcattaa

SEQ ID NO: 78283 - DNA, 1230 bp, Saccharomyces pastorianus
atgtccgaagaagtatggaatggaaaccaaggaatcctctccgtatatgtgagcaaagctagagacttgcctaatttgaataaactggacaagcaaaatgtaatgcttaggttgcgaatagctcatatgacaagagccagcaacactctacatcgagcaggtcaaaactctgttttccattatttagaaaaatttgatattactccagagataaagcctttaatgtacgtcgaagtttactgcgatagaaggaaaaaatctccgctgccaattggaagatgtgaaatagaccttttaaatgctattagagcagacccgaaggagggttattgtacctggtacgaactgaaaagaagtggggatgaatttgctggcactatattcattgagttgactttcactcccaaagtacctcgtttaaacagggacgatcttaacaaagaaatggacaggttggattcatctatggctatgaggccgataccaccattgccaacagaatcagagtatgactatgttcatggttctacgatgagacagattactccccagtgtgttagcacaagtcacgaggataaggatgagggacagccctacagaaatggcaatgttttctccatgtcatctaaatcagatacagcggtattggcaaatagtaatgacccaataattttacctccaactttttcagcatccatgggtacaacgtctacattagaaactaatgatactgctatatcaaacacttcgaatacaaaattccattttgccaatttaaggaaattaaaggagaagataaatatatttaagaatcctgatagttcaacaaacaactgccaaaatgaatctaacaaggtagatattgaggcacttcaaaaggctattggtgtaacttcgttgtcttacgacgaagatgatgacgatgacgacgaaaatgacgcattttattcttccagccatagagtctcccacaactataaccaaccgcccttacctcctataccgaccagagatgatatgtccaattattcaagttcgcgcaatacgccgttagtaagaagagatagaccctcacgcctagattcctcttcgcctaactcacatcctcatccatcaggcctgaattctccaaaactaccacctctaccgactacttcgaattccaattttaattcgaggaagaattcgatgtctcctacaagaaaaagaccacctccaaggctcagctaa

SEQ ID NO: 78284 - DNA, 756 bp, Saccharomyces pastorianus
atgagttcttataggggcggcagtagaggtggcgggagcaactatatgagcaatctacccttcggattaggttatggagatgtaggcaaaaatcatattacggaatttccatccatcccattgcccatcaatggtcctataacaaataaggaaagatctttagcagtaaagtacatcaattttggaaagactgttaaagatggcccattttataccggatcaatgagcttgataatagatcaacaggaaaacagcaagagcggtaaacgcaaacccaacataatcctagacgaagacgatactaatgatggcattgaaagatattccgataaatatttgaaaaaaaggaaaataggtatttctattgatgatcatccgtataatttgaacctctttcccaatgaattgtacaatgtaatggggatcaacaagaaaaaattattggcaatctccaagtttaataatgccgatgatgtttttactggtacaggtttacaagatgaaaacatcggactatccatgctggcaaagttaaaggagttggcagaagatgtggatgatgcgtcgacgggtgatggggcagcaaaaggaagtaaaacaggcgaaggagaagatgatgatttggcggatgatgatttcgaagaagatgaagacgaagaagatgatgatgattataatgctgaaaagtatttcaacaatggtgacgatgatgattacggtgatgaagaggatccaaatgaagaggccgccttttag

SEQ ID NO: 78285 - DNA, 408 bp, Saccharomyces pastorianus
atgatgcaagtagcaacatcggtaatggttagactattttatcagaaaactatagaaaaactaaaaacaaaacaatgtcacaatgacaaagaggaacccatacatacacagagagcctattcttccagtagttcctcaatatcagcatcactatctgggtccaacccttggtttcttctcttagcctcttccaaagcgttttcaaacaactcctgttgtcttttaactcttcttctagttttcttaccccaaccgaaagaagttgtttctgctgttgcagcatcatctggcttgtcgatcaggtcttttgatctcttttcctctttgtctcgtttgtccttttccacttgggcagccaactgcttcttcgccaattccctggatgcgatatttcttaagagtaaataa

SEQ ID NO: 78286 - DNA, 390 bp, Saccharomyces pastorianus
atgtctgaagtagcggaaacatgggtggatacctggatggcaaaactagtcaactatgactacaagcactttataagattggtgataattgtaggtggttatttactcttaagaaatatcgcatccagggaattggcgaagaagcagttggctgcccaagtggaaaaggacaaacgagacaaagaggaaaagagatcaaaagacctgatcgacaagccagatgatgctgcaacagcagaaacaacttctttcggttggggtaagaaaactagaagaagagttaaaagacaacaggagttgtttgaaaacgctttggaagaggctaagagaagaaaccaagggttggacccagatagtgatgctgatattgaggaactactggaagaatag

SEQ ID NO: 78287 - DNA, 765 bp, Saccharomyces pastorianus
atggttagagttgtcatagagagtgaattggtccgtacagaaaaggaattaccaaattcgcttaaattaaggcagttcaaggaccgattgtaccatgttaccggagtggaaccagaggatatggaaatagttgtgaaaagacagtacgacaacaaggagatatatagtactaaaaaggggggtgcctattcaaatgaggatgaagatgccaacttcctaaaaggagaggaggagcttattgtggttgttacagactctaatgcccaatcaatctctaaccagctggccacgcaagcggaaggaatcccctcaatggaagtaattagcgaggaggattatttgcgaagggatcaatccgtattacgatggaagatggctcacggctatggtaggtttaatgctgcacagcagagccagcgcgctgcgctggcaaagcaggacgaagcatatgcccgagagcaattaacggcggctatcggccgccactgtcgtgtcacagtagacgggagcgctccacgtgaggccattttacggtacgtaggaccactaccgttggacgtgatgggcacatggtgcggtgtggaattcccggaagccgcaggcaaaaacgatgggcgcataaatggggtaacactgtttgggcctgtggcgccgggtcacggatcgtttgtgcgtccgcgggctgtggaaattctatcaaaagacgaagaatccgccgaggtggaagacgtccatgatgacgtggagagcgatgatgaaatttga

SEQ ID NO: 78288 - DNA, 195 bp, Saccharomyces pastorianus
atgatctcagtttgtttcgtttttcctcattctctggctttagacttcaaatcgcggtgtaaaaaaaataggacaaaactatgtagcgcatactatgtcagtcaggtattgagaatatgtaaagaaatgccataccgtgatttgattttgttttcaactgtaaggaagggagtttatatgagattatattattaa

SEQ ID NO: 78289 - DNA, 303 bp, Saccharomyces pastorianus
atgagcaatactaagcataccacttctcatcacatggaactcaaaaggatcattatccttacacttttattcatactcataatgttgatatttcgaaactcagtgtccttcaaaatgacatttcaagaactactgccacgattttacaaaaagaattcaaactcagttagtaataataacaggccctcatctattttctcggaaaacttggtggattttgatgatgttaacatggtcgataagaccagactgtttatttttttatttttcagtttcatcattactataccgtttatggtataa

SEQ ID NO: 78290 - DNA, 117 bp, Saccharomyces pastorianus
atgcaaccgatcaccactgcttctacacaagccactcagaaggataaatcctctgaaaagaaagacaactatataatcaagggcctcttctgggatcccgcctgtgttatcgcttaa

SEQ ID NO: 78291 - DNA, 2223 bp, Saccharomyces pastorianus
atgtcctccagcatctttgaaatgacaatagaccacgacggtatggatagtacggggctgaagctttcacagacagcctcatccatatccatgggcgacgagtttctttgttccagtactactagtaattctattctggattctccgcttccgaaagtgacttttaaccatatcgatagcataacagacattaacacaaacatcatgaacgaaatagtggagccacaatccggagtagatgttgatgttgctgacaaaaacgtgctttactgcatagatccgtacccagtggaacctccgtgttatgattttgcgaatccgtctaaagtcattaggtaccctatatatgagcattgtcgtccgtgcctcacttctgtgaaacctcccagttatacaccgtctgtagaacactatactgtggtttctatgaagatggaaaaactatcgccctttgaaaatgcttcttctcgattatggaacaactttattcttcaaataaactctacgcagataaacttttattctattgacgattcattaaccaggcatattaaaaactatcgtggtggtgacatgtttgaccattcccaccattccaaaactgctagcgatcgccatcattcggctcggtcgttattaaatgcgttcacgacgaaatccacttaccaattcgataaatatgacaaggaaaggatatgcggggaaatagcacgagacgagcacaaatttttatcagatgagcgcctctttaagagttactccctgcaatgtgccaaagttggtctgcctatagattattcctctagagattttgttttaagaatgcgttgtgagggacaacagtttctagtgcagttttctcatgtagacgaattgatctattgggctatgtatttgaacatgggtatatccctgtccttggatctggaattgagggaaatgcccacctatagaagcgttcccagaaggagacatccgagggcaagaagatttaagcaacacaataagaacaaaaacaaaaacaagagcagacaaaatagtgatagaaatgattctcgctcccactctttacttttaagaagatcacacacctcttctgttgtaacaaaagtggccaccggcaacgaacgtccgacaaacaaatcaagatcaagaagtttaagcttgctacctccctctgtatccgatgcgagtcatgactccaatgggcccaatgactctggttcattggcaggggagagttctcaaactgatttttgtggcttatttacatcaaaactaagaaatttctttaaaacagattccagttcgagaaaaaactctaatatggacattggacaaaaaatgagatcgaaggaactgaatagtgttcaagaagaaatcgatgacaatggtagtactactaataccaatacttctgttctatcttccactttttctcccacagcacattctgttttaacggcacaaacatccatccatgaaaacttcagaagtagatcgaattccaaccctatagatcctttgcgctgtgatcggtcagtgttgaaaattaataattttgaaccggtatacgagggaacaggaaggtcaactatttcgaattctgctgagcgtacgaatcgtgaagaaaagttaaaccgtggcaatgaagatgtaaatggagatgaagatgatgacgaagacgaagacgatgctaattacgaagaggatgatgaagatggatatgttgaggatgatgacatcaatagattggtatatttggatgaaagagaatctcgctatgagaatgcggacgttgagtacggtacaatattcagtacgaaaagcttttccgtgactggttgtttaaatcatgattttccaaagaaattgtcactaaaatgtggaaataagaatcaatccagtaacgattcgaagtgggcaccggcgacacaactagtttcaaggaaaagatatatcaaagactcattaagatgcatcaaaccgttaacggaagaccacccatgggtaggtaagattattttcaaaccggcactgccaccagcattcgaaacgaataatccacctataagagtttatagtggtgaagatagtacggacttgatgcacgtgaaaaaccattatttaaagccatacatagtgggatcctgcgggtttttgaaaactggctcaaaactttttcacttttacgatagaactaacgaccttacgaatttatga

SEQ ID NO: 78292 - DNA, 84 bp, Saccharomyces pastorianus
atgcatcttaatgagtctttgatatatcttttccttgaaactagttgtgtcgccggtgcccacttcgaatcgttactggattga

SEQ ID NO: 78293 - DNA, 1044 bp, Saccharomyces pastorianus
atggtttctgtggagtttttacaggagttaccaaaatgtgagcatcacttgcatttggaaggtactctagaacctgacctattgttcccattagctaaaagaaacgatataattctacctgaaggttttcctaaatcggtcgaggaattaaacgaaaagtataagaagtttcgtgatctgcaggatttcttagattactattatattggtactaatgtcttgattagtgaacaagatttctttgatttggcgtgggcctattttaaaaaagttcacaaacaaggcttggtccatgctgaagtgttttacgaccctcagtcacatacatctaggggcatctccatagaaacagtcactaaaggtttccaaagagcttgtgacaaagccttctctgaatttggtattacatccaagctaattatgtgtctgttaagacacattgaaccagaggaatgtttgaaaactatcgaagaagctaccccatttattaaagatggtactatctctgccttaggattagattctgctgagaaaccatttcccccacatttatttgttgaatgttacggaaaggccgcctcattgaataaagatttaaaactaactgcacacgcaggtgaagaaggccccgctcaatccgtctcggatgctttagacttgttgcaagtaacaagaatcgatcacggtatcaacagtcaatacgacgaggagttattggataggttgtcgcgcgaccagaccatgctaactatttgtcctctctccaacgtgaagctacaagtagtccaatccgtttcagagttaccactacaaaagtttcttgacagagatgttccattttctttaaattctgatgaccccgcctattttggtggttatatcttagatgtctacactcaagtttcgaaagatttcccacattgggaccatgaaacatggggtcgtatcgctaagaacgccattaaaggttcatggtgtgacgataaaagaaagaacggtttgttaagtagagtggacgaagtagtcactaaatattcgcattag

SEQ ID NO: 78294 - DNA, 570 bp, Saccharomyces pastorianus
atgctggaggcaaagatggttatggtagttccaactatagaggaccaagcaatgatcgttctgcacccaaaaatattaagccaatcagtagttatgcacataaaaggtcagaactaccaactagacctagtaaaagtaaaacatataatgatagaagtagggcacttagacccacaggtccggacaggggcgatggttttgatcaaagggataaccgcttacgtgaagagtataagaaaaacagttcacaacgttcacaattacggtttcctgaaaagccatttcaagagggcaaagacagcagcaaagccaacccttaccaagcttcatcttacaagcgcgactcgccttcagaaaatgaagaaaagccgaataaaagattcaagaaggatgaaacaattagaaacaaatttcaaacgcaagattatagaaatacacgagatagcggtgctgcccatagagccaatgaaaatcaaagatacaacggaaatagaaagagcaatactcaggcgcttccgcaaggtcccaagggtgggaattacgtcagtaggtaccagaggtaattactag

SEQ ID NO: 78295 - DNA, 1461 bp, Saccharomyces pastorianus
atgccaagaaaggctaatttgctaaaatctttggcaagaggacgagtacgcacttctttcaataagtataatttgtttaatttgtacaaaaagggtggtgtagacttgaagtctaaatctttgtatcaacagaagtggacggcaaagcaggaaacccgagcttatcatggtgaacatttgacagaaaagagatggcaaaccgttttcaaacccaaattggattcagtagcacaattggatgcttcactgcgtggaggtgaaatcaaggaaacaccatttttattacaaacttttgcagtattagaaaaaaggcttgattttgcccttttcagggctatgtttgcttcgtcagtaagacaagctcgtcagttcatcttgcatggaaatgttcgcgttaatggtgtaaaaattaagcatccaagctatactttaaagcctggagatatgttcagtgtcaaaccggacaaagtgctggaagctctcggtgccaagaaaccaagtttccaagaagcgctaaagatcgataagactcaaatagttttatggaacaagtatgttaaggaagcgaaaacggagccaaaggaagtttgggagaagaagttggaaaattttgaaaagatgtcggattctaacccaaagaaacttcagtttcaagaatttttgaggcaatataataagaatctggagtcacagcaatataacgcattaaagggatgcacacaggaaggtatcttgagaaagcttttaaatgtagagaaggaaataggtaagtcgaataatgagcccttgtcgatagatgaactcaaacagggtctccctgagatccaggactctcagttgttagaaagtctaaataacgcttatcaagagtttttcaaatccggtgaaattagaagagaaatcatttctaaatgtcagcctgacgagttgatttcactggctacagaaatgatgaatcctaacgaaaccacaaaaaaagaattatctgatggagccaaatccgctttaagatctggaaaaagaatcttagcggaaagcgtgaaactatggacgaaaaatataacagaccacttcaaaactaggatgagtgatatttctgatggttcactaacgttcgaccccaaatgggccaaaaatttaaaatatcatgatccgattaaattatctgaattggaaggtgatgaaccaaaagcacgtaaattgataaacttgccgtggcagaaaaattatgtttatggtaggcaagatcctaaaaaaccctttttcacaccatggaagccaagaccatttttatcgcctttcgccattttacctcatcatttggaaatatctttcaagacatgccacgctgtatacctaagggatcccgtcgctcgaccaggccaatccgaagtaatttcaccatttgatgttcctgttcatgaacgtgcatatatgtattacttgagaaatggtaaatga

SEQ ID NO: 78296 - DNA, 345 bp, Saccharomyces pastorianus
atgtctgaagtaattgaaggtaacgtcaaaattgacagaatttccccaggtgatggtgccaccttcccaaagacaggtgacttggttaccattcattacaccggtaccttggagaacggccaaaaattcgattcctccgttgacaggggctctccattccaatgtaacatcggtgtcggccaagtcatcaagggttgggatgttggtattccaaagttgtctgttggtgaaaaagctaggttaaccatccctggcccatatgcttatggcccacgtggtttcccaggtttgattccaccaaacagtactttggttttcgacgtcgaattgttgaaggtcaactaa

SEQ ID NO: 78297 - DNA, 1131 bp, Saccharomyces pastorianus
atgtccgcctcgattccagaaaccatgaaagccgttgtcattgaaaatggcaaggctgtagtcaaacaggacattccaattcctgaattagaagaaggatttgttctaattaagactgtcgccgttgccggtaaccctaccgattggaaacatattgatttcaagattggtcctcaaggtgccctcttaggctgtgatgcagccggccaaatcgtaaagttgggcccaaatgttgatgctgcacgctttgccattggtgattacatttatggggttattcacggtgcttcagtgaggttcccctcaaacggtgcctttgctgagtactctgccatttcatccgagactgcttataaaccagccagagagtttagattgtgcggtaaagacaagctaccagaaggccccgtaaaatctttagaaggggcagtatccctcccagtctcactgaccacggctggtatgatccttacacatagttttggcttggacatgacatggaagccctccaaagcgcaaagagatcaacccatcttattttggggtggtgccactgctgttggccagatgcttattcaattggcaaaaaaactaaacggtttcagcaagatcatcgtcgttgcttctcgtaaacatgaaaaattgttgaaagagtacggtgcagatgaactttttgactaccacgatgctgacgttatcgaacagataaaaaagaagtacaacaacattccttacttggtggactgtgtctccaacacagaaactattcaacaggtgtacaaatgtgccgctgatgacttagacgctacggtcgttcaattgaacgttttaaccgaaaaagatatcaaggaggaagacaggaggcaaaacgtcagtattgaaggaaccgttctatatttgataggaggtaacgacgtcccatttggcacgtttactttgccagcagaccctgaatacaaggaagccgccataaaatttattaagttcatcaatccaaaaatcaatgatggtgaaatccaccacatcccagtgaaagtttacaagaacgggttagatgatatcccacagttacttgatgatattaagcacgggaggaattctggcgaaaagttggttgccgtcttgaaataa

SEQ ID NO: 78298 - DNA, 522 bp, Saccharomyces pastorianus
atgtcatctaccagtgataataatgctaatagtacaagagagaaaaaaccactgaaattcgtgtcagaaggagttggtaatgtagaggcccagaggatacgagagcaagtggagcaaaaaaaatatgaagcggaatataaaaggaaaaccaggaagtccctgcgagatcagcttaggtctaatgctattagtaaacaaaaacaatataacggtttggtgagagaccgtgaaagttttactaggttgagtaaagaggacctggaattttaccagaagagcaagaatgagttgctaaaaaaggaaaaagaactgaataactacttagacgtcaaggcaatcaattttgaaaagaaaaaaaaagcattactaatggagaacgattctaccactaatacagaaaaatatttagagaccggcactagtttgggcagtaaaacacaaataaagggcgtaaagacatccagccctaaaccaaaaatcaaggtatccataaaaaaattgggtagaaaactggagaactga

SEQ ID NO: 78299 - DNA, 3171 bp, Saccharomyces pastorianus
atggccaaaaaagctatcgattcaagaatcccgtcactgatcaggaatggtgttcaaaccaaacaaaggtccatatttgtcatcgttggggacagggcacgtaaccagctcccaaatttacattatttgatgatgagtgctgaccttaagatgaacaagtccgtcttatgggcttataagaagaagcttctaggattcacttcgcacagaaaaaaaagagagaataaaattaagaaagaaattaaaagaggtacaagggaagtgaatgaaatggacccttttgaatcttttatctctaaccaaaatatcagatatgtatactacaaagagagtgagaaaatattgggtaatacctatggtatgtgtattcttcaggacttcgaggcattaaccccaaatcttttagcaagaaccattgaaactgtagaaggtggtggtattgtggttattttattgaaatcaatgtcatcgttaaagcaactgtacaccatgactatggatgttcacgcccgttatcgtactgaggctcatggtgacgttgttgcaagatttaacgaaagattcatactttctttaggttcaaatccaaactgtttagtcgttgatgatgaattaaatgttctaccgctatctggtgccaaaaacgtgaaaccactacctcctaaggaagatgacgaattgcctccaaagcaattagagttgcaagaattaaaagaatccttagaagatgtccaaccagctggttcattggtttctctatccaaaactgtcaatcaagcccacgctattctttctttcattgatgccatttcggaaaaaactttgaatttcacagttgcactaacagctggaagaggtagaggtaagtctgctgctttaggtatttctattgccgcggccgtttctcacgggtattctaatatttttgttacttctccatctcccgaaaatttaaagactctatttgagtttattttcaaaggattcgatgctttaggttaccaagaacacattgattatgatatcattcaatctacgaaccccgacttcaacaaagccattgtgagagttgatattaaaagagatcacagacaaacgattcaatatattgttcctcaagaccatcaagttctgggccaagctgaattagttgtcattgatgaagctgcggctattcctttgccaatcgtcaagaacttgctgggcccatatctagtcttcatggcatccactatcaatggttacgaaggtacgggtagatctttatctctgaagttaattcagcaattgcgtaatcaaaacaacacatccggtcgggaaagtactcaaaccgccgttgtttcgagagataataaggaaaaagactctcacttacattctcaatcccgtcaattacgtgaaatttccttggacgaaccaatcagatatgctcctggtgacccaattgaaaaatggttaaacaagctcttatgtttagatgttactttaattaaaaacccaagatttgcaacaagaggaactcctcacccatcccaatgtaatctatttgttgtcaatagagatactctattttcttatcatcctgtctcagaaaatttcctggaaaaaatgatggcactgtacgtttcatcccattacaagaattctccaaacgacttacaactgatgagtgacgccccagcgcacaaactatttgttcttttaccaccaattgatccaaaggatggcggcaggatccctgaccctctatgtgtcattcaaattgcattggaaggtgaaatcagtaaggagagtgtcagaaattcattatcgagaggccaaagagctggtggtgatttaatcccatggctgatctctcaacaattccaagacgaggaattcgctagtttgagtggtgctcgtatcgtcagaattgccactaatcctgaatacgcatccatgggctatggttctcgtgcaattgaattactgagagactatttcgagggtaaattcactgacatgtctgaagatgttcgtcctaaggattattctataaagagggtgagcgataaggaactggccaaaactaatttattaaaggatgacgttaaattaagagacgcaaaaacgttgccacctctactattaaaactttctgaacagcctcctcattatctacattatttgggtgtttcatatggtttaacgcaatcgttgcataaattctggaagaataacagctttgttcctgtttatttacgtcaaaccgcaaacgatttaactggtgaacatacttgtgttatgttgaacgttttggaaggcagagaatcaaactggctcgttgaatttgccaaagatttccgtaaaagatttctgtcgcttctttcttatgattttcataagtttactgccgttcaagccttaagtgtcattgaaagtagtaagaaagcacaagatttgtctgatgacgaaaagcatgataataaagaattgacgcggacgcatctggatgacattttttctccatttgacttgaaaagattggatagctactcaaataatttgctagattatcacgttatcgttgatatgatacccatgcttgctcttttgtacttcggcgataaaatgggagattcagtaaaactatcaagcgtccagagtgctatcctgttggctatagggttacagcgtaaaaacatcgacactattgccaaggaattgaatttaccttccaatcaaactattgctatgtttgcgaagatcatgagaaaaatgtctcagtacttccgtcagctgttaagccaatcaattgaagaaactctaccaaatatcaaagatgatgctattgctgaaatggatggtgaagaaatcaaaaattacaacgctgcagaagcactggaccaaatggaagaagatttagaagaagccggttctgaagccgttcaggcgatgagggaaaaacaaaaagagctaatcaactccttgaacttagataaatacgccataaatgataacagtgaggaatgggctgaatctcaaaaatctttagaaatagctgccaaggccaaaggcgtcgtcagtttaaaaactggtaaaaagagaacgactgaaaaggctgaagatatctatagacaagagatgaaagctatgaaaaaaccaagaaagtctaaaaaggctgcaaattaa

SEQ ID NO: 78300 - DNA, 459 bp, Saccharomyces pastorianus
atggtcgaattaactgaaattaaagacgatgtcgttcaattagacgaaccacaattttccagaaatcaggccatcgtggaagaaaaggcttctgcaacaaacaacgacgttgtcgatgatgaagatgactctgatagtgattttgaagatgaatttgatgaaaatgaaacattgttggacagaatcgttgctttaaaagacattgtccccccaggtaagagacaaacaatttctaatttttttggttttactagctcttttgtgagaaatgctttcacaaaatccggaaaccttgcttggactttgaccaccactgctttgttactcggtgtgccactatccttatctatacttgccgaacaacagctaatcgaaatggaaaagacatttgatttacaaagtgatgctaataacatattggcccaaggtgaaaaagatgctgcagcaacagccaattaa

SEQ ID NO: 78301 - DNA, 147 bp, Saccharomyces pastorianus
atgcaagttggttttgtttctcagaccaactgccgttcctttcctgcgtgtattgtttttctgtttcaaatgagtcaacggcaacgatcgttcaatgcaaatcttcgagtatttaaaagcaaatgtaagaaaatttatataggttaa

SEQ ID NO: 78302 - DNA, 723 bp, Saccharomyces pastorianus
atgacttcgaaaaaagtgatattagttgcattgagtggatgctcctccagtggtaagacgacaattgcgaaacttacagcaagtttattcacgaaggctacattaattcatgaagatgacttttacaaacatgataatgaagtgccagtagatgctaaatataacattcaaaattgggattcgccagaagctcttgattttaaacttttcggtaaagaattagatgtgatcaaacaaactggtaaaatagccaccaaacttatacacaataacaacgtagatgatccctttacaaagttccacattgatagacaagtttgggacgagttaaaggctaagtatgactctattaatgacgacaaatatgaagttgtaattgtagatgggtttatgattttcaataatactggaatatcaaaaaaatttgatttgaagatattagtgcgtgctccctatgaagtactaaaaaaaaggagggcttccagaaaaggataccagactttggattctttctgggtggatccgccgtattatttcgacgaatttgtgtatgaatcttatcgtgcaaatcatgcgcagttatttgttaatggagacgtagaaggtttactagacccaaggaagtcaaagaatataaaagagttcataaatgatgatgacactccaattgcgaaacctttaagctgggtgtgccaagagattctaaagctttgtaaggattag

SEQ ID NO: 78303 - DNA, 1305 bp, Saccharomyces pastorianus
atgagagaggaggggagtgaattagaaatggaaaaaggcttccttaaatggaaaccagtcaacttgatgaagaaaatattgtctttaccaatgaaaaaaactaaaaacgatataggtttgagattagatatatcatatattttagttaatctaatagtctgctcatacccggtaaacacgtatccaaaactgctttataggaatagcttggatgacttaatattgtttctaacagtgtaccatggcaagggaaattttagaatttttaattttagaggtgagaaagaagacagcgattataaagataatgatcttattggtatcgctgccaagtttgagagcaaagattttgaaattcaagaattacgttcgacgctgattaatgatggaaagataccaatatcacccattgatctcgaaacaaggaccttggtcgaagaagaaaccaataatgtaatttgtgaaaggatcggttggctagatcattttccaccgccatttgaactgctggaagagattgtagatggtatagaaaattacctgtccgtttcgaagaatagagtggctgttttacattgtcgaatggggaaaggccgatctggtatgataacagtagcatacctcatgaaatacttgcagtgtcctcttggagaagcaagattgatattcatgcaggctagattcaagtatggtatgacgaatggcgtcaccataccctctcaattaagatacttaaggtaccatgagttttttattacccatgaaaaagcagcccaagaaggaatttctaatgaggcggtaaaattcaaatttaaattcaggcttgctaaaatgacgttcctccgcccatcaagcttaatcacttccgagtctgctattgtaactactaagattcaacactacaacgatgatagaaatgccctcctaacccgaaaagtagtatattcagatatcatggcgcatgaatgcggtggtaatatgaccttcatttttggtagggactacttaacactggaaaatgattgtcgtatagaatttaccctggggaccagcaagtccaaagccgccagtagcataatatcttggacttcatgcgccagctgttggctgaatatataccttgagactttgatgcacataattaaagacgattcttcgccagattactttcaagtagagaggttaaagagagacgaaatgcttgggacaaccataagctggcaagagctggacggttttggggagctcagcactcacggcttgaaattatttcaggcactgaaattggaaggggaaattatatag

SEQ ID NO: 78304 - DNA, 2022 bp, Saccharomyces pastorianus
atgtcaacgcacacaaacgactacttttctgcttcttccggaatggtctctgagacatcgtccgaggtttcttcgataaactcttcacagcgtgtatcattctccaaggcttctattgctgctccggttccatgctctgatctacacagcaccaagtcgaacgatgcatcgagaaaattgtctattagtaggacgttgactaatcgactcaacgacattaaaaaggctgtcgatgacgacaacttgcagacagaagaaaattctgcagacgttaataaaatattagaatctagattcgacgtggccgatgccattaggctacagcacaatgagtcagttcagtcaaagttgaacatcccagtcacacacactacgactgcaggcgcctcgttgtcggcaccatctttctctgcttcctctgcttcttctattcaaaatgatactacagaacataaagcttccatggactccaaactcatgaggaatagactatatccggcttccacgaaacactccggtaaggatcttgaggctcaaggaataaccgaattcgagcctgatgaaccgactgtaaaaagagtattcaccaacaagtctactgggcagctggaactgccccccgacggtggttatggctgggtcgtgacattctgtgtgttcttgaccatgttttccacgtggggctgcaacgcatccttcggtgtcgaccttgcctactacttaaaccatgatacttaccctggtgcttcgaagtacgattatgccttaattgctggcctaactgtctttctcggtcaactcttgtccccgcttgtgatggcactgatgagaataattggtctgcggaccaccatgctttttggtgatgctgtaatgcttgccgcatatctcttggcctcctttactaccaagttatggcaattgtatgtcacccaaggttttatggtcggttgttcaatatcactgattttcgttccagcaacaaccgtcttaccaggatggttcttgaaaaaaagagctgtcgcaatgggtgtctcattattgggtactggtgctggtggtgtcgtttacggtttggctacaaacaaaatgctttctgactttggaaatacccggtggtgccttcgtatcataggcatatcgtgtagcataagtgttctagttgctattgcgctcttaaaagaaagaaaccctacacctgccataggattgagatcgcctcgggccatgtttgaacagctcaaagcaatgttttcattaaaggttataactaaaccatttgtggtacttattgcattatggttcatgttcgcattatttgcttacaatatgatggtttttactttatcttcatacgcaatctcgaaaggattatcatcacacgacgcttccacattgactgccattttgaacggctcgcaatccatcggaagacctctgatgggtttagcgggagataagtttggtagggcaaacgtaacgatcgtattaaccactttgttaacaatatatatgtttgcgttctggatccccgctcatacgtttgttcaactgatctttttttcaattctagttggctcatgcgttggtgtcgccaacgtcatgaataccgttctgattgccgatatggttaaaccagaagagtttttgcccgcttgggccttcgtcaactactgtggtgcgcctttcttattggtttgtgaggtgattgcccaggcattgacggtggagaaagataagagcaatccttacttacatgcacaaattttttgcggttgctgctttattgctgcattaattttaatttctatccttcgtgaatattctatcaggatgaaattaacggaaagacaagctatgacaaacgagaagttaaaagaatggaaggcaagcgaatacgatactgattctgccgatgaagattggggtaaattaaaagaaagaaagactaaatatgaccttcttttaggtccgggcattaaaaaatacttcctaagaatggtatatccaatgaaggtctag

SEQ ID NO: 78305 - DNA, 1479 bp, Saccharomyces pastorianus
atgagcgatgacttgttttctaaggctttggagaatcccgaccaggacttgaacgtggaattgcccaaggatgatgttgatttaggtcttttaggtgatggtgggaacgagaggaagaccgatgaaccggcagcagacgcagaaagatcaacaggcctgggctccggctcttctgaatccgaatcagattccggttctgattctgattcggattctggttcttcaggtagtgaggatgattctgcagatcaggacgttgaaggagaggacgaaggtggtgacgcgattgaaaatgaagacgaagacgaagacgcttcaccttccggtcctatactatcgaagaacgaaatactagaggaaactgttcctgaactaccggaagattatgaaatttcagaaaaaacgatcatcactcctattggtgttttgaagtctgcatttgaaaataatataatcatccacgccacgatgtcgggcgaaaagcgtgttttaaaagagggttccatcttctgtctcgaggatagaactttgattgggatgttgacggaggtgtttggacccttgcaaaacccattttatagaattaagttgcccgattcaaaaaaaaacttattcgatgaattaaaagtgcgtttgggtgagaaagcctttatagtcacccctgatgcccactggatagatactttcgagttaaagcgcaacaaaggtactgatgcgtctaatgggtacgatgaagaattacctgaagaggaacaagaattttccgacgacgaaaaagaggcccttttcaagaaaatgaagaaacagcaacagcaacgaaagaaaagggacaaccgcaaactagccaacgatagtgacaatgtcaaggtaaagagagctcggcagcccaaggccaacagtttacctaaactggtaccgccattgggcatgagcagtaatgcgccgatgcaacatgggtacaaatcaagaaatgcacgtgaaaatatcaagcgtgaatccagtgctacctctaaccggaatggctcctccccagtgccaatcacacagcaccaccaacaacagttctctgcaaataattatcccttccctcaacaaccaaacggtatgccttatccaccatactcacctttcgctcagccgactaacttccagtatccacctccaccatttgggcaggcgacaccagcccaattctccaacactgttccatatggtagcttacctcccgcatacaacaatatgtcgccaccaacacagcagtcgttcatgtcaatggcccaaagtcaaccgccactcccatatggcgtacctcccatgaatcaaatgcaaaacccaatgtacatccaaccaccacctcaagcacctcctcagggaaatggtaatttccaacaagtaatggaattacatcaaatacttttgcagcaacagcaacagcaacaccagtatcagcatcagcatcagcaagatccaagaacctag

SEQ ID NO: 78306 - DNA, 2994 bp, Saccharomyces pastorianus
atgaccatatcgttgagcaatataaagaaaagagaccattctaaaatttccgatggaacttctggtgaatcatcgcttgtaaaaaggaaacagttggaaagcgccaccggagatcaagaggaagaatatacagaccatgaaatcattatagagccgttgcactttgctaataataataacactgtactcacagattcagaaaattatctaagatggcaaaataccatctccaacgttgttaaatcagtggtttccattcatttttcacaagttgcgccattcgattgcgattctgctttggtatctgaagctaccggatttgtcgtggatgctaaattaggtataattctgaccaataggcacgtcgttggtcctggtccgttcgtaggctacgtagttttcgataatcatgaagaatgcgatgttataccaatttacagagatcctgttcatgattttgggttcctcaaattcgatccgaaaagcataaaatattctaagatcaaagcgttaacgctaaaaccaagtttggctaaggtcggctcagaaattagagttgtcggtaatgatgccggtgagaaattaagtatcctagcaggttttattagtagaattgacaggaacgctccagaatatggtgagctgacatacaacgacttcaatacagaatatattcaagctgctgcatctgcttctggcggttcaagtggttctccagtcgtaaatatagatgggtatgctgtggctttacaggcaggtggctctacagaggcatctactgatttttttttaccgttagatagaattcttagagcgttaatttgcatccaaaccaacaaacctatcacacgtggtacgattcaagttcaatggctgctgaagccttatgacgagtgtagaagattaggtttaacttcagagagagaaagtgaggctcgtgctaaatttcccgaaaatatcggactgttggtagcagaaaccgttttaagagaaggcccaggctatgataaaattaaggaaggtgatactctaatttcaataaacggtgagaccatatcttctttcatgcaagtggataaaattcaagatgaaaatgttgggaaggaaatccaattggttattcaaaggggcggtgtcgaatgtactgtcacctgcactgttggtgatttacatgctatcacccctcatcgttatgtagaggtttgtggtgcgacttttcatgaattatcatatcaaatggcaaggttttatgcgctacctgtcaggggtgtatttttaagtagtgcatcagggtctttcaactttgattcaaaagaaagagtgggttggattgtggattctatagacaataaggaaacccccgacttagatacatttattgaaattatgaaaactattccagatcgtaagcgcgttactgtacgataccaccatctaacagatcagcattctccacttgttacttctatttacattgaccgtcattggtgcaatgaattcagagtttacacaaggaacgatacaactggtatttgggattacaaaaatgttgctgatccacttccagccgatgcgttgaaacctcgttcggccaaaattattcctattcctgttaataatgaaaaagttgcaaaattgtcatcatcgttatgtacagtggctacaatggcagcagttccattggattcactttctgctgatattttaaaaacatcaggcttaatcattgatgctgaaaaaggttatgtcctagtgtccagaagggtagttccacatgattgtcttgatacttttgtcaccattgcagattcccttgtagttccagccacagtagaatttctccatccaactcacaactttgctattgttaaatatgatccagagctagtaaaggctccactaatcactcccaagctatctaccaccagaatgaaacgtggtgataagcttcagtttataggttttacccagaatgatagaattgttacttcagagaccactgtcaccgatatttcctctgtaagtattccaagtaatttaattccgaggtaccgtgccactaatttagaagctatatctatcgactgcaacgttagcaccagatgtaattccggtattttgacagataatgatggtacagtaagaggtttatggcttccatttttaggcgaaagattagaaaataaagaaaaggtttatttgatgggattagatataatggactgtagggaagttatagatatcttaaaaaatggcggtaaaccaagagtaagtatagttgatgctgggttcggttcaatttccgttctgcaagccagaattagaggtgtgcccgaagaatggatcatgcgtatggaacatgaatcaaataacaggctacagtttatcactgtttctagagtttcttatacagaagacaagattcatttagagaccggtgacgtcattttatctgtgaacggaaaattagtcactgaaatgaatgatttgaatggagttgtaagctcagctgatggtattttgccatcagccatgttagattttaaagttgttcgtgatggtaatattgttgatttgaaaattaaaaccgtggaagttcaggaaaccgaccgttttgtaatatttgcaggtagtatcttacaaaagccgcatcatgctgttttgcaagctatggttgatgttccaaagggtgtctactgtacattcaggggagaatcgtcaccggcgctccagtacggtatatctgccacaaacttcataactcatgtcaatgaaattgaaacacctgatctagatacatttttgaaagttgtcaaaacaatccctgataatagttattgtaaaatgaggttaatgactttcgacaatgtgcccttcgctatttcactgaaaacgaattatcattacttccctactgcagaattgaagagggacaacatcacgcacaaatggattgaaaaggaatttaccggcaacagccaaagtgaaaaatag

SEQ ID NO: 78307 - DNA, 348 bp, Saccharomyces pastorianus
atgaatattagcttgcatcacaaacggcaaagaggagaccaaaaccaaaacatgtctgttttcaatgtactcaaaccactacttaaaggttcaaatagtttcaaagtgaagctcaacggctttctattcaataacgtttctacaataacaataagaactttaatgaaaactcataaaggtacagcaaagaggtggaggcgtaccggtaatacttttaaaagaggcatagctggaagaaaacatggcaatataggctggtcccatagatcattaaaagccttaaccggaaggaaaattgcccatccagcttattcaaagcatctaaagcggttattaccctatcattga

SEQ ID NO: 78308 - DNA, 1854 bp, Saccharomyces pastorianus
atgaagagcttcattacaaggaataagacagccattttggcaaccgttgctgctacaggtactgccatcggtgcctactattattacaaccaattgcaacaacaacaacaacgaggaaaaaagaacacgatcaacaaagatgaaaaaaaggacacaaaggactctcaaaaggagactgaaggtgctaagaaatctacagcctcatcaaaccctcctatctacccggtttctagtaatggcgaaccagatttttccaataaggcaaatttcaccgctgaagaaaaggataaatatgcattagcgttaaaggacaaaggtaaccagttctttagaaataaaaaatatgacaatgctattaagtactataattgggcattagaattgaaagaagacccagttttctactcgaatttatcggcttgctatgtttctgtgggtgacttgaaaaaagttgttgaaatgagtactaaggctcttgaattaaaaccggactactcaaaagttttactgagaagagcttctgctaacgaagggttaggaaaatttgcggatgcgatgttcgatttgtctgtattgtctctcaatggtgacttcaatgacgcctctattgaaccaatgttggagaggaacttgaataagcaagctatgtctaaattgaaagaaatgtttggcgatattgacaccgctactgctactccaactgaattatccacccaaccagctaaagaacgcaaagacaagcaggaaaacttgccttcagttacatccatggcctctttctttggtattttcaaacccgagttgacttttgccaattatgatgaatccaatgaagctgataaagagttaatgaacggtttaagtaatttgtacaaaagatctcccgaaagttacgacaaggctgatgagtctttcacgaaagctgcaaggttatttgaagagcaattggacaagaacaatgaggatgaaaagttaaaggaaaaattggccatctcattagaacacacaggtattttcaagttcttgaaaaacgatccattgggagctcacgaagacatcaagaaagctattgaattgttcccaagagtcaattcatatatctacatggcattaatcatggctgatagaaatgactcgactgaatattataactacttcgataaagcgctgaaactggactcaaacaattcttctgtttactatcaccgcggccaaatgaatttcattttacaaaactatgatcaagcaggaaaagattttgataaagctaaggaattagacccagagaatatcttcccttatattcaattagcatgtctagcgtaccgtgaaaacaagtttgatgactgtgaaactttgtttaatgaagctaagagaaaatttccagaggcaccagaagttccaaatttctttgctgaaattttaacagacaagaacgattttgacaaggctttgaagcagtacgatttggctattgaattagaaaacaagttggatggtatttatgttggaattgcgcctttggtcggtaaagccactttgttgacaagaaatccaacagtagaaaattttattgaagccacgaatttattagaaaaagcgtccaaactagacccaagaagtgagcaagctaaaatcggtttagctcaaatgaaattgcagcaggaagatatcgatgaagctattacattattcgaagaatccgctgatttggctagaactatggaagagaaattacaagccattacttttgctgaagccgctaaagttcaccaaaaaattaggtctgatccagtattggctaaaaagattcaagaaactttagctaaattacgcgaacagggtttaatgtaa

SEQ ID NO: 78309 - DNA, 486 bp, Saccharomyces pastorianus
atgataaaagttgatacttctgatgcattgttgaaaaattcgttaacatcaataaaatggacattaaatatgttggatattttattcagttgtgacattttttcattaatcaaggattccatacgttctttgataacagaaacattttcctcggtgaataccgtgagtacatcgacggtaaagcctgtacgattattgtgttgcttagtttgttccaatagcaagtcgtgcacaatatctaacataaccagagatcctgaatcagaaagtgataaggggagcagaatcttagagacggatccttctttttcaaatgggtatataactttaaataggttcctgaaatattcatccttcatcatttgtttcctttgtttagtactaacaaacttgatgaaacattcatcgcaaaacttttcctttctagactcaactgtcgctggatttctggcagatgcagggcacctctggcactccataacttga

SEQ ID NO: 78310 - DNA, 1482 bp, Saccharomyces pastorianus
atggagtgccagaggtgccctgcatctgccagaaatccagcgacagttgagtctagaaaggaaaagttttgcgatgaatgtttcatcaagtttgttagtactaaacaaaggaaacaaatgatgaaggatgaatatttcaggaacctatttaaagttatatacccatttgaaaaagaaggatccgtctctaagattctgctccccttatcactttctgattcaggatctctggttatgttagatattgtgcacgacttgctattggaacaaactaagcaacacaataatcgtacaggctttaccgtcgatgtactcacggtattcaccgaggaaaatgtttctgttatcaaagaacgtatggaatccttgattaatgaaaaaatgtcacaactgaataaaatatccaacatatttaatgtccattttattgatgttaacgaatttttcaacaatgcatcagaagtatcaacttttatcattgacaatgaaaattttgagattttcagcaagtcaaagtcagtagatgatagcaatatattaacattaaaagaaatattaggcaaatactgtctcaataattcatccaggtctgatttaatatcgattataaaaactcaattgatcaagcattttgcatacgaaaatggttataatgccataatgtggggacattccatgacaaagctatctgaagtaattatttctcttgtggtaaaaggtaaaggttctcaaatagcgacgtttctagactcggaatcatttgatactttgaataataaaccatgtaagtataaaaacctatatcctatgaaagatctattatccgtcgagattgaaagttttttacaaatcagaaatctggcacagttcctcattaacgttgaagaaactaatgtgaagcctaattgcttgatcgccagaaaatcactgccgtcacttggtcaacaaaaattggtaaaaaatatgacaatcaacgaaattaccaacaaatactttcaggatattcagaacgattattcaaatataatatcgacagttttaagaaccgcagataaattgacacaacctaaatcaagtatggctaagccgtcacaatgtcaaatatgtcaatctaaaatatacacaaatccatccaattggttaaataggatcacagttacttcgccttatcctgtggagaccactgaagaaaagtatttatttaaacagtggcaagattcaaaattagggcaatctcacacacattatgttgaattgttgaatgaaattaaacagggtgccagtaatagcctcgatgttgaagacggtgatgtcaaattgtgttatggttgtttaatcttattgaataccagtatcaaggataagaatttggtttggccaaaagtcgataccatggatattacggcaaatgcgactaataacaacaaagaattgagccaaatattggatcagttcgagattaattccgatggggaggaataa

SEQ ID NO: 78311 - DNA, 1665 bp, Saccharomyces pastorianus
atggttaaggtcagtttggataacgtcaaattactggtggatgttgataaggagcctttctttaaaccatctagtactacagtgggagatattcttaccaaggatgctctagagttcattgttcttttacacagaactttcaacaacaagagaaaacaattattggaaaacagacaagttgttcagaagaaattagactcgggctcctatcatctggatttcctgcctgaaactgcaaatattagaaatgatcccacttggcaaggtccaattttggcaccggggttaattaataggtcaacggaaatcacagggcctccattgagaaatatgctgatcaacgctttgaatgctcctgtgaacacctatatgactgattttgaagattcagcttctcctacttggaacaacatggtttacggtcaggttaatctctacgacgcgatcagaaatcaaatcgattttgacacaccaagaaaatcgtacaaattgaatggaaatgtggccaacttgcccactattatcgtgagaccccgtggttggcacatggtggaaaagcacctttatgtagatgatgaaccaatcagcgcttccatctttgattttggtttatatttctaccataatgccacagaattaatcaaattgggcaaaggtccttacttctatttgccaaagatggagcaccacttggaagctaaactatggaacgacgtcttctgtgtagctcaagattacattgggatcccaaggggttcaatcagagctactgtgttgattgaaactttgcctgcggctttccaaatggaagagatcatctatcaattaagacaacattctagtgggttgaattgcggacgttgggactatattttctctacaatcaagagattaagaaatgatcctaatcacattttgcccaatagagatcaagtgactatgacttccccattcatggatgcatacgtgaaaagattaattaatacctgtcatcggaggggtgttcatgccatgggtggtatggctgcgcaaatccctatcaaagacgacccggcagccaatgaaaaggccatgactaaagtccgtaatgataagattagagagctgacaaatggacatgatgggtcatgggttgcacacccagcactggcccctatttgtaatgaagttttcattaatatgggaacaccaaaccaaatctatttcattcctgaaaacgttgtaacggctgctaatctgctggaaaccaaaattccaaatggtgagattactaccgagggaattgtacaaaacttggatatcgggttgcagtacatggaagcttggctcagaggctctggatgtgtgcccatcaacaacttgatggaagacgccgccactgctgaagtgtctcgttgtcaattgtatcaatgggtgaaacacggtgttactctaaaggacacgggagaaaaggtcaccccagaattaaccgaaaagattctaaaagaacaagtggaaagactgtctaaggcaagtccattgggtgacaagaacaaattcgcgctggccgctaagtatttcttgccagaaatcagaggcgagaaattcagtgaatttttgactacattgttgtacgacgaaattgtgtccactaaggcgacgcccactgatttgagcaaattgtga

SEQ ID NO: 78312 - DNA, 1569 bp, Saccharomyces pastorianus
atgtacacgcctatccctgctaatacccctgctcccgctgcaccaacttcatcgatgacgtccaactcttcatccgcatcaaatgccaacaccactagcagtagtggcataaacccaaggaacagagccagtggtactccatccaatgagcgggctcgtccggcatcaggtatcagttcgtttttgaataccttcggaattaggcaaaatagccagacagcttcttcttctgcggctcctgatcagcgtctattcggcacaaccccatctaactcacatatgagtgtggccatggaaagtatcgataccgctccgcaacagcaggaaccacatctgcatcatcctatacaaatgcctctgtcggcccagttccacgttcatcgcaactatcaactccccatctccatatctctcactgcccctacaaccacagaccaccagcaattatctgcgcataatttcgaaggcaacaatgttggtaacgttcaagagtctttgaatcagcggcagcctaacggtactaacaataccacaacctcgataatttccatggcgccagcggctacaacgagaaatatagtcggtggtgcagatggatctactactgttaacaacagtcaggaaatgtataagaatttacgtcacttgatatatgctgcaaaccagccaaatgggaccgaaattttacatttggatttacctgcaacaagtgcagaggagtcaaacaatatgttcaatgtagatgaggtcactttgaagcaaaggaaagataaacatggtctttttagtataagactaaccccatttattgatagttcgtccacgacaaatcaaggtttattctttgaaccgattataagaaaggctggccctggatcccaattggttattggccgctatactgagcgtgttcgcgatgcaatttctaaaatacctgaacaatatcatccagttgtatttaaatccaaagttgtgtcaaggacacatggttattttaaagttgactctcaaggtaactggtatataaaggatgtgaaatcatctagtggaactttcttaaatcaccaaaggctctcacccgcttcctctttatcgaaagatacccctcttcgtgatggtgatattttacagttaggaatggattttagaggtggcacggaagaaatctatcgttgtgtaaggatgaggattgagctaaatagatcatggaaactaaaggcaaattcgttcaacaaagaagctttacagcgtttgcagaatttacaaaaattaactacaggtgttgaagaagaagattgttcgatttgcctatgtaagatcaaaccgtgtcaagcaattttcatatcaccatgcgcacatagctggcatttccgttgtgtaagaagattggtcatgctctcatatccgcaatttgtttgccccaactgtagatcaagttgtgatttggaggcctcctttgaaagtagtgacgaggaagatgaaagtgatgtggaaagtgaaggtgatcaactggtggatcaacttagcgtcttaatggaaacttcaaaggatgttgatagccatccttaa

SEQ ID NO: 78313 - DNA, 372 bp, Saccharomyces pastorianus
atgaggtatcgagtaaccacaaaattctacgtctggatttttcattataacgtaacgaagggcatttccaagcgtgtgatcctcctctacaatttgaaaagaggcactagttccatcttcagatgttgcctgtgtgagaaacttaattttttccctgtctggttcctcttcctgttcttcatcgccagtcatatcaacatcctgttcttcttcttcttggatgtgctttggttcttgtggtgttacctctgtagcggtctttttttgttcgatgtcttcagtcatttgcctgatactttatgtgaagttcaatttttccaactttggattgatggcctttccccaattcgttactttatacctcagcattag

SEQ ID NO: 78314 - DNA, 429 bp, Saccharomyces pastorianus
atgactgaagacatcgaacaaaaaaagaccgctacagaggtaacaccacaagaaccaaagcacatccaagaagaagaagaacaggatgttgatatgactggcgatgaagaacaggaagaggaaccagacagggaaaaaattaagtttctcacacaggcaacatctgaagatggaactagtgcctcttttcaaattgtagaggaggatcacacgcttggaaatgcccttcgttacgttataatgaaaaatccagacgtagaattttgtggttactcgatacctcatccttctgaaaacctattaaatatcagaattcaaacctacggtgaaacaaccgcggtggatgctcttcaaaaagggctaaaggacttgatggatttatgtgacgttgtagaatctaagtttactgaaaaaatcaagagcatgtag

SEQ ID NO: 78315 - DNA, 363 bp, Saccharomyces pastorianus
atgcctaaagtttacagttaccaagaagttgccgaacacaatggcccagaaaatttctggattatcatcgatgacaaagtttacgatgtttctcaattcaaagatgaacatccaggtggtgatgaaattataatggatttgggtggtcaagatgctacagaaagctttgtcgatatcggtcattctgacgaagcattgagactactgaaaggtttatacattggtgacgttgacaagaccagtgagcgcgtttctgtggaaaaggtatctacctctgaaaaccaaagtaaaggtagtggtacattggttgttatattggccattttaatgctaggtgttgcttattatttgttgaacgaataa

SEQ ID NO: 78316 - DNA, 663 bp, Saccharomyces pastorianus
atggtaaagtcaacaagcaaaacttccaccaaggaaacagtaaccaaacaacccaccgaagaaaaacctatacaggagaaagaagagttggctctagaaacatcgtctagcagttcagatgaagaagacgaaaaagatgaagatgaaattgaaggtttagccgcttctgatgatgagcagagcggtacgcacaagattaaaagattgaatcctaagaagcaggctaatgaaaaaaagtcgaaagataaaaagacacttgaagagtattctgggattatttatgtgagtagactgccacatgggttccacgaaaaggaattaagtaaatattttgctcaattcggtgatttaaaagaagtgagattagcacgtaataagaaaactggaaattccagacattatggcttcttagaattcgttaataaagaggatgcaatgatcgcccaagaatctatgaacaattacttgttgatgggtcatctactacaagtgcgtgtattaccaaaaggagctaaaatcgagaaattgtacaaatacaagaagagagttctagtagagaaaggtatcaccaaaccagtaaaacagctaaaggataacatgaagcaaaaacatgaagaaaggataaaaaaattagccaagtcaggtatcgaattcaaatggtga

SEQ ID NO: 78317 - DNA, 546 bp, Saccharomyces pastorianus
  modified_base (204)..(229): a, c, g, t, unknown, or other
atgcagaagtgtataatgagaagtacagaattcaagactcactttagttttcactccatttttagttttccgctctcagctgctcttctcgctttgatatcagcgtctgaaccagcctcaaaggcattcataaacgtccaattcatttcttccccattagttaaaaaggaggtgttgccattcattgtaagtttccactctctnnnnnnnnnnnnnnnnnnnnnnnnnnctcctttcaccagctcaaatttatcaatagcacaacttccatttcttataaaggtgcctttgttatcaatgggctctttggcactggagaatttcaacaagttcataccaagagcggatttagtggctgcgtgggtaactatcataatggtctttacatttggaaattttctctccactctgtcaataaagacaggccagaatttatggcacctctcaaaaatatcttcttctgtttcacccttattactaggaataatactaggttcccagtctggagagatcatgcttggaaaaaacttactcataacttcatga

SEQ ID NO: 78318 - DNA, 813 bp, Saccharomyces pastorianus
  modified_base (635)..(660): a, c, g, t, unknown, or other
atggctatcgaaaatatatacattgccagacatggttacaggtcaaactggctaccaaagggaccatatccaccaccgcccaccggtattgataacgatgtcccgctttcggaacacggtgttgaacaggcacatgaactggcgaactatatctctaaattagatgtcaaaccagaaatgattttctcctccccattttaccgctgtttagaaactagtaaacccacagtggaggctttaaagattccattatatgtcgatcgtggtgtaggagaatggtataagcctgatagacccattatcccggagcctgctactcatgaagttatgagtaagttttttccaagcatgatctctccagactgggaacctagtattattcctagtaataagggtgaaacagaagaagatatttttgagaggtgccataaattctggcctgtctttattgacagagtggagagaaaatttccaaatgtaaagaccattatgatagttacccacgcagccactaaatccgctcttggtatgaacttgttgaaattctccagtgccaaagagcccattgataacaaaggcacctttataagaaatggaagttgtgctattgataaatttgagctggtgaaaggagnnnnnnnnnnnnnnnnnnnnnnnnnnagagagtggaaacttacaatgaatggcaacacctcctttttaactaatggggaagaaatgaattggacgtttatgaatgcctttgaggctggttcagacgctgatatcaaagcgagaagagcagctgagagcggaaaactaaaaatggagtga

SEQ ID NO: 78319 - DNA, 681 bp, Saccharomyces pastorianus
atggctccgacaataagcaaaaggataaaaactctctccgtgagcagaccaataatatatggcaatacggctaaaaagatgggtagcgttaaaccaccaaatgctcctgccgaacatactcatttatggacaatttttgtcaggggcccacaaaatgaagatatatcgtactttatcaagaaagtcgtttttaaacttcatgacacctacccaaaccctgtgagatccatagaagcgcctccgtttgaactgactgaaacagggtggggtgaatttgatataaatattaaggtttattttgtagaagaggccaatgaaaaaatgttgaatttttaccatagattacgacttcatccttatgctaatcctgtaccgaattccgacaatggaaatgagcagaatacaacagaccataatagtaaagatgcagaagttagttctgtgtattttgatgaaattgtattcaatgagccaaatgaagagtttttcaaaattttaatgagccgaccaggaaatttgttaccttcaaacaaaactgatgattgtgtatactccaagcaattagaacaggaagaaattgacagaatagagatcggcatagaaaaggttgacaaggaaattgacgaattgaagcagaaactggaaaacttggtaaaacaagaagccattaacggaagttag

SEQ ID NO: 78320 - DNA, 429 bp, Saccharomyces pastorianus
atgtccatgaaatcccatttagaattatttaagcaaaaaaaatccacagcatatattttgttaaccgttttgtttgggatcggctgggccaccttagatttacctgttatggttgctatgaacataaggccttcaatttctatgagaccaataaaaccgtatacttcatggttagatagtcttctgaaaccattaccatttaattcagctttcggaaccaattccacagcacatgtagatcggcgagagttcttactgtttatcggcctaaataccagtccatgtgtttctgaaactattgctatctttctagtttgctgtttcgataggagtattttcatagctactgagtatttgtttttgattctgctgcctttgcgtggcctttgtcaccaattctgcgaacaaaaatatgttgagactatatga

SEQ ID NO: 78321 - DNA, 1860 bp, Saccharomyces pastorianus
atggttaaacagagtattattgctcttgctgagcatgcggcctccagagcctcaagagttattcctccagtgaagctagcctataaaaatatgcttaaggacccttcctccaagtacaagccatttaacgctccaaagctatctaatagaaagtggccggataaccggatcacgagggctcctcgttggttatcaacagatttgagagatggtaaccaatctctgccggatcccatgtcagtggaacaaaagaaagaatactttcacaagctggtcaatattgggttcaaagaaatcgaggtttccttcccctctgcatctcaaacagatttcgacttcactagatatgctgtagaaaacgccccagacgatgttagtattcaatgtcttgtccaatctagagaacacttgattaagagaacggtggaagcattaacaggtgctaaaaaggctactatacatacttacttggcaacaagtgatatgttccgtgaaattgtttttaatatgtctagagaggaagctatttccaaggcagtagaggccaccaaactagttaggaaactaactaaggatgacccttcccaacaagccactcgttggtcctatgagttttcccccgaatgtttcagtgatactccaggtgaatttgctgtagaaatttgcgaagctgttaagaaggcttgggaacctaccgaggaaaatccaatcattttcaacttacctgctaccgtagaagttgcctctccaaatgtttatgctgatcagattgaatacttcgctacccatattactgagcgtgagaaggtttgcatctctacacattgtcacaatgaccgtggttgcggtgtcgccgccacagagttaggtatgcttgcaggtgccgaccgtgtagaaggatgtctctttggtaatggtgaacgtacaggtaatgtggacttggttactgttgctatgaatatgtatacccaaggtgtttctcctaatttggatttctctgacttgacctctgtcctagatgtggttgagcgttgtaataagatcccagtatcgcaaagagcaccatacggcggtgacttggtcgtttgtgccttttccggttctcaccaagacgccattaagaagggtttcaacttacaaaacaagaagcgtgctcaaggtgaaactcaatggagaatcccatacttgccattggatccaaaggacattggccgtgattacgaagctgtgatcagagtcaactctcagtctggtaaaggtggtgccgcttgggttattttgagatctttgggtttggatctaccaagaaacatgcaaatcgaattttctagcgccgttcaagaccatgctgactccttgggtagagaactaaaatcagatgagatttccaagttattcaaagaggcttacaactacaatgacgaacagtaccaagctattagtttagtcaattataatgttgaaaaattcggcactgaacgtagagtgttcactggtcaagtcaaagtaggcgaccagatcgtcgatattgaaggtacaggtaatggtccaatctcttctttggtcgacgccctatcaaacttgttgaacgtgagatttgccgtagcaaactacacagagcattctctaggttctggttcttctacgcaagctgcttcttacatccatctatcgtataggcgtaatgccgacaacgaaaaggcctacaaatggggtgtaggtgtctccgaagatgtcggtgattcttcagtgagagccatctttgccaccattaacaatattatccattctggtgatgtgtccattccatctttggccgaggtcgaaggtaagaatgctgcggcatctggctctgcataa

SEQ ID NO: 78322 - DNA, 90 bp, Saccharomyces pastorianus
atgctcagcaagagcaataatactctgtttaaccatgattgttccttgtctttttgtaaggaaaaagtctacagtaaacttctagtgtga

SEQ ID NO: 78323 - DNA, 2142 bp, Saccharomyces pastorianus
atggtcactaacaatggagatggtgagcaccttgggatccgaagaaacggaaatttaaggcatccttctaataatatgaaaatccccagaagggctcaatcaacagttctcaattcaaacccattttatagtaggaagtattctatgtctaccttaacgccgagggatatatgtcgaagcgttgattctagagtatttgtggatatgtcttctcccaattttcagactctggaggatccccacagagatgagattataaacagtgtacggcttaactacttgaacagtagcaaaagaagttccgtctctcatggaaatgaagcaatccctagggttaatccgactaagaattcttcagcaagtaccatagctgcagcaaatgttgatagtgatgacgatgagactaacctgagtagcgctggaggcgacataacgcatgatatttacaagttggttaaagcagaggatcctaaacggctcagacgccctcggtccatggaaaatgtaacatctaaaattgagcaccatactaaattgtcatcagcaagtggtttaaatgtccccggtggcttcagaagggaatttattgtcaacaaaaaaaggcaggaacatcaattaaatgattccgctagctcagacttcacttcgcatgaaagcgattcgattaaccagtcatctccatcttctaaccaagatatcgataaggtcccctttttaacaagaaactttttggaatttctgtacgtgtttggacattttgctggtgaatccttcgaggatgattttatccctgatagctcaaacatgatgatacgcggagaagatgaaaggagtgcattgctgtctcggcctgaccatatgaaagtattaccttcagccaaaggtacgacttcgacaaagaaggtttttttgatattgcttaaatctttcattggaactggcgttttatttttacctaatgcctttcataatggtggtttgtttttctcagtaagtatgctggccttttttggaatttattcatactggtgttactacatattggtgcaggccaaatcttcatgcggtgtatcctcctttggtgatattggtttaaaactgtatggaccttggatgagaataataattcttttctccctagtaataactcaagttggattctctggagcttatatgatatttactgcaaaaaatttacaagcttttcttgataacgtattccatgtgggcgtcctacctttatcttacctgatggtctttcaaacgatcatttttattccactttcgtttattagaaacatttcgaaattgtcactaccatctttactagcaaattttttcatcatggctggtttagtcattgtcattatttttacagccaaaaggttgttttttgacctgatggggaccccagcaatgggtgtcgtctatggcttaaatgcagaccgttggacgctgtttatcgggacggcaatatttgctttcgaaggaatcgggttaattattcctgttcaagactcaatgagaaatcctgaaaaatttcctttagtacttgctttggtgattctaacggcaaccatacttttcatttccatagctacattgggatatttggcatacggctcaaatgttcaaacggttatactgttgaacttacctcaaagtaacatttttgtaaacttaatccagctgttctattccatcgcaattatgttgtccacacctttgcagttgtttccagctattaaaattattgaaaataagttttttccaaagttcactaaaatatatgtcaagcacgatgatctaacaacaagagtcgaattacgtcctaattcaggaaagctgaactggaaaattaaatggctgaagaactttattcgttctataatcgtaatcattgttgtatcaattgcttactttgggtctgataatttagacaagttcgtttcagttataggatccctcgcctgtattcctttggtatatatatacccatcgatgctgcatttacggggcaatagccttccagagactaaaggggaattttggagattcaaaccaatgttagataccattttaattttcttcggtattgcaagcatgctttatacgtcttaccagagtatattcggtgtctag

SEQ ID NO: 78324 - DNA, 705 bp, Saccharomyces pastorianus
atggtaaatttttatgatgacgtggatgagtcgaaatcacacggtgaattcccattaatacccgttgtgcttcaaaattcatcagagctatcagtcagaactatacctaccgggaatgaaatcattgagtcagtgcacctgaccaaatggttacggaaatatagaaacgcacttgccagtcaactagatcgttatgagaaggggtggcaatccaagatagccaactttaggctccaggtccaacatgttatcaattattcgagaaagaatattttcaatgttgattctgaaaataaacatactgtggtcccggggtcattaatagcgttaggtgccttttttgctggaagcatagctgtgaacaggtctaattggggagctaaaaggttgatatttggtcacaaatctagtatcctcgagaaactatgtacgtcattgccatctaggatattgttaccatgggtattggcagcagctacattcaagtattgggctccacagacatcacagaatttggtcaatgccactgaaaatgatttactgccagctgatttcgtcaagtcatatcacaatacttggaaacgaatttatgaggaaggatatgttgccaagaaatgtgatttaaaacgtcaaatcgatcagacattacaaaaaaatataaggtatgcaagggaacagctttatgaaaagttggagcaagcatga

SEQ ID NO: 78325 - DNA, 717 bp, Saccharomyces pastorianus
atgacatctaaggttggtgaatatgaggacgttccagaggatgagtcccgcctcacagaagagaacgtatccgtacctgaagaagaagtagaagacgaagacgaggaagaagacgacgatgatgatcatatatatatcaatgaagaaacagaatctggtcgcgaaaaggtcttggtatcacatgccccacaagaacgtatcgttccacctttgaatttctgtcccgttgaaagatacctctatagatctggtcagccttcacctgtgaatttcccctttttactaaacctaaaactgaaaacaattatatggctgtctaacgaagaacctcaagataccctcctagagttttgtgatactcatagaataaacttacaattcgcagccatcaacccggatgccggtgaggacgataatccatgggacggtctcactgaacattctataattaatgtactacaaacgatcgtcactcaagagaattatcccttgctagtgtgctgtggtatgggaagacataggactgggacagtcattggatgtctcagaagaataatgggttggaacttagccagtgtatccgaagaatatagacgctttactggtagcagaggtggtagaattcttgtagagttgcttatagaagctttcgacactaatttagtaaaaatagacaaaaataaagcaccaagttggttactgacagctttggagtag

SEQ ID NO: 78326 - DNA, 969 bp, Saccharomyces pastorianus
atgcctttgaacaagtcgaacataagagagtacaagctagtcgtcgttggtggtggtggtgttggtaaatctgctttgaccatacaattgacccaatcgcactttgtagatgaatacgatcccacaattgaggattcatacaggaagcaagtggtgattgatgatgaagtgtctatattggacattttggatactgcagggcaggaagaatactctgctatgagggaacaatacatgcgcaacggcgaaggattcctattggtttactctataacgtccaagtcgtctcttgatgagcttatgacttactatcaacagatattgagagtcaaagataccgactatgttccaattgtggttgttggtaacaaatctgatttagaaaacgaaaaacaggtctcttaccaggacgggttgaacatggcaaagcaaatgaacgctcctttcttggagacatctgctaagcaagcaatcaacgtggaagaggcgttttacactctagcacgtttagttagagacgaaggcggcaagtacaacaagactttgacggaaaatgacaactccaagcaaacttctcaagatacaaaagggagcggtgccaactctgtgcctagaaatagcggtggccacaggaagatgagcaatgctaccaacggtaaaaatgtgaacagtagcacaactgtcgtgaatgccaggaatgcaagcatagagagtaagacagggttggcaggcaaccaggcgacaaatggtaagacacaaactgatcgcaccaatatagacaattccacgggccaagctggtcaggccaacgctcaaagcgctaatacggttaataatcgtgtaaataataatagtaaggccggtcaagtttcaaatgctaaacaggctaggaagcagcaagctgcacccggcggtaacaccagtgaagcctccaagagcggatcgggtggctgttgtattataagttaa

SEQ ID NO: 78327 - DNA, 123 bp, Saccharomyces pastorianus
atgacagcaaagacgaaacaaagctggaataaggggatctgggaaaacgggaaacaaggttcacatcagcaaacatttctaccgaaaatctgggtaaacatttatagtacaccaacatcttaa

SEQ ID NO: 78328 - DNA, 123 bp, Saccharomyces pastorianus
atgacagcaaagacgaaacaaagctggaataaggggatctgggaaaacgggaaacaaggttcacatcagcaaacatttctaccgaaaatctgggtaaacatttatagtaccccaacatcttaa

SEQ ID NO: 78329 - DNA, 156 bp, Saccharomyces pastorianus
atggcaaatggaaccattctagctcacagtctgcgccatcacaccccaccatttccccgtatgccacttggttacagtagcagtagagcggttcgccgtagtcgttggtttttggtcttgatatcctgctgttgttgctgtttccgacgctgctaa

SEQ ID NO: 78330 - DNA, 663 bp, Saccharomyces pastorianus
atggataaacatacagcagctattccaacattaactatcaaagtagtcttactcggagaatctgctgtcgggaagtcctcaatagtcctcaggtttgtatctgacgattttaaagagagcaaagaacctactattggtgccgcatttttaacaaagagaattacaagggatggcaaggtcattaaatttgaaatatgggatacggcaggccaggagagatttgctcctttagcgcctatgtactacagaaatgctcaagctgctttggtagtttttgatgttactaatgaagggtctttttataaggctcaaaactgggtcgaagaactacacgagaaggtaggacatgatatcgttattgccttggtggggaacaaaatggatttgctgaataatgatgacgagaatgaaaatagggctatggaagcaccagctgtacaaaatctctgtgacagagagaacctcttatatttcgaagcaagcgctaagactggtgagaatatttaccagatatttcaaacattaggcgaaaaagtaccatgtcctgaacaaaatacacgacaaagctctactcatgatcgcacaattaccgataatcaacgaatcgatctcgaatcaacgactgtagaaagtactagggagactggaggttgtaactgctaa

SEQ ID NO: 78331 - DNA, 1203 bp, Saccharomyces pastorianus
atggacgagaatgaatttgataatcaaagggagaataaagctgtagctcgagtgatcatatcatttcttaagtatgaagagtatgccctaaaggaaatctacaatttgagagtgaaaaaatgggaatcgatctcagatcgtcaaaaagacatggtaccaaactatacaaaatatttagctaatctgaaagccgcaattatagaaaatggcaagttctttagaagtgtcgccgaatatgccctgcaatcaataagttttgagccaggagaaatcttacaaccaaacgatttagatatgagtaaaacatgctctttacttacgcaagtttatagggagtggtccgcagaggccatttctgaacgtaattgcttaaattcgaggcttggaccgtttttgaagaccctatcacccccaaaagccaacattttgataccgggttgcggcacaggacgccctctcgtggatcttagcagaatgggctataattgtgaaggtaacgaattttcataccacatgctgcttgtatctcaatacatgttgaatgcaggattactccaaaaccaaattattatctatcccttcatacactgtttctcccactggaaaaaaattgaagatcagttgtctcccattaaggtgccggacatagaagcgtggtcttcaaataaaggtatggggtccatgtcgatatgtgctggctcgtttgttgattgttatggtcgtaatcaaggcacaaaaatctcgtcacattatacattttcgcgaaggatgcaactaagtagagcaaaagctgaaaactccaaagacgttgtagtaacaaacttttttatagatacgggatccaacatcttggattatttggatactattggccacgtcttgaagccaggcggaatctggtgcaatttcggcccattgctttatcattttgaaaatgaccatggggttgaaactacctacgaagttaacccttactctgggtttcaagataaaatcaatgactatacaccactgatgggtttagagctttctagcgatgatatcataagcattgccacaaatcatctggactttgaattaatacggagagagtcaggaatactttgtgggtatggccgctacgcgggtccagaaagttgcgccatgcctggatacatgtgccactattggatcctgaagtcgaaccctaccaatgaatcataa

SEQ ID NO: 78332 - DNA, 579 bp, Saccharomyces pastorianus
atgtctgaaaaggccgttagaaggaaacttgttattattggtgatggtgcttgtggcaagacctctttactatatgtatttacattaggaaaattccctgaacaatatcatccgacagtgttcgagaattatgtcactgattgcagagttgacggaataaaagtgtccttaacgctctgggatacagcgggacaagaggaatatgaacgtttacgtccattctcatattcaaaagcagatataatattaattgggtttgctgtagacaattttgaatcactaattaacgcaaggacgaaatgggcggatgaggcattacgatattgtcctgacgcaccaatcgttcttgtaggcttgaaaaaagatttgaggcaagaagcccattttaaagagaatgctaccgatgaaatggttcccattgaagatgcgaaacaagttgcaagggccattggggccaagaaatacatggaatgtagtgcactgactggtgagggtgtggatgatgtctttgaagtagctacaagaaccagtttgcttatgaagaaggaaccaggggctaactgttgcataattttataa

SEQ ID NO: 78333 - DNA, 309 bp, Saccharomyces pastorianus
atggcaggggatagtataagcgctgacggcactggcgtccatccagttgaactgtcggtgtattcagtattgtccaccgatttagacggactgtatcaatcgatcaatgaattacgcgagtcgcaagcactactcatccttatgcttcggaaggttcgcgataaacttcgaagagaaggtcaagtcctttatgacccagaaccattcaaaccaaccatggataaactggctgacttatctgcccgtgtgcgcattctctcacaaagatacgaggagcttcaggggaatgctagagccctcaacaactaa

SEQ ID NO: 78334 - DNA, 309 bp, Saccharomyces pastorianus
atggcaggggatagtataagcgctgacggcactggcgtccatccagttgaactgtcggtgtattcagtattgtccaccgatttagacggactgtatcaatcgatcaatgaattacgcgagtcgcaagcactactcatccttatgcttcggaaggttcgcgataaacttcgaagagaaggtcaagtactttatgacccagaaccattcaaaccaaccatggataaactggccgacttatctgcccgtgtgcacattctctcacaaagatacgaggagcttcaggggaatgttagagccctcaacaactaa

SEQ ID NO: 78335 - DNA, 2493 bp, Saccharomyces pastorianus
atggcaatcaagtcattggaatcgttccttttcgaaagaggtctagtaggatcctatgccattgaggctctgaataattgtaccctgggtatagacgtcaaccattatgtttccagattgttgaccaataaaagagaacagtatttggatgccattggtggtttccctaccagtttaaaaatgtatttggaaagcgacttaaagatattcaaggatttcaatattacccctatttttgtctttaatggtggtttgacttacaaccaattagaggcatcgggccattttactgcagcatctgcttctgcgtcgatttcgtcaaccactacttccagcagcggtaccaatgccacaacaagatccaacacggaatccgttcttttacagagaagtagaggctggacacaatggaacaacttgattagttcgaatcagaattcctatattgaccagcctattcaaccccaagagccattcagacataacaccacaattgactccaaagcttaccaaaacgatttgatcgcttattttattgagcatgggtatatgtaccaagtggctccttactcctcttggtttcaactagcatatttattgaatagcgcttatattgatgcgatctacggcccaactgattgtttgatgctagattgtgttgataggttcattttgggtatggaatttccaaataaagaatttcgattcattgacaggtcaagagtgatgaaggatttaggttgtacccatgaagagtttatcgatattgctatggctgtaggtaatgatttgcaaccaacaactttaccaccattgcaaatttatccagttcctcagctgtttgatattgctctagaaatggttttgaatacaggtacaaacttctatgcctatcaactatctacaaccttacaaaatgactccaaagagaatattcaaaactaccaaagaggtatttctgcattaagatacatgccggtcttgaaagatacaggtaaagttgaattatttgttcaagagatcgttgtttcagaggaggacagtgaaaaaaataacaaggatggaaaaaagagtaatctttcctcaccatcttctgcgtcatctagtgcttctcctgctaccaccgtgactaagaacgctagtgaaaagttaacttatgaaaaatccagcactaaagaggttagaaaaccaagagatattcctaatgatgttcatgattttatcggccaaatgttacctcatgaatactatttctatagatccataggactggttactggaaaattatttgacgcaattgtcacaggggtttatcctgaagagcctccattgggcggaggatcttctacatcctacaggaaactggtttccaagtccgttgaaatcttcaagaataaagaaatcaatttattaactcaaccaattaacagatactatcagattaaacaaattaaacaagtcaagtggtatgcggcaaatgagcctaccactttgaccaacaggatgtcaccttctatgtttgaaactatcaaccacttaattgttaaaacagaaacgtctgatgaaaaggagttttctatctctgagtttattacaacaataaatggttctagcaatatggcgaaagattttatatctgaaaaagtcattttcccaaactccgtaccaatcgaatccaaattaaactcaccatttaatttattgtcgactaatttcttaagattactagtgctattggagttcttcacttttgatttcaaggaaaaactgctagagcctacaagatggggtgaggtattattaaaattaaatgagctcaatattgaccgtaagtatcacgaatcagttattatctttttggtatttttgaaatgcgatgtcttaaaacttgacgaagaagttcaaccaccggctccctcagccctatctcaagccactcttcgttcatatcctgaagaatcattgtacgtcttattgattacgcgtgtattaactttattccaagtggaccaaaagccatcaaattaccacggaccaatcgataagaaaactttgatctttagagatcatctttctttcataaaggaaaatttaaatgaactttttgaagccgttttgatctcatctttaacttctggcgagtttaatagattatcacttgataactttggttgggcaagaaagattgttagatatttaccgttcaaattagattccccaaatactataatggctatgatgtgggagtttttcttacaaaaatatcttcacaatggtaatgccaagaatgatgcattgtctttagttgctactgaattcaacacttacaaatccacaccaaatcttgatgaacagtttgtcgaatcccatagatttcttcttgaaatttcaaaagtcatgcaggagctaaatgctgcgaaattaatcgatgaaaacgtgtttaaattattcactaaagcagttgagtttactacaacagctctatctagctga

SEQ ID NO: 78336 - DNA, 1050 bp, Saccharomyces pastorianus
atgcccaagttggaacaattcgaaataaaaaaatactggcaaatcttctcgggtttgaaaccaatagagaataaggtaaaccatgaccaggttttaccaattctttataattccaaattagattcatcggttctaaacaagatttggtttttagctgatattgatgacgacgacaatttagactttgaggaatttgtaatttgcatgagattaatatttgatatggttaataaaaacattagctctgttccagatgaattgcctgattggttgattccagggagtaaggtgaatctaatcaaagaaagaaagaagcgcaagcaaatagaaaacgcagacttgcctccaaagaaggaaatcaaagtagattggtacatgtctccagatgatttgaatcaatatgaaaaaatttataatagctgtgcaaaactaaccgatggtactattacattcaacgaactgtcaacaaaactttccacaaaattttttaacatcagtaagacagatttaaataaagtttggagtttaattaacccacaaaatttgccatcaattgatagagatcctactttttattttattcactgtttaagacaaagaaatgatttgggtgctgaaattccagcaagtttaccaaattctctggcggaggtgtgcaataaaaaacaactgagctatgatttacggtcttctcaacctcctacaaagagaaaagaagaagctaacgaagtggacaatctgcgtgacaatgggcagaactcgagttccgatagcagtggcagtaacgtgctttcaaatgaaaacagtataaagcaaaaatatgcttctctgacagatgatcaagttgcgaacatgagagaacaattagaaggccttttgaactacaaaaagagtgaaaaaactcaaggaggctcaaaactttctaagcggattaacatcaggtcgataactgatgacttggataacattgaacagcaggttgaagtattggagaattacttgaacaataagagacacgaattgcaagcattacaagcagaaatcaattga

SEQ ID NO: 78337 - DNA, 432 bp, Saccharomyces pastorianus
atggtcgttcacatcttggggaaaggtttcaaaggtaaagaggttattaaaatcgcactggcctctaaattttacggcataggtaaaacaacagccgaaaagatatgctcgaagttagggttctacccttggatgaggatgcaccaactatcagaaccccaaatcatgagtatagctagtgaactgtcgacaatgacgattgaaggagacgctagagcaatcgtaaaagacaatatagctctaaaaagaaaaattgggagttatagcggtatgagacatacattgcatctgccagttaggggccagcatacaagaaacaacgcgaaaactgcaaggaagcttaataaaatcgatagacgtggaattcacacattttctcaagcaaaagtacaacataatccgtccctttggtcttgtatctttggcaagtga

SEQ ID NO: 78338 - DNA, 1101 bp, Saccharomyces pastorianus
atgacgtggatactaagtactggtatgggccctcatgaggacaagtatgccaagcatgagcgagcgacctttaaaaagacgtacagttctatgaaaacgctttctttgaatcatttaactgccaagcagcatatgctgatggccttatgcagggacatatcccttttaccgccgttaacttacatcttcacatctctgcggaaggcttggagagtctccatgcgcaccagcataacgctttacgagccacaatcactaagagatgcgttcacttatttctggcaaaaacttaatagcgcttacgacaataactcatcatttgaaggaacttcgcaaaaggctgtgaatggcgacggtaaggattcactcctattatccgcactcactacagcaagagcgtctgaatatcttctttgctcactctggtgcctggtgtctttatacctctcgtatgccattctcgactctttgatggtccgatggatcgtcaagtactctactgtggccgccattttaagaatgttttccatgtcattaatcattgtcaccttagaactccttcttttgtcgtctttgtctccggaactcgactattttttgcatacatggatactcattagttgtgtactaacagcagtgtacatctggcaaagttatcttacctcggatctgaggtatatcagaaaccaggaaggcgaagtacaagaggatactaatgttccagaagaaacagaagactatgaggatggtgaagatgacgctgatgaagactcacatgttgtggtagccgacgaaagtacagtagatgttccttccaacgacagtctctccgataacagtgatggcggattgtttcctgttaacaggccctcagtctctcattcacaaagccctaaaagacccaaaaaatatccaaaaaaagcattcaattttaccactaagcgaacgatagatctatataaaatcacggttctttgtgtcgtccctgtgggactagctagttttatcaccatgttaggtttactgcgaaacctgttcatccaaagattggatgtagagcaattagaaagaatactgcatgaaatgcatccccccgcatga

SEQ ID NO: 78339 - DNA, 1224 bp, Saccharomyces pastorianus
atggagacatacgagactagcattgggactcagtcttatcccccgactttgttcccacctcccctgggtaccggtgggtttaccacttcaggttatatacatgcgctcgtggattctacatcgaactcgaactcgaactcgaactcgaactcgaacacaaattcaaacacaaattcaaattcagataccaagattcctatagtgcaaatatcggatgactctcatataacacacgacagcttcaaaccatatatggagtaccacgatgcttcgcacttgaggaaccgtaacataagcaaagcggaccaggttgatagcactgaagtgatggaacagtttacgcaatggtctaattataagatgaggtctcgctctcctaccttaaacgcaaagccaattcgacacacttcacaacgaagaacagactttaccagcaaaaatgaactctccaagttcagcaagaatcataatttcatttttcacaaagggtttttgaagaggcaacactccatacgcagggaagacaggcaagcaaaggtacggtcaagattcaggagcaagaaggagctgacatctgttttgaactatatagaactggaacaaatggatattgcaaatgtcctggcttcgcaatcggtaaacttacacgctatcagaaatctcactagcagggaccctgcggtaactcctatcccatttttaagaagccagatgtatgccaccagtagtcgtccaccgtatctaaggaaccgctccatacgtaggaaactacccaaatcacaaccaggtagtctcccgacgactacgcctgcgacggcgacgaaaacaattaaacagaattcaacgaccccaacaacaagatctgtttataacaagaatgtgggacggtccaatacttcccctagtgtgttgtaccacccaaaaagaagaggaaaattgaacaccaaatcccatgcaagaaaggagcaactgctgttggaactgtggagagaatacttaatgctggttataacacagaggacgcaactgcgcctgactttgctttgctctccgggttcagcatcgaatgaaagctctgtctgctcttctaacgccagcgacttagacatgtccctcttatctactccttcaagtctcttccagatggcaggtgagaccaaaagcaatcctataattatacccgacagtcaagacgatagtatacttagtagcgaccccttttaa

SEQ ID NO: 78340 - DNA, 1587 bp, Saccharomyces pastorianus
atgcaacaaaatacgtctttatatgactctttgaacgttactgccgctgcatccacatctgagattaagaaagcttacaggaacgctgcattaaaatatcatcctgataaaaacaatcatacagaagaatccaagcgaaagttccaagagatatgccaggcatacgaaatacttaaagacaatcgcttaagagctttgtatgatcagtacggtaccacagatgaagtcctgattcaagagcagcaggcgcaggcgcaacgccaacaagccgggccgttcagttcatcctcaaatttcgatacggaagcaatgtcattcccggatctatctccaggtgatcttttcgcgcagttttttaatagttctgctaccccctcttctaatggctccaaaagcagttttaattttagcttcaataatagctctacgccgagtttctcctttgttaatggcagtggcgtgaacaatctgtactcctcgtcagcaaaatacaactccaacgatgaggaccatcatttggatagaggccctgatatcaaacataatctaaagtgcacattgaaggaactctacatgggtaagactgcaaagttgggtttgaataggacaaggatttgcagtgtttgtgatgggcacggtggtctaaagaaatgcacttgtaaaacatgcaaagggcaaggtattcaaacccaaactaggcgtatgggacctctagtacaaagttggtctcaaacttgtgcagattgcgggggtgccggggtttttgtcaaaaataaagatatttgccaacagtgccaaggtcttggcttcattaaggagaggaagattctacaagtcaccattcaaccgggatcgtgtcataaccaacttatagtacttacgggcgaaggtgacgaagttattagtactaagggaggcggtcacgaaaaggtaatacctggtgacgtcgttatcaccattttacgtttaaaagatccgaatttccaggttatcaattactccaatttgatatgtaagaagtgcaaaatcgacttcatgaccagtttatgtggaggcgtagtttatattgaagggcaccctagcggtaagttgatcaaacttgatattatacctggcgagatactgaagcctggttgtttcaagactgttgaggacatggggatgcccaagtttatcaacggtgttcggagcggtttcggtcatctatatgtcaaattcgatgtgacgtatccagagagactggaacctgaaaatgctaagaaaatacaaaatattctggctaatgataaatacattaaagcagaacgttccaccatggaaaccgcagattcagactgctattgcgatttggagaagtcatatgacagtgtggaagagcatgtgttaagtagctttgaggcccctaatttaaacaatgaagttattgaagacgacgaccttggtgatttgattaatgaaagagattctcggaaaaggaacaaccgtcgattcgacgaaagtaatattaataataataatgaaacgaaacgaaataaatattcttcaccggtaagcggtttttatgaccataatattaatggatattga

SEQ ID NO: 78341 - DNA, 1755 bp, Saccharomyces pastorianus
atgtcgcgggaggcatttgatgtaccgaatataggtactaacaagtttttaaaagtcacacctaatttatttaccccagagcgattgaatttatttgatgatgtcgaactatatcttacgttaataaaagcatccaaatgtgtcgagcagggagaaaggctgcgcaatataagttggagaattctgaataaagctgttctaaaggagcataatattaatcgatctaaaaaaagagacggcgtgaagaacatatattatgtgttaaatccaaacaacaaacagccaataaagccaaagcagccagcagtaaagcagccaccattacaaaaggccaatttgcctcccacaacggcaaaacagaacgttttaactcggccaatgacatcaccagctatcgcacagggtgctcacgatagatccttggataatcctaattctacaaacaatgatgtgaaaaatgacgttgctccaaacagacaattctccaaatctactacgtcagggttgttttcaaattttgcagacaaatatcaaaaaatgaaaaatgtgaaccatgttgctaataaggaagaaccacaaactattatcactggttttgatacaagcactgttataaccaagaaacctttacaatcaagacgctcaagatcacctttccagcatataggagacatgaacatgaactgcattgataatgagacttccaagagtaccagtcctactcttgaaaatatgggaagtagaaaatcctcttttcctcagaaggaatctttattcggaaggccaaggtcttacaagaatgaccaaaatggtcaactgtcactttcgaaaacatcctctagaaaaggaaaaaacaagatatttttcagcagtgaagatgaagattccgattgggatagcgtttcgaatgattcagaattctacgctgatgaagatgatgaagagtacgatgattataatgaggaagaagcagatcagtactatagaagacaatgggacaagcttttatttgccaaaaatcaacagaatcttgactcaacgaaatcatctgtttcatcagcgaacacaatcaactcaaacacatcccatgatcccgtacgaaaaagtttactcagtggactattccttagtgaggcaaatagcaacagtaataaccacaatactgcacatagtgaatacgcttctaaacacgtttcgccgactcctcagtcctctcatagtaatatcggtactcaaccgcagcaaaatccaccgagcgctaatggtataaaacaacaaaaaccttctttgaaaacgagcaacgtgacagctctggcatcgctatctcccccgcaaccatccaacaatgggcggttatcgatggatatacaaaaggacttcaaaactgataatgagtccaatcatttatatgaatctaatgctccgctaactgctcaaactatactgcccaccgccttatctactcacatgtttttgccaaataacattcaccaacaacgaatggcgattgccactggtagtaatacgcgacatcgtttttcgaggcggcagtcgatggatatcccatccaagaacaggaatactgggtttttgaagaccagaatggagatctctgaggaagaaaagatggtacgtacaatatcacggcttgacaatacgagtattgcaaacagtaatggaaatggtaatgatgacacctctaatcagagaacggaagcactggggcgtaagacaagtaatggagggcgaatatga

SEQ ID NO: 78342 - DNA, 873 bp, Saccharomyces pastorianus
atgctaagaagacaagcccgtgaaaggagagaatatctatacagaaaagcgcaagaattacaagattctcaactgcaacaaaaacgtcaaataattaaacaagcgctagctcaggggaagccattgccaaaggaactagcagaagatgagagtttacaaaaggatttcagatatgaccaaagtttaaaggagggcgaagaagcagatgatctacaggttgatgatgaatatgctgccacaagtggtataatggatccaagaattatcgtcacaacatctcgtgacccaagcactcgtctctcgcaatttgccaaagaaattaaactgctatttccaaatgctgtcaggctgaacagaggtaattacgtgatgccaaatctagtggatgcttgtaaaaaatccggtactacagatttggtggtattacatgaacatagaggtgttccaacttctttgaccatatcacattttccacatggacccaccgcacagtttagtttacacaatgttgttatgagacatgatattataaatgctggtaaccaaagcgaagtgaatccacatctaatatttgataactttactaccgctttagggaaaagagtagtctgtattttaaagcacttgttcaatgcggggcccaaaaaagattccgaaagagtaatcacttttgcgaataggggtgatttcattagcgttagacagcatgtatatgtgagaacaagagagggagtacagattgccgaaattggtcctagatttgagatgaggttgtttgaactgaggttgggaactttagaaaataaggacgctgatgttgagtggcagttgagaagattcataaggactgccaataaaaaagactatttgtga

SEQ ID NO: 78343 - DNA, 1731 bp, Saccharomyces pastorianus
atgaatgtgctgttaaaaagatgcagtttaacgtttgcaccgagatggctgtggtgcaagtgtcgaagtagcaggtgcaggccgtattctctggcacacgcggtcgacacaagtaagatggaggcaaccaggaggaacggtcagattgtgaaggacctgggtagatactatccgtcaatgtcagaatcagcactccacgatttttgccgggactataaagaagtcactatcgcagactttaatgagagattcttgggcaacccagccacattacaccatgaggataatcctaatttgttacttagtattaatggcaggattaaaagcattaggttttcaggccagaagattgtttttatagatctttacaacggcagtagcggattgaagaatgatacgcaactgcagttgatcgtaaactacaataaaattggtgggagtagtgaggataaggcgaatttctcagaatatatgaactttttgaagaaaggagattatattaaggcgctcggttatcccgggttttcccaatccagagtcaagatgctgtccttgatatgtaataagctacctatagtactgtctgtttcgcaactgccgttaccttccagactgaatgatgaaaccaagatcaaatctaatagagttgttgactaccaattaaacggcactcagacactgctagtaagggcgcgtatcatcaaacttttgaggaagtttctcgacgacagaaacttcgttgaggttgaaacgcctatactgtcatcaaagtccaacggtgccatggcgaagccctttataacgtcgtccaaggacttcgaccatttggagttgcgtattgcaccagaattatggctgaagaggcttataattagtggtttacaaaaagtatacgaaataggaaaggtctttcgaaacgaaggcattgattccacccataatgctgagttttccactttagaattctatgaaacttacatgtcaatggacgatatagtcgcaaggactgaagatttgttcaaatttttgattactaacttgcaaaagttctttcaagatacccgtctgcctgtccctaagacctttagtgaattacatctggcactatccgagaataattggaagtttagaaaagtcgaattcctgcccactttgaacaaagagcttggcattgatctaatgaactctggattggatatcaataagccgagcgaacttttgaaggctttaccgaaagacattgcggagaagtattttccttctgcagataacactgggcaattatcttcgctgcaaatcctaaataaactatcggacgtgttcctcgagcagcgccattgtcaatcaaccttgcctacggtaatataccatcagcctgcgatattatcgcccttagccaagacggatccgcaaaataagcaagtcacgaagagattcgaagtcttcatcaaaggtaaggaatacatcaatgcttacgaagaggaaaattgcccccaattacaactgcagaagtttctacaacaaaagcagattaacgaattgacaggaaacaaaactgagaccttatcgcctgttattgactaccagtatgttgagacgatgaaatacggtatgcctccagtaggtggctttggccttggcatagatagattgtgcatgctattttgcgacaagaagaggatagaagaggttctgccctttggctgtgtggatgatgtaaacaggcagtaa

SEQ ID NO: 78344 - DNA, 924 bp, Saccharomyces pastorianus
atggtaccccccacggtagaagcatccttggagtctccatacactaagtcgtacttttcacctgtcccaagcgcgctcttggaacagaaggactctccaataataatgggtatcgatgaagctggcagagggcccgtattagggccaatggtctacgcagtagcctattctacacagaaatatcaggacgaaactataatccctaactacgagtttgacgactctaaaaaacttacagatcccatcagaagaatgctgttttccaagatataccaggacaacgaagaactaacccagatcggctacgcaactacgtgcatcactccgttggatatctctagaggaatgagcaagttcccaccgacgagaaactataacttgaatgagcaggcgcacgatgtcacaatggcactcattgatggcgtgataaagcagaacgtgaagctcagtcacgtgtatgtggatactgttggaccaccagcgtcctatcagaagaagctggagcaacgatttcctggtgtcaagtttacggtcgccaagaaggcagactcgctctactgcatggtcagtgtggcgagtgtcgttgcaaaagtaaccagagatatactagtcgaatccttgaagagggatcccgatgagatcctgggttctggatacccctccgacccgaagacagtcgcatggctgaagcgcaaccagacaagtcttatgggctggcccgccaacatggtaagattctcatggcagacatgccagactctgttagatgacgccagtaaggatagtatccttatcaagtgggaagaacaatatatggacagcaggaagaacgccgcacaaaaaaccaagcaattgcagctccagatggtcgctaagcctgttagaaggaagaggctgagaaccctagataattggtaccggtga

SEQ ID NO: 78345 - DNA, 1449 bp, Saccharomyces pastorianus
atgtctgcctttgtcagggtggttccaagaatatccagaagttcagtactcaccagatcattgagactgcaattgagatgctacgcatcgtacccagagcacaccattattggtatgccggcactgtctcctacgatgacgcaaggtaatcttgcttcttggactaagaaggaaggtgaccaattgtctcccggtgaagttattgccgaaatagaaacagacaaggctcaaatggactttgagttccaagaagatggttacttagccaagattctagttcctgaaggtacaaaggacattcctgtcaacaagcctattgccgtctatgtggaggacaaagctgatgtgccagcttttaaggactttaagctggaggactcaggttctgatgcaaagaccagtacgaaggctcagcctgccgaaccacaggcagaaaagaaacaagaagcgccagctgaagagaccaagacttctgcacctgaagctaagaaatctgacgttgctgctcctcaaggtaggatttttgcctctccacttgccaagactatcgccttggaaaagggtatttctttgaaggatgttcacggcactggaccccgcggtagaattaccaaggctgacattgagtcatatctagaaaagtcgtctaagcagtcttctcagaccactggtgctgccgccgccactcctgccgccgctacctcaagcactactgctggctctgctccatcgccttcttctacagcatcatatgaggatgttccaatttcaaccatgagaagcatcattggagaacgtttattgcaatctactcaaggcattccatcatacatcgtttcctccaagatatcagtctccaaacttttgaaattgagacagtccttgaacgctacagcaaacgacaagtacaaactgtccattaatgacctattagtaaaagccatcactgttgcggctaagagggtgccagatgccaatgcctattggttacctaatgaaaacgttatccgcaaattcaagaatgtcgatgtctcagtcgctgttgccacaccaacaggattattgacaccaattgtcaagaattgtgaggccaagggcttgtcgcaaatctctaacgaaatcaaggaactagtcaagcgtgccagaataaacaaattggcaccagaggaattccaaggtgggaccatttgcatatccaatatgggcatgaataatgctgttaacatgtttacttcgattatcaacccaccacagtctacaatcttggccatcgctactgttgaaagggtcgctgtggaagacgccgctgctgaaaacggattctcctttgataaccaggttaccataacaggaacctttgatcatagaaccattgatggcgccaaaggtgcagaattcatgaaggaattgaaaactgttattgaaaatcctttggaaatgctattgtga

SEQ ID NO: 78346 - DNA, 183 bp, Saccharomyces pastorianus
atgagtttcctaccatcttttatcttaagcgatgaatctaaagaacgtatttccaaaattttaactttgactcataatgtagcacattatggctggatcccatttgttttgtatttgggctgggcacacacttctaatagaccaaactttttgaacttactgtctccgttaccaagtgtttaa

SEQ ID NO: 78347 - DNA, 2589 bp, Saccharomyces pastorianus
atgtccagcagcaattttaacgagatgaacgaactaaatatgactcaaacaaattatggcagcacaaaatataccgctcagcatcatcaaggtgtaataaatgccatcatctcttcactgacagccccagatcagccaactaccgtatcattacaatattccaacgacaagaacatggcgacggaaatacaagcttatgctaaactctccggaccaaactggacctattatgtgaaggatttggaagtttctattggcagaaatactgatcccttaaacagtgcactacaggaaaattcagatggtgtaaaaaactcatatagagtgaatattgatctcggacctgccaaagtcgtttctagaaagcacgccataataaaatacaacatgaatatcggcggttgggaattgcacatattgggccgtaacggcgctaaagtaaactttcaaaggactcataatggacccaacaatcctcccattcgattatcttccggaaccctgctagacataggaggaacacaaatgatgtttatcctgcccgacagtgacccggttgttgctcctatttgtatagaacacctgatgcctaatttaataaacatgttcggattggaaggcaacaacaaccccctgctaagagacattataaaacagtctaattatgctaagcaaaggcaattaacttctaatcaacaaatcaaagggtttaagctttatggaagtggtggcaatgctccttttagtagcggagcgaacttgggccctagcgaacaaggcatcttcaacaacaataacaatagtaagaacaagaatggctactttacgtccataaacccaaactatacagcatctacaacaacaagcaataccatcaatccacaagcggcttctccacagggtcctccaaataccatcattgctgcaaattttgtagattcatacaagtcatcaaatgcctatccccaagctttggattttacttccgatctatcccatgacgaaaacaggaacgttaaaccacctcattcatacgcaactatgataacacaggccatactgtcgtcgccggagggagttatttcactagccgatatctacaagtatatttcttccaattatgcatactacaggtttgctaaatccggttggcaaaactccattaggcataatttatcattaaataaggcatttgaaaaagttccgagaagacccaatgagccgggcaaaggtatgaaatggagaattagcgaatcttatcagcaagaatttctaaacaagtggaataccggaaaagtggggaaaatcaggcggggatcctcagtagcaaggcaactacagttacatatggcaaaattcaacagtttacccatggaaatggactataggttatcgcttaacatggctcaaccccctaaacgacaactacaatctcacaatgtgctagaaccatccaacaataacatcatagaagggttcgtacaacatgtcccatcccaaggtaaccttcctgcatcgcaacaatcacagccccctgtgtcacatcaaaatcagtcacagcagccgccaccacaggaacaacgtcaagagattcaatttaccttcgcggatacgcaaaatcgaaatatagcgttagcaagacctatcaagacgccacaattgcaagctcccaattcaaatgctaacttaaatcaaaacaatatgaaagaatacaaagagtcacttcatccgcctgcaatatcaatatcacaaatgaataggcaatctccaaacaacgctctagtgtcgttcactaatgcatgtgctaattccaaaataataaacaacatcagcgatagcgccgacaaatcgacaaacaataacggcggtaccaaaatgaatctacccgccatatctacttcttcacttgatgaaaatggtaatttggagccgacaactaccacatcttccggtaattctaactcagttccgcaaactggaacaacaacttcctcattggcagcgaacagtctacgcctttctcaaccatatgacacgctattacgatctcctactaaggcatttcatattactgcgatggaagcatatacaccagaaagaggaagcgctaatagggctaggtcacctcttcatagtaatagcaacaatactaataataacggcgcaaataattctaatttacagactagcggaatggaaaacaaacaaacaggtctagtattggattctaatgtcttgaaaagcatggaatcaaacaatgataatagacggctgacaccatcaacaagtaaatcgcagaatgtcaaaagttctccaggtgtatggaatttattgcagtttagctcaacaaacaacactcctgccgcagataacggaggcaacaagagaggattttccataaatccggacattaaagccaaagaaaacgagaatgctacttcagaaaaagattcggactctaactcaaatgatctggaaactaaagatattaattcttcacctttgaaaaaccaaggtggtagcaccgccaatgccaaggaactaatactagatacggatggtgcaaagatcagtattatcaacaactaa

SEQ ID NO: 78348 - DNA, 576 bp, Saccharomyces pastorianus
atgaagtacattcaaaccgaacaacaaattgaaatcccagaaggtgttaccgtcagcattaagtccagaatcgtcaaggttgtcggtccaagaggtactttgaccaagaacttgaagcatattgatgttaccttcaccaaggtcaacaaccaattgatcaaggttgctgttcacaacggtgacagaaagcacgttgccgctttgagaaccgttaaatctttggttgacaacatgatcactggtgtcaccaagggttacaagtacaagatgagatacgtctacgcgcatttcccaatcaacgtcaacattgttgaaaaggatggtgctaaattcattgaagtcagaaactttttgggtgacaagaagatcagaaacgtcccagttagagatggtgttactatcgaattctctactaacgtaaaggacgaaatcgtcttatctggtaactctgttgaagacgtttcccaaaatgccgctgacttgcaacaaatctgtcgtgttagaaacaaggatatccgtaagtttttggatggtatctacgtttcccacaagggtttcattgtcgaagacatgtaa

SEQ ID NO: 78349 - DNA, 1263 bp, Saccharomyces pastorianus
atgaaactgtccgccaccactcttaccgcggcttcattgatcggttatagcacaatcgtttccgctttgccgtatgcggctgatattgacacaggatgtactactactgctcatggttcacaccagcataagagggccgttgcagttacatacgtttacgaaacagtcactgtcgataaaaatggtcagaccgtcactccaacctcaactgaagcctcttctacagttgcttccactactactctgatttccgaatcttcggtcaccaagtcttcttccaaagttgcttcttcttctgagagtactgaacaaaccgctaccacctcgtcttcggctcaaacaactctgacatcttcagaaacttctactagcgaatcctctgtgcctatttccacttctgggtcagcttccacatcttcagcagcttccagtgcaactggaagtatctacggtgatttggctgacttttcaggtccatatgaaaaatttgaagacggtaccattccttgcggccaatttccatctggtcaaggtgttatccccatcagctggttagatgaaggtggctggtctggtgttgaaaatactgacacttcgacgggtggctcttgtaaagaagggtcttactgctcatacgcttgccaaccaggtatgtccaagacacagtggccttctgaccaaccatctgacggcagatccattggtggtttgctatgtaaggacggctacctgtaccgttcaaatacagatactgactatttatgcgaatggggcgttgatgccgcttacgtcgtctctgaattgagcgacgatgttgctatctgcaggaccgattacccgggtaccgaaaacatggtgattcctacatatgtgcaagcaggtgactctttacccttgactgtcgttgatcaggacacctactacacttggcaaggattgaagacatccgcgcaatactacgttaacaatgccggtatttctgtcgaagatgcttgtgtttggggttcttcaagttcaggcgtcggtaattgggctccattgaactttggcgctggttcttctgatggtgtcgcctacctttctttgattcccaacccaaacaacggtaacgcattgaatttcaatgtcaaaattgtcgccgctgatgactcttctacagtcaacggtgaatgtatctatgaaaacggtagcttcagcggtggctctgacggttgtaccgtttccgttactgctggcaaagctaagtttgttctatacaactaa

SEQ ID NO: 78350 - DNA, 1437 bp, Saccharomyces pastorianus
atgaatgctttgacaaccatagattttaatcagcacgttatcgtccggctgccatcaaaaaattacaagatagtggaactaaagcccaacacctctgtatcattaggaaaattcggtgctttcgaggttaatgacataattggttatcctttcgggttgactttcgagatatattatgatggcgaagaggtttcatccgatgaaaatagagattcgaaaccaaagaacaaaattcccatcgggaaagtaaggctattatcgcaggagatcaaagatgtcaataatgataaagacgatggtcaaagcgagcctcctttatctattaaggaaaaatctgtgtctcttgaattgtctagcattgacagcagtgctacgaatcagaatctggttaacatgggcagcaaggcccaagagttaaccgttgaagaaattgaaaaaatgaaacaagaatctttatctagtaaagaaataatcgacaaaattatcaaatctcacaaaagttttcacaacaagaccgtatattctcaagagaaatatgtgaataggaagaaacaaaaattcgccaaatacttcaccgttgagtatttaagtagctctaaccttttacaattcttaatcgacaaaggcgatatacaaagggtattggatatgtctcaggaatcgatggggatgctgttaaatcttgcgaacatccaatcagaaggcaactatctctgtatggatgaaacgggtggtttattggtttactttctgttggaaagaatgtttggcggtgacaatgaaagcaaatccaagggcaaagtcatagttattcacgaaaatgaacatgccaacttggatttgttgaagtttgctaattattctgagaaatttattaaagagcatgtacacaccatttctctattagatttttttgaaccgcctacactgcaagagattcagagcagatttacaccattacctaaagaagaagcccgtgcattaaaaggtggtaagaaaaactcgtactaccgaaaactcagatggtacaatacacaattgcaaattttagaactaacaggagaattcctatatgacggtcttgtaatggctactacactacatttaccaacactagtgccaaagttggccgaaaaaatccatggttcaaggccgattgtatgctatggtcaattcaaagaaactttgttggaattagctcatactttatattcagacctcaggtttttagcaccatcaattttggaaactagatgtaggccgtaccaaagtataaggggtaagctacaccctctgatgaccatgaaaggtggtggtggatatctaatgtggtgtcacagagtcatccctgctcctgaacctgtatcggaaaacgcgactgcagctgactccagtgaaaagcttgctgaacatggagctaagaaacaaaaaatataa

SEQ ID NO: 78351 - DNA, 1857 bp, Saccharomyces pastorianus
atgggtagtagacgtcataagaacaagcaagccgccccaccaaccctggaggagtttcaggcaagaaaggaaaagaaggctaatagaaagctagaaaaaggaaagagaccttctaccacgcaaggggatgaagtttctgatagaaagaaaaagaagtcgaagccattcaagaaatctagaaaagaggaagaagaagttgttgaagaggataaggatttgccagaagttgatcttgaagaattatcaaaagccaggaaatctttatttgatgatgaagaagatgacgatgaagcaggattggtggatgaagaactaaaagatgaatttgacttggaacaagaatatgattacgatgaagatgaagataatgacgcccacccaattttttcagatgacgacgatgaggctgatcttgaagaactaaatgcacaaaacatggaagctctttctaagaaacttgatgaagaagaagctgaagaagctgaagaagccgaaatggagttagtggaagcggagaacatgcaaccaagagcagacatattgcccactgaggagcaggaagaaatgatggcacaagaaactcctaatttaacttccacaagaacaagaatgattgaaattgtaaaggttttggaaaattttaagactcttggtgcagaaggcagatcgagaggagaatacgttgacagacttttgaaagatatttgtgagtactttggttatacaccatttttggcggaaaagttattcaatctattctcaccagcagaggcgatggagtttttcgaagccaatgaaattgcaagaccaataaccatcagaaccaacactttgaagaccagaaggagagacttagctcaaactcttgtgaatagaggtgttaatctacaacctattggttcttggactaaagttggtcttcaaatattcgattcccaagtcccaattggtgctacgccagaatatttggcaggtcactatattttacaagcggcatcatcttttctaccagttattgctctagatcctcatgaaaatgagcgtatcttggatatggcagctgctccaggtggtaaaaccacttatatatcagctatgatgaaaaacacaggttgtgttttcgctaacgacgccaataaatctagaacaaaatctttaattgctaatatccaccgtctaggctgtaccaacactattgtatgcaattacgatgcccgtgagttccctaaggtaattggaggttttgacagaattttactggatgccccatgttccggtactggtgttatcggtaaggatcaatctgtcaaggtgtctcgtaccgagaaggacttcattcaaattccacatctacaaaaacaattgcttctatccgctattgattctgttgattgcaactcgaaacatggtggtgtaatagtatattcgacatgttctgttgcagtggaagaggacgaagctgtcatagactatgcattgagaaaaagaccgaatgtcaagttagtcgatactggtttagcgatcggtaaagaagcgtttactagttacagaggcaaaaagtttcatcctagtgtgaaattagcgaggaggtactatccacatacgtacaacgtcgatgggttctttgtcgctcaattccaaaagatcggtccatcttcgtttgatgataaccaagcaagtgcaaaagaaaaggaaactgctgctagaaaggaagctttggaagaaggtatcattcactctgacttcgcaaccttcgaggacgaagaagacgataagtacattgaaaagtctgtgaaaaacaatcttttgaaaaagggtgtcaatccaaaagctaaaagaccttctaacgaaaaataa

SEQ ID NO: 78352 - DNA, 945 bp, Saccharomyces pastorianus
atggctaagaaaaactttatcccgtctgtatcgctggtcagaagagaccttcctactttagttactactacaactagttcaaccgccctgtcaaagcccacgtcaagtgtagtgtccgaaacgagttccaagtcccttccatcgttaacatcttcggctttctcaacttccagtggagcaacatcctcctcatcactaattgtcgcaagtataacacccccatctacagcaggaaacccatttattttaaatgctgctgataaaccaaatggaactgtatacattgctgtgggtgctgtcataggtgccatttttatcagtattcttatatggtggttagtgtccagttatttgtctcgtcgtttcacaatgacaaattcttatgcaaatgatagtaaaaatttgtacaggggacaccacaagcatagttcttctttacaaagcaatccctttgacatcaatgatgagaaatcatatatgcaggatgattgggattctatgagccaattagaatctagccaatacgaggatgctgcctcaccattcaacccaattcaggatccgttcacagacaacagaagatccttatttatatctcctactttacaagtgtcacaatatgaaaaaagtcatagccgccatcaatcaaaagacactaacatttttattgacgatccatctttatacgtaggtacctatgtagaagaagaagaagaagaagagagaaagctgaacctcaatagaccacaaagagcagcgtcacctgaaagaaaggaaaagaaaattaactcaatggaaggctaccataagagaaaccaatcctccttgggcctcataccagtcgcttctgctacctcaaatactagctctcctaaaaaggctcataaaagacaggcgccatcgatgtttttggatgatgtcctgaatggtagagaaataatctag

SEQ ID NO: 78353 - DNA, 333 bp, Saccharomyces pastorianus
atggcacctatgacagcacccacagcaatgtatacagttccatttggtttatcagcagcatttaaaataaatgggtttcctgctgtagatgggggtgttatacttgcgacaattagtgatgaggaggatgttgctccactggaagttgagaaagccgaagatgttaacgatggaagggacttggaactcgtttcggacactacacttgacgtgggctttgacagggcggttgaactagttgtagtagtaactaaagtaggaaggtctcttctgaccagcgatacagacgggataaagtttttcttagccatctctgccgatgtttcttactga

SEQ ID NO: 78354 - DNA, 594 bp, Saccharomyces pastorianus
atgaaatacatacccccattgaatttttcgccagtggtgagcacggatgtatcgttatatcgatcgggatacccgatgccgttaaattatagtttcatcaagcatcagttacacttgaagaccataatatatattggcgataaagataggcctctcgaagaatatcaaagcttcctggagtcagaaaagataaaatactatcacatatttatggattcaagccgcgatgaaggaattcaagaaagaatgaaccaggtcttgcacttggtgctggatgtcagaaactatcccatcttagtgcattccaataagggcaagcaccgtgttggtgtagttgtgggaatcataagaaagttgttacagggatggtccactgcaggtatataccaagagtacgggttattttctggtgggatgaaagatggagtagatttggagtttatcacaaggttcgaaaccaatctgaaaataccgagaaacgttatccctggctttgctaaacactgcttgtatttgaatgagctagaggctgcggaaggaagtgatgatgagtcaggaagtgagtctattctcactgccaagcaaccaatatga

SEQ ID NO: 78355 - DNA, 852 bp, Saccharomyces pastorianus
atgtctcctccagtttacagcgatatctccagaaatatcaatgacctattgaacaaggatttctatcatgctaccccagctgcctttgatgtgcaaacaacaaccgccaatggcattaagttctcattgaaggctaaacagcctgtcaaagacggtccattgtctactaacgtggaagcaaagttgaatgacaagcaaaccggcttgggtctaactcaaggctggtctaacacaaacaacttgaaaaccaaattagagtttgccaacttgacccctggtctaaagaacgaattgatcacttctttgactccaggcgtcgccaagtccgccgtcttaaacactacgttcacacaacctttcttcaccgcaagaggtgcctttgacttgtgtttgaagtcaccaacatttgttggtgacttaactatggcccacgaaggtattgttggtggcgcagagtttggttacgatatcagcgccggttccatttctcgttatgccatggctttaagttatttcgccaaagactactccttgggcgctacattgaacaacgagcaaataactaccgttgacttcttccaaaacgtcaacgcctttttacaggtcggtgctaaggctacaatgaactgcaaactacctaactccaatgtcaacatcgaattcgccactagatatttgcctgatgcatcttcccaagttaaggctaaggtgtccgattccggtattgtcactttggcttacaagcaattgttaagacctggcgtcactctgggtgtcggttcctctttcgatgctttgaagttgtctgaacctgttcacaagctaggttggtctttgtccttcgacgcttga

SEQ ID NO: 78356 - DNA, 1470 bp, Saccharomyces pastorianus
atgcaatttcactcagataagcagcatttggacagtacaaccgacatcgatttcaagccaaactcaccgcgttccttacaaaataggaataccaaaaatttatctttagatatagcagcactccatccattaatggaattctcatcgccaagccaagatgtgccaggttcagtaaaattcccatcgccgacacctttgaatctatttatgaagcccaaacctattgtgttggagaaatgtccaccaaaagtaagtccaaggccaacgccaccatcgctgtcgatgaggcgaagcgaggcctctatatacacactaccaacatctttgaagaaccgaactgtttctccaagcgtgtatacaaaatcatccacagtatcgtctatcagtaagctgtcatcatcatcaccgttatcgtcattttcagaaagacctcatctgaatagagtccattcattatccgtgaaaactaaagacttgaagttgaagggaattagaggacgttctcaaacgatctcagggttagagacatccacgccaatttctagtactcgtgaaggtactttagatagtacggatgtcaacagattttctaaccaaaagaatatgcaaacaacattgattttcccggaggaggactcggatctgaatattgatatggtgcatgcagagatctatcaacgaacggtttatttagatggaccattgctggtactgccgcctaatttgtatctatattcagaacccaaactagaagatatattatcgtttgatttagtcattaatgttgccaaagaaataccgaacctggagtttttaataccgccggaaatggcacataaaataaaatattaccatattgaatggacacacacatccaagatcgtcaaggacttatcccgattgacacgcattatacataccgctcattcgcaaggcaagaaaatactcgtacactgtcagtgtggagtatcaagatcggcgtcattgattgtggcgtatatcatgcgatattatggcttgagtttaaatgatgcatacaataagctgaaaggtgttgctaaggatataagtccaaacatgggtctcatcttccaacttatggaatggggaaccatgttgtccaagaactcaccgggcgaagaaggagagactgttcacatgcctgaggaagatgacatcggaaacaacgaagtttcctcgactacgaagtcctactcttctgcgtcctttagaagttttcccatggtaacgaatctatcatcgtcgccgaatgacagttctgtcaattcttcggaagtaacgccaaaaactcctgctacgttgactggagcaaggaccgcactggccacagaacgcggggaagatgatgagcactgtaaaagtttgtctcaacccgcagattcactggaagcttctgtggacaacgaatcaatatctactgccccggaacagatgatgttttttccttaa

SEQ ID NO: 78357 - DNA, 462 bp, Saccharomyces pastorianus
atgttacgtaacacttttactagagctggtggactatcacgtattacatccgtaagattcgctcaaacacatgctctttccaacgctgctgtaatggatctgcaatccagatgggagaacatgccctccactgagcagcaggatattgtcagtaagttgagtgaacgtcaaaaattaccatgggcacagcttactgagcctgaaaagcaagctgtgtggtacatttcttacggagaatggggcccaagaagacctgtattgaataagggtgattccagttttattgccaaaggtgttgctgcaggcctactattttcagtgggactttttgctgtcgtcaggatggcgggtggccaagacgcaaagaccatgaataaggagtggcagctaaagagtgacgaatatttgaagtcgaagaatgctaatccttggggtggttattctcaggtccaatctaaatga

SEQ ID NO: 78358 - DNA, 1212 bp, Saccharomyces pastorianus
atgacaatagcgccaatggcaaacgatttagaagattttgagtctctgctggagcctgattttgatgctaaacaatttggtaatgacttactgaaggctactaataacaatgacacaaccattttagacctaaacacgcctcttaaaaagctaaactatgatctacatgagattgactctagaatagaccaattgatgaatagcaacccattggagataatagagttaatttacaaaaatgaacacgtcaattcaaccatagttggtgagttgaaaccaagtttgggatatatgaatatgtcgtacgatagactaaagaatcaagttctagatccttatgaaagagcgaggaaagtccaactagcgttgagtaaagtttaccaaacatcttttctcttgcgcggagcattgctttatattcatttatcaaacaaattaaacgcactgtctaaaacagcccaactaagcacatcaacagctattaatttagcctccttacactaccaacttgaaattactttggaagaaaataacaatctaaaatccttgcggaaaattaaacaattagatcaggacattgtttcccccaacaaaagagagttaataacatttttgtctttacagatgtgtaaagagtgcttgaactctattaaaatcaaatcgaacaaagaaataatatctcagctggcctactccttatatctactttcatctcaagaattcgagtctgcaataaacaagattgtactatctaatgttacaatgagctcacaaatcctatcaaaaattttaaattctatcaggatgtttcctgatgcgttcaatgaagttgttgaaaaaggttataacatctacattttagaaacactactacggaacatcaaaacggataatgttacgaattcctcgagatctattgctgctaataaatcacgccttggcaatcttttatcagaatatacctcaatgaagagtaaagcaggttctggtacaccgagagatctgttttggagcaaagtttcatctgccttcaaaaaggactttgatatatctgttaatagaggaggccctgtgggcaagtcgctgttaaaaaataaagattttattataaacactatgaagcaaagtatgaaaaaatcttctgataatagtgattaccaaagctacttggatgtaatgctaaactcagtatctatttctctaaataagtga

SEQ ID NO: 78359 - DNA, 2631 bp, Saccharomyces pastorianus
atgtctcatcataagaagagggtgtaccctcaagctcaggtgccatacattgcaagtatgccaatagttgcagagcaacagcagtctcaacaacaaatcgaccaaacagcttatgcaatgggcaacctacaattgaacaatagggctaactcatttacacagctagctcaaaatcaacagtttcctggttctgggaaagtggtcaatcaactataccccgtggatttgtttacagaattacctccgccaatccgtgacctgtctttaccacctcctccaatcaccatttctcaggataacattgtgactccatccgaatattcaaatgttccataccagtacgtcagatctactttgaacgcggtgccaaaaacaaactctctgctgaagaaaacgaagttaccatttgccattgttattagaccatatttgcatttgcaagattcagacaaccaagtaccgctaaatactgacggagtcattgtccgctgtcgccgttgtcgttcatatatgaacccttttgtcgttttcattaaccaagggagaaaatggcaatgtaatatatgccgtttcaaaaatgatgtcccatttgggtttgatcagaacttacaaggcgctccaatcaacagatatgaaagaaacgaaattaaaaactctgtcgtggattacttggctcccgtagaatattctgttagggaacccccaccatctgtttatgtatttcttttagatgtttctcaaaacgctgtcaaaaatggtttattggctacttctgccagaaccattttagaaaacatagaatttctaccaaatcatgatggaaggaccagaattgctattatatgtgttgatcatagccttcattatttttacgttcctttggatgatgattatgaagtatcggatggggatgatgaagaatcagatggtgaagaagaagatgaagacgaggaagaggaagacgttgatgattcagaaacaattcaaatgtttgatattggcgatttggatgaaccatttttaccaatgccgagtgatgaattagtagttccactaaaatattgtaaaaataatctggaaacattgttgaaaaagatacctgaaatttttcaagacacacacagtagcaagtttgcacttggacctgccctaaaagctgcgtcaaatttgataaaaagcactggaggcaaagttgaagtcatttcatcaactttaccaaatactggcatcgggaaattgaaaaaaagaagtgaacagggcatattaaacacaccaaaagaaagccctcagctactgtcgtgtaaagattccttttataaaacattcacaattgagtgtaataaactacaaataacagtggacatgtttctggcatcagaggactacatggacgttgccactctatctcacctgggccgtttttctggtggtcaaacacatttttatcctggttttaatgccaccagtttgaacgatgttactaagtttactagggaattatcaaggcatttatccatggatatttcaatggaagctgttatgagagttcgttgttctactggcttgagggccacatcgttttttggccatttttttaacagatcctctgatttatgcgctttttccacaatgcctagagatcagtcttatcttttcgggatatccatcgaagactcattaatggcagaatattgctacttgcaagtgtcaacattgttgactctaaacactggtgaacgtagaattagagtcatgacgttagctctaccaacatccgaatcagctagggaagtgtttgcatccgcagatcaactagccattactgatttcatgacacaaaacgcggtgactaaggctttgaattcaagcatgtactctgcgagggattttatcacaaaatcgctcgaagatattttaaatgcctacaaaaaagaaatttcgatgtctaatataaattcagtaacctcacttaacctatgcgcaaatttgagaatgttacctctattaatgaatggactaagtaaacatatagccctcagaccgggcgttgttccaagcgattaccgtgcaagtgcgttgaataggttggaaacggagcctcttcattatttgataaagagcatttaccctacagtttactccctgcacgacatgcccgacgaagtcggtctacctgactttgaaggaaaaacggttcttcctgaacctataaatgccactatatctcttttcgaaagatatggcctgtatttaattgacaattccgcagaattatttttatgggttggcggagatgctgttcctgagttactgatagatgtattcaacactgacaccatatctcaaattcctgtggggaaaagtgaactgcctcttttgaacgattcgcctttcaatgaaagactaaggaggataatcggtagaattagagaaaacaatgatacaatcacatttcaatcattatacataataagaggaccatctattaacgagcccgccaacctaaactccgaaaaagatatggcttctttaaggctatgggccttaagtactcttgtcgaagacaaagttttaaattgtgctagttatagagaatacttacagagtatgaagactagtatcaacagataa

SEQ ID NO: 78360 - DNA, 519 bp, Saccharomyces pastorianus
atggagcacgtatcaaagaggtcaattgggcaattctttaagaggaaaacttcaactgtagatggaagcaaatcacagaaatgcggaaccactaaccaactgcggaagctgctgcataaaagaagggtacagaagcaggtagtgccggttgaatcccagtacagaattccgggtgattttagggataatcaaagcgtgagagtcaaaaactttatgtacaacagctcaccgtcagtaacgccatctacgcatcatatcaatgaaaggtatgttcgctatgacatcaacacaaggcctttggttgttgtgctcgcgatctcaattgtattttttggctgtctcctggtcctcaaggacatcatcatccagtcatcagaaaacatcctgagtgtttccaaatggaaaatcataggggcctccttcatgggtacgccctacacaggtcttctcacggggctcgttggccctctcctgtcaccattttcggctgtttcgtcgtggctttcattcatcttttga

SEQ ID NO: 78361 - DNA, 321 bp, Saccharomyces pastorianus
atgactccttttcccaacacttgtaggagtgttcaaacagtttcttcatcaaatacagtttcgatgggtttttccatcaatgatgcatgtccgaaaacgctgacggcagaagcaccgatcaaccatagcaaagttgagattggcgaagctaagaaacctattggcacagcaacacaaaccagtccggtgtatagttggttggtcttgaaagaaccaaatggagttacgagctcctcaccctttagtttgtttataccaacaataccagctacgactagaacaataacaaagagtagcaacaagtttgttaataatgtgtaa

SEQ ID NO: 78362 - DNA, 258 bp, Saccharomyces pastorianus
atgattctcgctttgggcgacttcctgcctaaacaggaagacaaagcatgcgagaggccctgggttcaattcccagctcgccccgttatcttttttcaccgtcagggcggaatttttttgtttagcatcaatcaacctaacctctcatgcttctccaagctgaaagaagtaaactcactctatgtacgtgttgcaacatatatctgccaaaagaatgaaagtaggttcagaacaaacagattgaaaggagaccagtaa

SEQ ID NO: 78363 - DNA, 1191 bp, Saccharomyces pastorianus
atgagtactttcaacagttacagccagccaaaggaaagcaatgataatagtcataataatgtcaacaagagcaaatcgctgttagatataatatttggtactaatgtatcggaatgggctttttctgagaatgctttaatgaaagctatggatttgaaaatagaacaagaaaagactaagcagcaatattataaacttgaaaacttgaatcgttcgatagagttgtttaagcttgcttccagttcaggtctgcccataaatcaaatacataaactattcaacaccgaccatggcgtaccggcgtcttcgccgatgaaggcaggggccaatcaaccacataacaatacagaaggcacgcaatcttcagaaaatctgcccagattgaatggttctatgaagtcattaaaacctctaaacatgaacacagtgtcaccaactccaatgagtcgacagccctctccatataagtttccagcatcatcctctatcggcggtatatcacactccacagttacaaatgtacaacgaagagctaattctcctgcaagaataggtgcatccgcagttgctgcgttgaatgacaatatttccattaaggaggaagatgtggctaggcgaattccctctggtacaaaatctcaagaatcgcctttaaacaagaagccgacttctcttcacagccgtaacttgtcacttccaataggaaagttcaccaatcctaatattccttctacaatgacatccatactaagtttcaatagagaccaacagcagccgctatctcaaccactgcctcctcctccacaacagcaacaggatctccacacgcacaatttacatactataccaaggaaacctggaatggttcaaaaaaagcataggcgtgcaagatccacatcctcctttggagtgatcgatttaagtattatcgatgaagcaaaagaaaaacaagtacagagatcaccatcccctatacattctaacgtgtccgtagcacttacctcacatgacaaaccaattgaatccaatatgaaggaacaaccaaatatgctgcaatcggttcgtgaaggacgtcaagtacacgatgacttggatgacagaacatgcagtgaaagcagtagtagaaacgaaagccccgtaagaaccatcacaaaggataattctgtaggcaagattttaaatagtacttga

SEQ ID NO: 78364 - DNA, 2520 bp, Saccharomyces pastorianus
atggatttcgttgtagactatcagacctacgcaatggcggatactgccgcgccagaattaccagaacctgagccaagactaaacttaacctcagatgcacagtcacagcccaccggtaaactagatctacagtttaagttgcccgaccttcaacgttattccaataataatgcaactttgccagtagataatgatggtgctggttcgaaagacctacataagaaaatgacacattacgcaatgtcttccattgataaaatacagctttcaaatccaagcaaacaattagggcaaaattcccaggatgaaaaactatcgcagcaagaatctcaaaatttcacgaattacgagccaaaaaaccttgatttatcaaaattagtatccccgtcaagtggttccaacaaaaataccacaaatttggttctttcgaataaactatccaagatattgaacaattacacattgattaactatcaggccacagtccaactaagaaaatccctaaaggttctagaagagaataaagagagattgtcccttgatgaacaaaagctcatgaatcctgaatatgtaggtactttggcaagaagagcattgaggactgatttggaatctcaactgctaaaggaacatattacggtacttgaggaattcaaacctatcattagaaggattaaacgattatcttcttccgtcgaaaaaatacaaagaacgagcgaaaaattactaagtaatgagacaaatgaggttccaacaaataacgtggtacttcaggaaatagatcaataccgtttaaaggcagagcagctgaagctgaaaaaaaaaatactgttatctataagggataggtttactttgaatcaggtagaggacgatgtaatcaccaatggtactatagacaacatctttttcgaggtagtaaagaaagtaatcaatattaaagatgaatcaagtttcttgctgacgcttcctaatttgaatgctggaaatgctttgataatgggagttaatgaaattttagaaaagacaaacaaaaaaatcttcaattatttgatcgattttttatatagttttgaatcgtcttcaaatttattaaatgaccatggtactactgaacaagaaagcttaagcatttttcggaagagtctggtcttcctgtcaagtgatctagaattatttaatgagttgttgaaaagagtgaccacactgagatccaagagtattctggatgagtttttgtctcaattcgatatgaattcaactacctctaaacccatcatattatcggcacacgatccaattaggtatattggtgacatactagcgtccgttcattccatcatcgcaaatgaagctgatttcgtgaagtcactatttgactttcaggatgaagacttaaaagataccccaatttctatacttcaacaaaacaagacattcttgaaaggcatcgacaacaaattgctgaacgatatcatccagtcgctatccaattcgtgtcgtattcgtatcgagcaaatcgtgaggtttgaagaaaatccgatcatcaatttcgagattgtgaggctgctgaaactttacagagttatgttcgagagaaagggaattcaggacgatagttctattattaacaatttaaagtcgttggaagacatttccaaaaacagaattattggatactatgaagactatatgaagcaaacagtcatggcggaaacaaaaaattcttcagatgatttactgccaccagagtggctatcagagtatatgaataaattggtagagttatttgaagtttatgaaaagacacatgcagccgaagatgaggaatcagaagataataaattgctctcatctaagaatttacaaacaattgtagaacaaccaataaaagatgttctgttaacacaattgcaaacatcttttcctttggcgaaaaaaaatgaaaaagaaaaggcatcattgctaactatagagataaactgtttcgatttaattaaatctagacttcaaccttttgagggattgtttgcacaagatgatgacagccggaaaatcaccatctgggtttgtgataaactgaaggaatatactaagcaaatgctaactttacaaataaaattcctatttgagaatacaggtttagacctttacagcaatttggtcaatatgatttttcctgtggactcagtaaaggatgaattggattatgatatgtacttagccctgagggataattcattgatggaattagacatggtcagaaaaaatgtgcatgataagttgaactattatctacctcaggcgttaacagatgttcaaggaaatttactatttaaattaacgtcaccaatgatagctgatgaaatatgcgatgaatgtttcaagaagttgtcgctattttataatatcttcaggaaactgttgattcatttgtatccgaacaagaaggatcaggtattcgaaattttaaatttttccactgatgaatttgacatgttgataggtattgatcactga

SEQ ID NO: 78365 - DNA, 1785 bp, Saccharomyces pastorianus
atgagtagtattgttaataaaagtggtacacgctttgcccctaaagtaaggcagcgtagagccgccactggaggaacaccaactccaaagccaagaacccctcaacttttcattcccgaaagtaaagaaatagaagaagataatagtgataacgataaaggtgttgatgaaaatgaaacggctattgttgagaaaccctcgctagttggagaacgctctttagaaggctttaccttaaccggcactaatggacatgataatgaaataggtgatgagggccccattgacgcctcgacccagaaccccaaagcagacgttatagaagataatgtgactctaaaaccggcacccttgcaaacccaccgagatcagaaggtaccgagatccagcagattagcttcactgagtaaggacaacgaaagtcgtccaagttttaaaccgtcatttctcgattcttccagtaacagtaatgggactgcgcgacgtttatctacaatctccaacaagcttcctaaaaagataaggcttggaagcattacagaaaacgatatgaatctgaaaactttcaaaagacatagggttttgggcaaaccctcttcggctaagaaaccagcaggtgcacacagaatcagtattgtctccaaaatttccccacctacggcaatgaccgattctttggacaggaatgaattttcgtcagaaacttctacatcaagagaagctgatgagaaagaaaattatgtgattagcaaagtcaaagatatcccgaaaaaagtgagagatggggagtctgctaaatattttatcgatgaagagaattttacgatggcagagttgtgtaagccaaactttcctattggtcaaatatctgaaaactttgaaaaatctaaaatggcaaaaaaggcaaaattggaaaagagaaggcatcttagagaactcagaatgcgcgcacgacaagaatttaaaccactacactcattgactaaagaagaacaggaagaagaagaggagaagagaaaggaagaaagagataaactactcaacgctgacattcctgagtcagaccgcaaagcacatacggcgatccaactgaagcttaaccctgatggtactatggcaattgatgaagagactatggttgttgacagacacaaaaatgctagtatcgaaaatgaatataaagaaaaagttgatgaaaacccttttgccaatctttataattacgggtcgtatggtaggggttcatacacagatccgtggactgtggaagaaatgataaagttctacagggcgctttctatgtgggggacagatttcaatttgatctcacaactatacccttatagatcaagaaaacaagtgaaggccaaattcgttaatgaggagaagaaacgtccaatattgattgaattggcccttcgatctaagctaccgcctaattttgatgagtattgctgcgaaatcaagaagaacattggtacagtagcagacttcaacgagaaactaatcgaattacaaaacgagcacaaacatcatatgaaggaaatcgaagaagcaaagaatacggcaaaggaggaagaccaaactgcacaaaggctaaatgatgctaatttgaataaaaagggatctggtggtattatgacaaatgatttgaaagtttatagaaaaacggaagttgttctgggtacaattgatgacttgaaaaggaagaaactcaaagaaaggaataatgatgacaatgaggataatgaaggaagtgaagaagagcctgagattgatcaataa

SEQ ID NO: 78366 - DNA, 639 bp, Saccharomyces pastorianus
atgattagtaaagagtatgaatttggtaagactagtatactgaatagaaagaagtatacattagttatcgatgaagacaagaatggcaattttataagatttaccgttttacctgtatctaaccgaaagttcaaaaaagtcaagcaaaatgggagggtagagattaacatgggcatacaatatcaccaaattgtacttattttactactgaatattttgttctatgtaatttgcctaagatcaagatttctcgaacatattaatagaacttttgaagtgacaatcgcgcgaagtttccagatcttaattataatgggattgtttgccttaggtacaattatacttgtgaggggacctagtgtggaaactgtaacaattttcaaagaaagtggactacagctgtccagagtgaagggtatggttatatttcctcaacaatggaatcggaagttctttgaacaagtagagtttatatccaatgaaagaattattgatgtagtgatcaatgaaggattctgtcggggatttcgagtgatattctaccttgcagcaattgtacgtaaatcgtctacgcttaagctattatttccagtatgtattcaagcaaatttaggattgtttcttacttcaacgatctga

SEQ ID NO: 78367 - DNA, 1083 bp, Saccharomyces pastorianus
atgcttaacagaacaattgctaagagaactttagccactgccgctcaggcggaacgcaccctacccaagaagtatggcggtcgtttcaccgtcactttgatacctggtgacggtgttgggaaagaaatcactgattcagtgagaaccatttttgaggctgaaaatatcccgatcgactgggaaactataaacattaagcaaacagatcataaggaaggcgtctatgaagctgttgagtctctaaagagaaataagattggtcttaaggggctatggcacactcctgctgaccaaacaggtcacggttcactaaacgttgctttgcgtaaacaactagatatctacgccaatgtggcccttttcaaatccttgaagggtgtcaagactagaattccagacatagatttgattgtcattagagaaaacacggagggtgagttctcaggcctggaacatgaatccgtccctggtgtagtggaatctttgaaagttatgactagacctaagacagaaaggatcgccagatttgcctttgacttcgccaagaaatacaacagaaagtctgtcacagctgtgcataaggcaaatatcatgaagttaggtgacggtctgttcagaaatataataactgaaattggccaaaaagaatatcctgatattgacgtatcgtccatcattgtcgacaatgcctccatgcaggcggtggccaaacctcatcaatttgatgtcctagttaccccttcaatgtacgggaccatcttaggcaacattggcgctgctttgatcggtggtccaggattggtggcaggtgccaactttggcagggactatgctgtcttcgaaccaggttccagacatgttggtttagatattaaaggccaaaatgtggctaacccaactgccatgatcctttcctctacgttaatgttgaaccatttgggtttgaatgaatatgctactagaatctcaaaggcagttcatgagacgatcgcagaaggtaagcataccactagagatattggtggttcctcttctactactgatttcacgaatgaaatcatcaacaaattatctaccatgtaa

SEQ ID NO: 78368 - DNA, 666 bp, Saccharomyces pastorianus
atgagcgctaccgaatcttcatctatattcacattgagtcacaactcaaacctacaagatatcttggccgctaatgccaaatgggcctcccagatgaacaacatacaaccaactttgttcccagatcacaatgcgaagggccagtcccctcacactcttttcatcggctgctccgattcgcgttacaacgaaaactgtttaggtgtcttgcccggcgaagtgttcacttggaaaaatgttgctaacatatgtcactcagaggatttaactttgaaggccactttagagtttgccattatttgtctgaaagttaacaaagttattatttgtggccacactgattgtggtggtataaagacatgtttaactaaccaaagggaagccttaccaaaagttaactgttctcatctgtacaagtacttagacgatattgacaccatgtaccatgaagagtcacaaaatttgatccatttgaaaacgcaacgtgagaaatcacattacctgtcgcactgtaacgtcaaaaggcagtttaataggattattgaaaatcctactgtgcaaactgctgtacaaaatggagaattacaggtatacggtctgctttacaacgtagaggacggtctactgcaaacagttagcacttacacaaaagttaccccaaaatag

SEQ ID NO: 78369 - DNA, 846 bp, Saccharomyces pastorianus
atgggtttatatcaagcaaagaatgatgagggaagtgatccgaaaagcagcagcaagattgacgatttgatagaaaatgaggcagaaatcatacgactaatcaaggaagatggcaagttactgatagacaatggcgatggtagagatatccataacataattcaagaagacaagcttctcagtgtagaatttaacgaagtactaaagcgatttcacggggaagaaaagtcagatattccttggaaggagtttgatgaagacgaggatgacagatatgattctaatgagcaccatcaaaagactatagaagtaatgaacacactaaatcacgtcattaataaagaggtgattcctcccgaaaactttagccacgtcgttggggagatataccgtagcagtttcccacgacaagagaacttttcgtttttgcatgaaagactaaaattgaaatccatcttggtactaattccggaagaatatccgcaggaaaatctaaattttttgaagttaacgggtataaaattatatcaagttggaatgagcggtaataaggagccatttgttaatataccgtctcatctactgacaaaggcactagaaatcgtgttgaatcctgcgaatcaaccgatactgatacattgtaatagaggcaaacatagaacggggtgtttgattggttgtataagaaaactacaaaattggtcgctaacgatgatttttgatgagtacagacgtttcgcatttccgaaggccagggcgcttgatcagcagttcatcgagatgtatgacgatgacgaaattaagaggattgctagtaaaaacaactggttgcctctacaatggtaa

SEQ ID NO: 78370 - DNA, 411 bp, Saccharomyces pastorianus
atggccagaactaaacaaacagctagaaaatccactggtggtaaagccccaagaaaacaattagcctccaaggctgccagaaaatccgccccatctaccggtggtgttaagaagcctcacagatataagccaggtactgttgccttgagagaaattagaagattccaaaaatctactgaactgttgatcagaaagttacctttccaaagattggtcagagaaatcgctcaagatttcaagaccgacttgagatttcaatcttctgctatcggtgctttgcaagaatccgtcgaagcatacttagtctctttgtttgaagacactaatctggctgctattcacgctaagcgtgttactatccaaaagaaggatatcaaattggccagaagactaagaggtgaaagatcatga

SEQ ID NO: 78371 - DNA, 312 bp, Saccharomyces pastorianus
atgtccggtagaggtaaaggtggtaaaggtctaggaaaaggtggtgccaagcgtcacagaaagattctaagagataacattcaaggtatcactaagccagctatcagaagattagctagaagaggtggtgtcaagcgtatttctggtttgatctacgaagaagtcagagccgtcttgaaatccttcttggaatccgtcatcagggactctgttacttacactgaacacgccaagagaaagactgttacttctttggatgtcgtttatgctttgaagagacaaggtagaaccttatatggtttcggtggttaa

SEQ ID NO: 78372 - DNA, 1569 bp, Saccharomyces pastorianus
atgttgctaataagaaggacgataaatgcatttctgggatgtatccattgcaatcttacggcgacgtgcatcctgattgccttcgtcataaccatgtatgtggtacttgtatctgagcctgcatccgtagacggaactatgggaaattttcttccgttttccaagatggatcttgcgacgaagagggacagacccttttattcgaattgtgtgaatactcaggactatttgttgaatccatcgtacatcaagcagaatgcctcgtttgtcatgctaacaaggaacggggagctagaagatgttatcaagactatcaacagtatagaagagcatttcaatcagtggttccactatccatatgtgttcttaaatgaccagccgtttgaagaggacttcaaagcaaaagtacgtgatgttacagtgggcgcgctggtggaatttggcactatcgatgagatatcttggaattttcccagtgacgtaaaggatacgttcgagttctacaacgcaattgaggatcaaggtgatagaagcatactttacggaaacttagaatcatatcataagatgtgccggttttattcaggattattttacaagcacccgctagtacagaagtacgaatggtattggagattggaacccgatgttgagtttttctgtgatattacctacgatccctttttggagatgctccgaactaataagaaatatggatttacgatcatcatccccgaattgtattggacagtcccaaatttgtttagacacactaaaagctttattagtcaaaaaggcgttacgcttgggtcattatggaaactatttacaaaggattacgacatttttgaatccggtgatccggagttacgggactggatcaactatgattttcaggccaaggctaagatatccgaaaagatagccatcgagcagcttttgaaaaaggttgatgatttccaacagataaatgatgacaaagagggaataatgaatttgatacataaggctcgctctagaaagcatatcgtagaagacaaattttttaatgaagagtacaatctatgccatttctggagtaattttgagattgcgcggctaagcgtgttcgacaatgacatttacaacagtttttttcaatatttggagaaaagtggtggattttggaaggaaagatggggggacgctcctgttcactctattggattgtcgctaactctggatttggacgatgtacactattttagagacatcggatatagacactccacaatacagcattgtccacataatgccatggggaatgaggaattctcctacttagccagtgactcaaaattcaaacgtaaaaacgcggcctacgacgagggaagggaatttgggtgtggctgcaggtgcagatgtcccaagaaaaagcgtgaaattgaggattccatgggtttctgcgtaaatatttgggtaaatctgcttaaccaacagaggggacacgaacgccacgtcgaagcactcaacggcaatgaaatggaggagcacataagggaagactatctaagacagttcggaaactag

SEQ ID NO: 78373 - DNA, 318 bp, Saccharomyces pastorianus
atggttatgacgaaggcaatcaggatgcacgtcgccgtaagattgcaatggatacatcccagaaatgcatttatcgtccttcttattagcaacatctgctaccttatgacgatgtgccgtattgagacacatttattgatgacacctccattgaacaagactatttgtgcacggaagcactcatatctactacttcgcatttttttgaagaccctttctcgaatgtctgcccaaatttttcaattttcttggcatcatccacacaccgcatgcttaaagtgtactatccaaaaaatgagagaaaaagcaaatacctaa

SEQ ID NO: 78374 - DNA, 1455 bp, Saccharomyces pastorianus
atgaactcatcatctggtgttgataatgagatttccttagacagcccgatgccaattttcaatgagagttctactttaaagccaattagggttgcgggtgtagtaacaacagggacagatcatatcgaccctagcgtactacaggcatacttagatgatactattatgaaatccattactttggggcagctagtgaaaaatgcggatgtgttaaataagagattgtgccaacaccacattgccttgaacgccaaacagtcgtttcacttccaaggcaatacatatatctccgatgaaaaagaaacacatgatgtggtgcctttgatggaagttgtttcacaattagatatattacctcctaaaacgtttacagcgaagacagggacaaattttgggaacgataatgatgcagaggcttacttacaatttgaaaaactaatagataaaaaatacttaaagttacctactagagtcaatctcgaaattttgagaggtacaaaaatacactcctcctttctattcaattcttactcttctctttctccccaatcaattctaaacttgaaagtttttagtcaattttataattggaacacaaataaaggattagatattgggcaaagaggagcaagactatctttgaggtacgagccactgttcttacataaactattacacaatcagcattctaatgaaagtcccacgttatttcatgagtggtttttagagacctgctggagatccactaagatatgttcacaaggcactagtgcgccctatatgtattcaggtacaatgttatctcaagcaggcgatcagttaaggacaattttgggtcatacattcgtgctggacaagagagatcatattatgtgccctactaagggttcgatgttgaagtggagtaatgaactttcgcctggaaagcatttaaagacccaattagaattgaacagtgtaaaaagttggatgaatgacgactttattactttttctactaccattaaaacaggatatctaaagaacctatcctcacaacaatccttgcctgtacatatatgtgataagtttcagagtggtgggcccagcgacattcgggggtttcaaacatttgggttaggccccagagatttatatgatgcagtaggtggtgatgcttttgtctcctatggtcttagcgtattttctcgattgccctggaaaaaagttgaaaagtcaaactttaggttacattggttttttaatgggggtaaattggttaatcatgacaatacgtcgttgggtaattgcataggacagctttcaaaggaacactccacatccacaggtattggtcttgtactaaggcacccaatggcaagattcgagctaaactttactttgcctattaccgctcacgaaaatgatttgataagaaaaggattccagtttggtcttggtctggcatttttataa

SEQ ID NO: 78375 - DNA, 972 bp, Saccharomyces pastorianus
atgtcggggagcttctggacatctacacaaaggcatcattggcaatataccaaggcatcattggctaaagagaggcagaagttatggctattggagtgccagctgtttcctcaaggtttgaatattgtaatggattcgaagcaaaacggcatcgaacaatccatcacaaagaatataccaataactcaccgagacttacactatgataaagattataatctaaggatctactgctatttcctgataatgaagcttggaaggagactaaatataagacagtatgcactggctacagcacatatttatctatcaaggtttttaataaaggcttcagttagagaaataaacctatatatgctggttactacgtgtgtatatttagcatgcaaagttgaagaatgcccgcaatatatcagaactttggtaagtgaagcccgtaccttatggcccgaatttattcctcctgaccctactaaagttactgagtttgagttctacttactagaagaattggaaagttacttaattgtccaccacccttatcaatccttaaagcaaattgttcaagtcttaaagcaaccgccatttcaaataacactatcgtcagatgatctacaaaactgttggtccttaatcaacgacagttatataaatgatgttcatttgctttaccctcctcatattatcgctgttgcatgtttattcattacgatttccattcatgggaaaccaaccaaaggatcatcgttagcatctgcggcttctgaagccatcagagatcctaaaaattctagttctcctgttcaaatagcttttaatcgttttatggcagaatctcttgtagatcttgaggaggttatggatacgattcaagagcaaattacattatacgatcattgggacaagtaccacgaacaatggataaagtttctgctacatactttgtatcttagaccagcatctgcaatttaa

SEQ ID NO: 78376 - DNA, 219 bp, Saccharomyces pastorianus
atgtctgcattatttaattttcgttcccttctgcaagtgatattgttgctgatttgttcatgttcttatgttcatgggcagtggccgtctctcctagatcgttacaaaaatcatgaggttttgggggccttctggaaaatggcacgtgttggtgaaagggccagtccatatgttagtttagcatgtattttgatggccatcagtcaatttaacagctga

SEQ ID NO: 78377 - DNA, 741 bp, Saccharomyces pastorianus
atggagagtatatttggtgggtttggagatctagttgttcctaggccaaaggagcatctcggtcaaacagacctttccttcggtggaaaattattgcctgcattgaaaatttgtgaagatggtggtgaaagtggttgtggcggtaaagtctggatcgctggcgaactgttgtgcgagtacatactcgagaaatcagttgaccatctgctaagtaagacggtcaatggtacgaaacaatttaaaaaagtcttagaattgggtagtggtacaggtttagttggattgtgcgtggggttgttggaaaaaaacacattccacgatggcactaaagtatatgttacggacattgacaagttgataccactattgaaaagaaatatagaactggacgaagttcagtatgaagttcttgcgagggaactttggtggggtgagccgctgtcggcagaattttcacctcaagaaggtgctatgcaagcaaataacgttgatctagttttggcagctgattgtgtgtatctcgaggaagcttttccattactagaaaaaacactacttgatctcactcactgcataaacccacctgtaatcttgatggcttacaagaagagaagaaaagctgataaacattttttcaacaagattaaaagaaattttgacgttcttgaaattacagattttagtaaatttgaacattatcttaaggaaagaacccacttgtttcagcttatcaggaagtaa

SEQ ID NO: 78378 - DNA, 228 bp, Saccharomyces pastorianus
atgacaaagaatttcatcgtcactttgaaaaagaacactccagatgtggaagctaagaagttcttggattcagttcatcacgcaggtggctctattgtacacgaattcgacatcattaaagggtacaccatccaggtaccagatgttctccacttgaacaagttgaaggaaaagcacaatgatgtcatcgagaacgtcgaagaagacaaagaagttcatacaaattga

SEQ ID NO: 78379 - DNA, 3135 bp, Saccharomyces pastorianus
atgtcagattcacaacaatcaatcaccgttctagaagagcttttccgaaagttggaaactgctacttcggaaacaagagagggtatttcttcggagctttcctcatttttaaacgggaatatcatcgagcatgacgttcccgaagttttttttgatgaatttcaaaaagctatccagagtaaacaaaaggcgctcaacacgctgggtgcggtggcttacatagcaaatgaaactaatctatcaccttctgttgaaccgtacatagttgcgacggtcccttctgtatgcagtaaagctggtagtaaagataatgatgttcaacttgcggcaacaaaggccctcaaagccatcgctagtgctgttaacccggttgccgttaaagcactcttacctcatttgattcattcgctggaaactagcaacaagtggaaagagaaggttgctgttctcgaagtaatctctgtattggtagatgccgctaaagaacagattgccttaagaatgccggaactaattcccgttctttcggaatccatgtgggacactaagaaagaagttaaggaggcggcaacgacaaccatcacaaaggcaactgaaactgttgataataaggatattgagagatttattccaaaattaatcgaatgtattgcaaatccaaatgaggtgcctgaaaccgttcatctcttgggtgcaactacttttgtagccgaagtaactccagcgactttgtctattatggttcctttattgagcagaggtttagccgagagagaaacctctataaaacgtaaagctgcggttattatcgataatatgtgtaaattggttgaagacccgcaagttgttgctccattcttaggtaaactactaccagggctaaagaacaattttgctactattgctgatcctgaagcacgtgaagttacattaaaagctttaaaaaccctgagacgtgtgggtaatgtcggggaagatgatgtgttaccagaaatatcgcatgctggtgatgtttccacaacactgggcgtcatcaaggaattactggaacctgaaaaagtggccccaaggttcaccattgtggttgagtacatagccgcgattgccgcaaatctaattgatgaaaggatcattgatcagcaaacgtggtttacacatgttacaccttatatgactatatttttacatgagaaaactgcaaaggaaatactagacgatttcaggaaaagggcagtagataatattccagttggaccgaatttccaagacgaagaggatgagggtgaagatttgtgtaattgtgaattttccttggcatatggtgccaaaatattactaaacaagactcaattgaggttgaagcgaggtaggagatatggtctatgtggtcctaatggtgccggaaaatccactctaatgcgatccattgctaatggccaagttgacgggttccccactcaggatgaatgtcgcactgtttatgtggaacacgatatcgataatacacattcggacatgtccgttttagattttgtatattccggcaatgtaggaattaaggatgttattacctcgaaattaaaggagtttgggttcagtgatgaaatgatagaaatgccaattgcatccctatctggaggttggaaaatgaaattagctttggcgagggctgttctgaaggacgctgacattctactattggatgaaccaacaaatcatctagacactgttaatgtggagtggctggtaaattatttgaatacttgcggaattacatcggtgattgtctctcatgattctggttttctggataaggtttgtcaatacatcatacattatgagggtcttaaattaagaaagtacaagggtaatttatcagaatttgttcaaaaatgtcctacggcacaatcatactatgaattaggtgcctctgaccttgaatttcaattcccaactcctggttatctagaaggtgtcaaaacgaagcaaaaggcaattgttaaagtaagtaatatgacttttcaatatccagggacaactaaaccacaagtctcagatgttactttccagtgttctctatcctcaaggattgcagttatcggacctaatggggctggtaagtccactttaattaatgttcttactggtgaactgttaccaaccagcggtgaagtatatacacacgagaattgtcgtatagcgtatattaagcagcacgcttttgcacacattgaatcgcacttagacaaaactccatccgaatacattcaatggaggttccaaactggtgaggatagggaaacaatggatagagcaaataggcaaataaatgaaaatgacgcagaggccatgaataaaatatttaaaattgaagggaccccaagaagggttgcaggaatccattcaagaaggaaatttaaaaacacgtatgagtacgaatgttcgtttttgttaggtgagaacattggtatgaaatctgaaagatgggttccaatgatgtctgtcgacaatgcttggctaccaaggggcgaattgattgaatcccattctaaaatggttgctgaaattgatatgaaggaagctttggcttctggtcaattcagggctttaacaagaaaagagattgaattacattgcgccatgttggggttggattcagaattagtctcacattcaagaattagaggtttatcgggtgggcaaaaggttaaattggtactcgctgcctgcacgtggcaaagaccccatttgattgttttagatgaacctacgaattacttggacagagattcattgggtgctctttcaaaagcattaaaagcttttgaaggtggtgtcattattattacgcattcggcagaatttactaagaatctgactgacgaagtttgggcggttaaggatgggaaaatgacaccctctggccataattgggttgcaggacaaggtgctggcccaagaattgagaaaaaagaagaagagggtgataaatttgatgctatgggtaacaagattaatagtgggaagaaaaaaagcaaactctcttctgcagaattgagaaagaaaaagaaggagagaatgaagaagaaaaaagagatgggtgatgaatacgtttcttctgatgaagatttttaa

SEQ ID NO: 78380 - DNA, 378 bp, Saccharomyces pastorianus
atgttaacttcaaaaatatataagttactcactgaaagagatgtactcgacttcaaattaaaaatcttcatcagaagaaacgtattcatcacccatctcttttttcttcttcattctctccttctttttctttctcaattctgcagaagagagtttgctttttttcttcccactattaatcttgttacccatagcatcaaatttatcaccctcttcttcttttttctcaattcttgggccagcaccttgtcctgcaacccaattatggccagagggtgtcattttcccatccttaaccgcccaaacttcgtcagtcagattcttagtaaattctgccgaatgcgtaataataatgacaccaccttcaaaagcttttaa

SEQ ID NO: 78381 - DNA, 1335 bp, Saccharomyces pastorianus
atgaacgtcgttgtgtgctccggtgggactgccacaaattcattgactccttgcttttctaatatttctatcttaaaaggacatgagctgacgtatatattgccaatatcagataatggcgggtccacaagtgaaattctacgaatagttggtggcccagcaattggtgatatcagatctagaatagtgagactacttcaagatgaacagcttgtcgagttgtttggccataggctacctaatgataagttattagctaagaaagaatggaatgaaatagtggaaggttcgcatcccatatggaaaaatatttcgatagaagtaaaggaaatgtgtcgttcttttattatccatatgcaagcagaactcttgaaaaaaatcaaacactcgaatccatttcagtttgagagtgcatccattggaaattttttcttaactggtgctagattgtttttaggttctctagacgcatctattgaactaatgatgaggataggaaggtgcagtcctctagttcatgttattccatgtataaataccaatcacacacatcatatctcggctttgttgacgaatggtgagatgataactggccaatcacaaatatcgcatccctcgaaatctgttcctaaagataatagcatagcccattcagctaaatttattcatttacttggctcttatgacgaccatttgaaaattctcctcgacgatgaggaagaagaagcggaagaggagtatgccaatcctatctatattcttccagaactgaaaaactcccagttgcattttgacaagcttgatgaatcacagaatctacctgctccggtacataggatattgtatataaacccatatggcgaagagataaaaccaatgggaaatccaagagctatttccaaggtgaaaaaagctgacatggtcgtttattctatcggttctttaatgacaagtttactcccaatccttattcttggtaatcttgctgaagtaattttggaatctaataatacgaaaaaagttttgctcataaataataaatatgatagagaggtttttggtttagacggtttacactacgttcaaatgatcatagattctatgagtagggcaatagcaggctataggcaatctaagggtgtccattcagagaatgatgactttgaatggcaagattttattactgatattgtttacctaaaaaatggtgaaattgaaattgatgaaacgatattcgagaagcatagtattagatgccaccagatcgcgtcttcggataagatggaaagtgaagaacttgaaaaggttctgaatcaaattggccttaaaaactga

SEQ ID NO: 78382 - DNA, 1080 bp, Saccharomyces pastorianus
atggtcaaggagacaaaactttacgatttacttggagtatctccaagtgctaatgagcaagaactgaaaaagggttatagaaaagcagctctaaaatatcatccagataagccaacaggtgacacagaaaagtttaaggagatatcagaggcctttgaaattttaaatgatcctcaaaaaagggaaatatatgatcaatacggtctcgaggctgctagatctggtggtccaagctttggtcctggtggtcctggcggtgctggaggtgctggaggcttccctgggggtgcgggcggattctccggaggacatgcgttcagtaatgaggatgctttcaatattttttcacaattctttggcggcagttccccattcggtggtgctgatgacagtggcttcagtttctctagttatccatctggcggcggtgctggtatgggaggtatgcatggtggtatgggaggtatgcctggaggaatgggaggaatgcatggcggcatgggaggtatgcctggcggctttagatcagcatcaagctctcccacgtatccagaggaagaaacagttcaagttaatttaccagttagtctagaagatttgtttgttggtaaaaagaagtcatttaaaattggaagaaagggcccacatggggcctctgaaaagacacaaattgacattcaattaaaaccgggttggaaagctggtaccaaaataacatacaagaaccagggtgattacaatcctcaaacgggccgtagaaagactttgcagtttgtcatccaggaaaagagccatccaaactttaaaagagacggtgatgacctaatttacactctgccactatctttcaaggaatcattgttaggtttttcaaaaactatccaaacaattgatggcagaaccttacctttgtcgagagtacagcctgtccaaccctcacaaacttctacttatcctggtcaaggtatgccaactccaaagaacccatctcagagaggtaatttgattgtaaaatataaagtggactatccaatatcactaaacgacgctcaaaaacgtgctatagatgaaaatttttaa

SEQ ID NO: 78383 - DNA, 912 bp, Saccharomyces pastorianus
atgtctgttatcttagtatctgctggctatgaccacacaataagattttgggaggctcttactggggtttgttcaagaacaattcagcattccgactcacaggttaatcgcttagaaatcaccaacgataaaaagttgttggcaacagcaggccatcaaaacgtacggctttatgacattcggacgacaaatcccaatccagtagcatcctttgagggtcatcggggaaacgttacctccgtttcttttcaacaggacaacagatggatggtgacctctagcgaagatgggaccattaaagtgtgggatgtgcgctctccgtccattcctagaaattacaaacataacgcaccagtaaatgaagtcgtaattcatcctaaccaaggcgagttgatatcttgtgatagagatggtaatataagaatttgggacttaggagaaaatcagtgtacccatcaattgacacctgaggacgatacctctctccagtctttatctatggcaagtgatggttcgatgttagcggcagcaaatactaaaggtaattgttacgtatgggaaatgccaaatcatactgacgcatcccatctaaaaccggtaacaaaattcagagcgcactccacatatataactagaattctactatcatctgatgtaaaacatttggcaacatgttcagcggatcacactgctcgtgtgtggtcgattgatgatgattttaagctagaaacgacattggatggccaccaaagatgggtttgggattgcgcatttagtgccgacagtgcgtatctagtaacggcatcgtccgatcattacgtgagattatgggatttatcaactagagaaattgtcagacagtacggtggacaccacaagggagctgtatgtgtcgcattaaacgatgtatag

SEQ ID NO: 78384 - DNA, 1116 bp, Saccharomyces pastorianus
atgtggaatcctattttactagatacttctagtttttcattccaaaaacatgtgtctggtgtgttccttcaagtgcgtaatgccaccaaaagggctgcgggctcgagaacaagtatgaaggattctgcaggaagaaggttaggaccaaaaaaatatgaaggccaggatgtttccacaggtgaaattattatgaggcaaagaggaacaaagttttatcctggagaaaacgttggtatagggaaagatcattccatattcgccttagaacctggtgttgttcgttactatcttgatccttttcatcctaaaagaaaattcattggtgttgccttgaggcgtgatttgaaactgccatctcctcattttgagcctaccgtaaggaggtttggccgttttgagttaacaaataaaagggcagcatataaggaagaaaattctatttctagaaaagactatctcgcaaaacctaatattttgaagcagttagaggtcagggaatctaaaagaaaggagttacaagacaagttgagtaaggttcttcgggatgaacttaagttagatataaaagacatcgaattggcaacgtcatacttaattcgtgtaagggcttccctgaagaatggataccccatagaagatgcaaggttcaatagtagatattatttaaaagaagaagagcgtttgaaggcaaggagagaaagctggacgaatgagaaattgtcggagagtctatccaagattgatgagtgtagtgatcttttgaactcatatacatctttcaataacaagctagagctacaccagtatatttcggaacaagaaaaacaagctttgaaggcaaaactattagaggacctagaaaaatcccaacacttagaaaccaaaaaagacaagaattatattaaggcgcttttcaaggacgcttgtaattttttgactttatctgaagaagtacatttgcgtaggaaatacttaaagtcggtcttccccgaaacagatagtacggttgaaaccaaaagcgggaagacgtcaattgtgtctagacgttttgattacaccaaaaataaagttgaagtcattgctagaagtaggcgggcttttttgagcaagctttga

SEQ ID NO: 78385 - DNA, 855 bp, Saccharomyces pastorianus
atgaatactttttttctttccttgctaagtggcgccgctgctggtacctctacggatttggtttttttccctatagacacaattaaaaccaggcttcaagctaagggtggattctttgctaatggaggatacaaaggcatatatcgtggtttgggaagcgctgttgtagcatcggcgccaggtgcttcccttttctttattagttatgattatatgaaagtaaaatcaaggccatatatcagcaaactttactcacggggatctgagcaattgattgatacgacaacgcacatgctttcctcttccattggtgaaatttgtgcttgtcttgttcgagttcccgcagaagtcgttaagcaaaggacgcaagttcactctaccaattcttcctggcagactttacagtcaattctacgaaatgacaataaggaaggtttaaggaaaaatctttatagagggtggtctaccaccattatgagagaaataccgtttacttgtatacagtttcctttatacgagtatctaaaaaagacttgggcaaaagccaatggccaaagtcaagtggagccatggaaaggggctatctgcggttctattgcgggtgggatcgcagcagctacaacgacaccattagatttcttgaaaaccagattaatgctcaacaaaacaaccgcctcacttggaagcgttattattaggatttacagagaggaaggtcctgctgtatttttcagtggagtggggccccggacaatgtggatcagtgcaggtggtgctatcttcctaggcatgtatgaaactgttcattcgttattatcgaaaagtttcccaacggctggagaaatgagagcgtaa

SEQ ID NO: 78386 - DNA, 969 bp, Saccharomyces pastorianus
atgtcttcaactcaagacagtaaagcgcaaactcttaattctaatccagaaattcttttgaggaaaagaagaaatgctgatagaactagaatcgaaagacaagaattagctaagaaaaagagggaagaacaaatcaaaaaaaagagaagtaataagaacaaatttgtcagagctgaaagtatagttgcaaagactttggctacctctagggaaaaggaaagaattaaaagagtgtctatattagaagataagaaggcaaagaatgaaacgcagcatattgcatctgggaaagattttattctgaaaataacagaaaaagctaatggcgccgaagagaactctgtcgacttggaggagactgaagaagaagaagacgatggtttaatcagagaaaagactacttacgatggcaaacctgctttacttttcattgtcagagtaagaggtccgcttgctgtaaatattccaaacaaagcatttaagattttgtctttgctaagattagttgaaactaatactggtgttttcgtcaaattgaccaaaaacgtatatccgttgctcaaggttattgcgccatacgtagtgattggcaagccttctttatcttctatccgttccttgattcaaaagagaggtagaataatctataagggtgagaatgaggctgaacctcacgaaatagttcttaatgacaacaatattgtcgaggagcaattaggagatcatggaataatttgtgttgaagatattattcatgagattgccactatgggtgagtctttttctgtttgtaacttcttcttacaaccattcaagttgaatagagaagtatctggatttggttctttgaataggctaaggaaaataaaacagcgggaggctgaatcaagaactcgtcaattttcaaatgcagctacagcaccagttatcgaagttgacattgactctttattagccaagttgaattaa

SEQ ID NO: 78387 - DNA, 1440 bp, Saccharomyces pastorianus
atgtcagcgatattatcaacaactagcaaaagtttcttatcaaggggctccacaagacaatgtcaaaatacgcaaaaggctctttttgcactattgaatgctcgccactatagtagcgcctccgaacaaacgttgaaggagagatttgctgaaattatcccagcaaaggcagaagaaattaaaaaattcaagaaagaacacggtaaaaccgttattggtgaagttcttttggagcaagcttatggtggtatgagaggtattaaaggccttgtttgggaaggttccgtgttagaccccgaagaaggtattagatttaggggtcgtactattccagaaattcaaaggcaactaccaaaggctgagggtagtacagaacctttgccagaagctttattttggttgcttttgactggtgaaatacctactgacgctcaagttaaagccctttctgctgatttagccgccagatcagaaattccagagcacgttatccaacttttagatagcctcccaaaagatctacatccaatggcgcaattttctattgccgtgactgctttagaaagcgagtctaagtttgccaaagcatatgctcaaggtgtatccaagaaagaatattggagctatacatttgaagattcgttagatctgctgggtaaattacctgttattgcttccaaaatttatcgtaatgtgttcaaggatggtaaaattacttcaaccgatcctaatgctgactatggtaaaaatttggcccaacttttgggctacgaaaacaaggattttattgacttaatgagactatatttaactattcattctgatcatgaaggtggtaacgtttctgcccatactacacatttagtgggttctgccttatcttcgccatacttatctttggccgctggtttgaatggtttagctggcccattacatggtcgtgccaatcaagaagttttagaatggctatttaaattgagagaagaagtgaaaggtgactattcaaaagaaacaattgaaaagtacttgtgggatactttgaacgcagggagagttgttcctggttatggccatgcggttttgagaaaaactgatcctcgttatacggctcaacgtgaattcgcattgaaacattgcccagattacgagttatttaagttggtctccaccatttatgaagttgccccaggggttttaactaagcatggtaaaactaagaacccatggccaaatgttgattcacattccggtgttttattgcaatactatggtctaactgaggcttcgttctacactgtattgtttggtgttgccagagctattggtgtgttaccccaattaatcatcgatagggctgttggtgctccaatcgaaaggccaaaatcattctccaccgaaaaatacaaggagttggtaaagaaaatcgaaagtaagaactaa

SEQ ID NO: 78388 - DNA, 219 bp, Saccharomyces pastorianus
atggatggatatcaattgacattttcaaacaacaagaggtcggataagtcgatagtatcggaaaagctccaaagggattgcgatcctccaataacacaaaagtatttttggtctagcgggggtcatacttttcatttccgggcggctgcggcggaaaaaaacgtgacgccttttagcacaaaaatgcaaggtaaatacataaaaaaaaaggcaatgtga

SEQ ID NO: 78389 - DNA, 849 bp, Saccharomyces pastorianus
atgtctgacagagaacaaagcagcggcaacaccgcttttgagaaccctaaggcactcgattcttccgagggtgagttcatctctgaaaacaacgatcagagccgccactcgcaagagtccatatgcaaaatatatactgcgggcaaaaacaacgagtatatttacatcggccgtcaaaaatttttaagggatgatttgttcgaggcattcggtggtactctgaatcccggtttagcccccgcgccagtccataaattcgcaaatcctgctccactaggactttccggttttgccctcactacgtttgtcctatccatgttcaatgcaagagcccaaggcatcactatccctaatgttgttgttgggtgtgccatgttttacggtggcctcgttcaactcattgctggtatttgggaaatcgctttagagaacactttcggtggtacagccctgtgttccttcggcggtttttggttaagcttcggtgctatatacatcccttggtttggaattctagatgcctataaggacaaggaatccgaccttggaaatgcgctagggttttacctcttaggatgggcactcttcaccttcggtctttccgtctgcaccatgaaatcaactataatgttttttgccttattcttcctcttagcagtgaccttcttacttctatccattgcaaacttcacaggcgaagttggcgtcactagagctggtggggtccttggtgtgatagtagccttcattgcctggtacaacgcttacgcaggtattgccacaagacaaaactcgtacattatggtccatccattcgcattacctagcaatgataaggtgttcttctaa

SEQ ID NO: 78390 - DNA, 954 bp, Saccharomyces pastorianus
atgagtggaatgatagaaaatgggttacagctatcggacaatgctaaaaccttacatagccagatgatgtcgaaaggaataggcgcattatttacacagcaagaactccaaaaacaaatgggaatcgggtcgttaacagacttgatgtccattgtacaggaattgctagacaagaacttgatcaaattagtaaaacaaaacgacgaattaaaatttcaaggtgtcttagaatctgaggcgcaaaagaaagccaccatgtcggctgaagaggcactggtatattcttatatcgaggctagcggtagagaagggatatggtccaagactatcaaggcaagaaccaatctccatcagcatgtagttcttaaatgcttgaagagtttagaatcccaaagatacgtgaagagtgttaagagtgtaaagtttcccacaaggaaaatctacatgttgtacagcttacaaccctctgtggacatcacaggaggtccatggttcacagatggagagctggatatagaatttatcaatagtttattgactattgtttggaggttcatatcagagaacaccttccctaatggcttcaagaatttcgaaaatggacccaaaaaaaacgtcttttatgctccaaacgtaaaaaattactctaccacacaagaaattttggaatttattacagcggcacaagtggccaatgtcgagttaaccccttcaaatatcagatctttgtgtgaagtcttagtgtacgacgacaagctggaaaaagtcacgcatgactgctatagagtgaccttagagagcattctacaaatgaaccaaggtgagggcgagccggaggcaggtaataaggctttggaggatgaagaagaattttccatctttaactacttcaagatgtttccggcttcaaaacacgacaaggaagtggtctatttcgatgaatggacaatttga

SEQ ID NO: 78391 - DNA, 99 bp, Saccharomyces pastorianus
atggaaaattcttcttcatcctccaaagccttattacctgcctccggctcgccctcaccttggttcatttgtagaatgctctctaaggtcactctatag

SEQ ID NO: 78392 - DNA, 441 bp, Saccharomyces pastorianus
atgatagatttatacaattactctaacttagaaggtttactagacggattaacggacttgaatcgaattccgaaggaatactccgcagtattggagccatattttcagaatatagcaagaaatgcacatttaaagtctagagctctaaaaatttgtcgttctaatttccataaatggaacgaagaaggtgcgaagacagtcaatccggaaattataagaagatgccttaacctgtggtatgttttgaagggcaaggaatataaaaagttgaaggatcctccgcctgctgataatatcattaaggatgagattgatgtctcatatgttaagaatttgaatgtagtcaggttggaatttgacgaatttggtaaactcataagtaatccattagagaatttgatcttggaagaggtcgaagtgaatgatttcatacaagaataa

SEQ ID NO: 78393 - DNA, 405 bp, Saccharomyces pastorianus
atggtctttaccagctcagaaagttcttcgttgctatcttctcttaaaatgacatgttccatggtatccatgaactctctggaacaaatttccttaataaaaggcgttccaccattttttacacatatattggtaagcttccaggaagacaattgggtatttggattatcggccgtattgagaatccttttctttatacaacgcatagaatctttgggatttacccttctagatcttaacacatctgaaatttccaacgctatggggagatcaaggtcaccgttgggaatgctctcactagtggcttgttctattaatgcgtctaactcacttggcgtgctaacggacatactgttcttagttctttactcactactcattcaccttagcaaaaaaaaatcttga

SEQ ID NO: 78394 - DNA, 1869 bp, Saccharomyces pastorianus
atgtccgttagcacgccaagtgagttagacgcattaatagaacaagccactagtgagagcattcccaacggtgaccttgatctccccatagcgttggaaatttcagatgtgttaagatctagaagggtaaatcccaaagattctatgcgttgtataaagaaaaggattctcaatacggccgataatccaaatacccaattgtcttcctggaagcttaccaatatatgtgtaaaaaatggtggaacgccttttattaaggaaatttgttccagagagttcatggataccatggaacatgtcattttaagagaagatagcaacgaagaactttctgagctggtaaagaccatattatatgaactatacgtagccttcaaaaatgattcgcaacttaactatgtggcaaaagtttatgataaattaatctctcgtggcattaaattccctgaaaagctaacactttccaattctccgactgcaatgtttgactcgaagacgcccgcagattggattgattctgatgcttgtatgatttgctccaaaaagttttctctactaaataggaaacatcactgtcgttcctgtggtggagttttctgccaagaacactcatcaaatagtatacccttacccgatttgggtatatatgagccagtcagagtatgtgatagctgctttgaagattacgatttgaagagacatgacgacagtaaaaaatctataaaacatcgccataaaagaaagaaggacagggactactcaactcctgaggatgaagaagagctgataaggaaagcaatagaactctccttgaaagaatctagaaatagcgctagtagcgagcctattgtccccgttgtagaatcaaagaatgaggtgaagagacaagaaatagaagaagaagaagatcctgatttaaaagctgctattcaggaaagcttgagagaagctgaagaagcgaagctacgcagtgagcgtcaaaaagcctctagacagatgcaaccccaacagccatcacctcaacctcaacctatccattccgttgatttatctgatgaggagaaagacagcatatacatgtttgcttcacttgtcgaaaaaatgaaatcgaggcccttgaacgaaattttggaagactctaaattacaaaacttggctcaaagagtatttgcttccaaagcaaggttgaattatgctttaaatgataaagctcagaaatacaatactttgatagaaatgaacggcaagatttcggaaattatgaacatatacgatagattattggagcaacagctacaaagcatcaatttgtctcagcaatacacacttccacaagtcccttctgatccgtacaattacctaacagaaaatgtgcaaaatccagcagaaagctatcaaacacctcccctccagcaactatcatctcatcaatacaaaccacaacaggatgtctcacgccaacaatcggtaaaagcaaattcatcacctaccactaatattgatcacttgaaaaccatcgatgtgacaccacacgcacagcaaaagcctcaatcgcacgttgaacttgcaccttcggacccaccttatccaaaagaagaggccgaagatgaaggaacacaggcagtgcaagatgaggaatcctccacacaagaatcccgcgaaaggccgtatccagtagaaacagagaatggtgaaacttcaataaataaacggcctcaaggcattacacgttacgattttccaactgttcctgcacgcaaattcgtccaaccggagtcaactgtaccacttcctgcaagttcctctgaaattccgatcaaagaggaaaggccgcctagtcctcaagaggaactgctaatagagctttaa

SEQ ID NO: 78395 - DNA, 933 bp, Saccharomyces pastorianus
atgattagatctacactaagtagttggagagaatatcttacccccataacgcacaaatctacctttttaaccacaggtcaaataactcctgaggagtttgtacaagcaggtgattatttatgtcatatgtttcccacctggaagtggaacgaagagtcgtcagatattagttacagagattttttaccgaagaataagcagtttctgataattagaaaagttccctgtgataaacgtgccgagcaatgtgtcgaagttgaagggccagatgtaatcatgaaaggttttgcagaagatggagatgaagatgatgttctggaatacataggatctgaaactgaacatgtgcaaagtacgcctgcgggggggaccaaggactcatctatcgatgatattgatgagctaatacaagacatggaaataaaagaggaggatgaaaatgacgatacagaagaatttaatgctaaaggtggcctagccaaagatatggcgcaagaaaggtattacgacctttatattgcgtactcgacatcttatagggtccctaaaatgtatatagtggggtttaattctaatggttcaccactaagccctgagcagatgttcgaagatatatcagcagattatagaacaaagacagccaccattgaaaagctacctttttacaagaattcagtgttatctgtttccattcatccatgtaagcatgctaatgtaatgaaaatattgctagataaggttcgtgtggttagacaacgaagaaggaaagagctgcaggaagaacaagagctggacggtgtcggagactgggaggatttacaagacgatattgatgattcgttacgggtagaccaatacttgattgttttcttaaagtttattactagtgttacaccgagtatacaacatgactataccatggaaggttggtaa

SEQ ID NO: 78396 - DNA, 750 bp, Saccharomyces pastorianus
atgtccattatgaagcagaggctaccactgggggagttttccagctcgaagatcaacaaactggcaattgccaatattgcagacactagcgagcctagaaaccatggagaaaacaacgtcgggactgtgtgtcttccctctatcaagagtttgatggttagtcctgaagtatacgaaaacacgaagagtcttcctgttcccctaatgaggagcagtggcggaggtatggcttgtgccagtaagtcctcatgccaggatggtattagtacgaaaacaacgtctagagattactctgagctttccaagaagttgcaaattcgtttacagttcgcctattataaatacaagactaagcaaacagacaaaaatttcacagacttgaaatcaaagcatagcattacgaggccttccaaagtcgcgactcacagtaaatcagaacctttaactaggagaagaaaattagtactatctcagggtcattataaaacccctgctaggtctaagatcaaaactccatcttcgatttgctctcacgataatacatcttcctttacatctttccgcggtgtcagcgaaagctcgagcactaccgcagatatgaacgtcgcagataccaccacaccaatacgcaacaacataaacacaaagcattcaaacagtcataatcgcacattgtatcagagacaagaaacacctacaagcatcaaagccgctaagtctttaattcatctctttacaagtaaccaataa

SEQ ID NO: 78397 - DNA, 2631 bp, Saccharomyces pastorianus
atgtcaagtattacatctgaaaccggtaagcgaagagtgaaacgaacgtatgaagttacaagacagaatgacaatgcagtacgaatagagccttcttccttgggtgaggaagaagacaaagaggccaaggataagaactctgccttgcagctaaaacgatcacgctatgaccccaataaagttttttctaatacgaaccaaggtccagaaaagaacaatttaaaaggagaacaacttggatcacaaaaaaagtcatcaaagtatgatgaaaaaataacgtcaaataatgaacttactacaaagaagggtctactaggtgactccgagaatgaaactaagtacgcctcttctaattctaaatttaacgtagaagttactcataaaataaagaatgcaaaagaaagtgacaaaataaacagacaacgcatgtgggaagaacaacaattgcgaaatgctatggcggggcaaagcgatcaccctgatgatataacattggaaggctctgacaagtacgattatgtgttcgacacagatgcaatgattgattatactaatgaggaggacgatttactacctgaagagaaacttcaatatgaggcacgtctagcacaagctttagaaactgaggaaaagcgtatactgactatacaagaggcaagaaaacttttgcctgtacatcaatacaaggatgagctactacaagagatcaaaaaaaatcaagttttgattataatgggtgaaaccggttctggtaaaaccacacagttaccccaatatttggtagaagatggattcactgatcagggaaagttacagattgccataacacaaccacgtcgtgtggcggccacttctgttgctgcaagagtagcagatgaaatgaatgttgtgcttgggaaggaagtgggttatcagatccgttttgaagacaaaacaaccccaaataaaacggttctaaagtatatgacggatggtatgttactaagagaatttcttacagattccaaattaagcaaatattcttgtattatgattgatgaagctcatgaacgtactctagccacagatatcctgataggtttgctgaaagatattttgccgcagaggcccactttaaaattgcttatatcatcagcaacaatgaacgcaaaaaaattttcagagttttttgataattgtcccattttcaacgttcctgggagaagatatcctgtagatatccactacacattacagccggaggcaaactatatacatgccgctataacaactatttttcaaattcatactacgcaaagtttaccgggggatatattggtgtttttaacggggcaagaagaaattgaaagaacaaaaaccaaactggaggagatcatgtctaaattaggttctagaacaaaacaaatgattataactcctatatacgcaaatttaccccaagagcagcaattgaaaattttccagccgactccggaaaattgtaggaaagttgttttggcaactaatattgcggaaacttcattgaccattgatggtattagatatgtcattgatcctggatttgttaaggaaaattcgtacgtaccttccactggaatgacccaacttttaacagttccatgctcaagagcttcagttgatcagcgtgccggtagggctggtcgtgttgggccgggaaaatgttttagaatttttaccaaatggtcatatttgcacgagttggaacttatgcctaagcctgagatcacaagaacaaatctttctaatacggtgttattattattatcgcttggcgttactgacctaataaagtttcccctgatggataagcccagtatccccacattacggaagtctttggaaaatttatacattttaggtgccttaaatagcaaagggacaatcactcggttaggtaaaatgatgtgcgagtttccttgtgaacctgaatttgcaaaagtgctttatacagctgctacgcacgaacaatgtcaaggtgtactagaagagtgtttgaccatagtttcgatgctacatgaaacaccttcattatttattggtcaaaaaagagatgcagcggcaagtgtgttaagcgaagtggaaagtgatcacatattgtatttggaaatcttcaaccaatggagaaactctaaattttccagaagttggtgtcaagaccacaaaattcaattcaaaacgatgttgagggtaagaaatattagaaaccaattattcaggtgcagtgaaaaggttggattagttgaaaagaacgaccaagccaggatgaagataggcaatatagcgggctacataaatgctagaataactcgatgtttcatcagcgggtttccgataaatattgtacaattaggccccaccggctatcaaaccatgggtaggtcatcaggtgggctgaacgttagtgttcatcctaccagtatacttttcgttaatcataaggaaaaggcgcagagaccaagcaaatatgtgctttatcaacaattgatgctaacgtcgaaggaatttatcagggactgtctagttatccctaaggaagaatggttgatagacatggttccacaaatctttaaagatttaattgacgataaaacaaatagggggaggcggtga

SEQ ID NO: 78398 - DNA, 639 bp, Saccharomyces pastorianus
atgtcgtccacggatatcaagccttgtgccgtgaacatccctgtttccgctcacatcaccttccactacaagtcgatcgcggacagaagcagcagcaggagcagcagcagcagctcctgctcctctgctacatctaaagcctgctcccccagaggcagctccgtcggcttaccgcctgctttatcaactgacaatgaaatcgtcgagactgtacttaatgtttccgctcccgttgtagcagaccctacgcggccctcattgttcaagagtaactacaccgcagcctcgtgcttgacttctgacccaacctcgccgtcactactgccctcttctaggcgcaactctgtattgccggcaagcgacttccaccaatgcgcgcatcacaaaaactttcaaagaagggccagtgagccacaactgccctccttcgataatcgctcgtcgtccgagatgaaaaggtccgtctcgtacgcccagcatagcatgatgttccccatcagtgaccaacaggagccgcaaacatccgcgtctcctaacgaccactcagacccgtcttgtccttgcaacagacatcaccacagaagaaactcggtcgccgtcaagtttgacaaaccattgtatgagagactagagacgtag

SEQ ID NO: 78399 - DNA, 1155 bp, Saccharomyces pastorianus
atggttacatatgctggaaaactggttctagctccaatggtaagagccggcgaactgcccacgagactgatggcgctggcccacggtgcagatctcgtctggtccccagaaatcatcgacaaaaagctaattcagtgcatcaggaaggaaaacacagcactccaaactgtcgactacgtcgtgccgtccaaggttcaaacgaggccggagacgctcgttttcagaacatatccaaaactagaatcctccaaattgattttccagatcgggtctgcatccccggctctggccacccaggctgctttgaaagtgatcaacgacgtcagcgggatagatatcaatgcaggctgccccaaacacttctctatacactccggcatgggctctgccctcttgcgcaccccagacacactgtgtctcatcttgaaagaactggttaagaacgtgggtaaccctcacagcaaacccatcagtgtgaaaataagactcttggacaccaagcaagacactctacagctcgtcaaacgtctgtgtgccacgggcatcacaaatcttacagttcactgcaggaagactgaaatgagaaacagagagcagcccatcacagattacattgcggagatctacgagatatgccaggcaaataacgtgtcgttgattgtgaacggcgctacccgcgaccgctctcattttcatgatttacaagcgaatcattggaaaaacactaacattggtggtatgattgcagagtgtgctgaacgggaccctacagtttttgatcacacttctaagccttcagaagacggtccatcttgggtcgttgcttgtcgcgagtttattcagtgggcaacgaagtttgacaaccacatcggcaatacaaaatacatgttaagcagaattgtccccggaaaatcagtcttttttcagtactttgcccgttgcaagagcccggaagaagttagtttcgtactaaagcaattgaacgatgatggaagcgctcaaacagatccttcagagtacttggaaaactgcagagctcaagaaaaagctttgaaaaacgccaacgccatcgccaagcaaaagaggaaacagaccgatcacataggcagtgacactaaaaagcaaaaggttgtaccccttcccacagatatataa

SEQ ID NO: 78400 - DNA, 669 bp, Saccharomyces pastorianus
atgtcgtggctttttggagataagacacctaccgatgatgcgaatgctgccgtgggcggccaagatacaaccaagcctaaggaactatcgttgaagcagagtttaggtttcgagccaaacatcaataacataatatcaggtcctggtggaatgcatgtcgacaccgctaggctgcatcctttggctggtctagacaagggtgtggagtatttagatctggaagaagaacaactatcctcgttagaaggctcacagggtctgatcccttcccgtgggtggaccgatgacctatgttacggtaccggtgccgtctacctgctgggacttggtatcggagggttttctggtatgatgcagggtctgcagaatattccgcccaatagtcccggaaaattgcaattgaacaccgtcctgaatcacattactaagagaggtcccttcttaggtaataatgcggggattctcgcgttgagctacaatatcatcaattctacaatagatgcactaagaggcaaacatgacaccgcgggctccattggcgctggggccctcacgggcgctttgttcaagtcttcaaaaggtttgaaacccatgggttattcctcggcaatggtggccgctgcgtgcgccgtctggtgtagtgtcaagaaaagactacttgaaaaatga

SEQ ID NO: 78401 - DNA, 675 bp, Saccharomyces pastorianus
atgaagattttaacccaagacgaaattgaagctcatcgctcacatacgctaaaaggtggtattgaaggtgcccttgccggatttgcaatctctgctataattttcaaagtcctaccaagaaggtacccaaaattcaagccttcgactctaacatggtccataaaaaccgccctttggatcacccctcccacggtcttgactgctatatgtgcggaggaggcctcgaacaatttcgacgctacaatgtacggatccggttcctcctcggaagacgcactagatgagcacagaagatggaagagtttgagtacaaaggacaagtttgtcgaaggtctatctaataacaagtataagatcatcaccggtgcctgggccgcttcgctgtatgggtcgtgggtaatcgtgaacaaagaccccatcatgaccaaagctcagaagatcgtgcaggcaagaatgtacgctcaattcattaccgtcgggctgctgctggcctccgttggtttgagcatgtacgagaataagttacatcctaacaaacaaaaggtcaacgaaatgcgccgctgggaaaacgcactgagggtcgccgaagaggaagagagactcgagaaagagggaagaaggaccggctacgtttctaacgaagaaagaataaactccaagatcttcaagtcgtaa

SEQ ID NO: 78402 - DNA, 1215 bp, Saccharomyces pastorianus
atgtctagttcaatatttggcccacttacgggttttttggagcgtgtcaattcactcaatgcgccctaccaagcattatcatatgacgaacaaaaggccatgactatttggcaaagagtcaaattctacaactggacttttgaattgtgtgctctaggtgtgttgttcttggtttatgctttctacaaatttggtaactccgttaatttgaagcgcggaaatcagattttccaatctttgcattcatttttggccaacgacttaaagttctcccgtgtagggttcaatatcaatgattccaaaatctttacagtggaacaccaaaatacatggttctcttcttttgctaccggtagatccgccatcaagagcatcaatctaaaccttcatctggtagcccgtagcaaccctttctctatgtgtctagagtacctgcttggatttttttttgcaagtttgaaaagtaagcaattggaagaatttatggagatcgtgatcaggccaaatggtattttagttactagtgaatctgctcatcctaacaagaatgcgcatgaaattttgaccaaatttagatttgtcacttctattgttaacaaagaattcatgaatcaagctagaactgaaaactatttcctgtctattgcacacactagtgaaaacgataaactaccaaataacttcgtctacatgtccgatgttaatcaattatcagggttcatgtttcattactccaagccctatgaggttttgtcccaagctggtaatcttttgaaatatataagtttcaccgatttgcctgtcaacccgccacgcgatgataaagaatgggaatcttcaattgaaccaaaggctatcattcgttgcgctgttccccaaaatgagaatgaattgaagttgttaaaccaaattatttccttagtcgtagaaatctacgatgggttcactcaagatttagtccaacagtctccaaacttattcattaccaacgacatcttgaaaagaactaccaacttgcgtcagcaagaactgaacaagatcaaaaagtttatgaaagaaactgaattggaattggcaaaggagaagaaattagaattggaaaaagccaaaagacgtcaattgaaggcctctggtcaacaagaaaaggtagatcaaaaaatgaaagagaaaagagaaagacgtctcaaaaacaagcaaagaacaagatttcagtaa

SEQ ID NO: 78403 - DNA, 420 bp, Saccharomyces pastorianus
atgctacattgcacccaggtgtgtctgagcgctctgacaaagagaacccacagggtcaaggttcaagtcctgaaggatttcccgcgatttcaattatataaaggacaagttgcaaatgtcaaaccatctttaatgagaaactatttacataacttcaatggtgcaaaatacatactcagcgaagaacacgacataaatacggaactgttaaaacaataccaaacacttgaggcaaagctagaggaagaccatcaacagctctctaaacgccatgaaacggaagttcaaaagaacatggagttacgtaaagaatctgtttttggccacaagaaagaagagaagccaaaagaggaaaagaagggattattggattctgggattactatcgaagaggttaagatccccggtcttgacatttga

SEQ ID NO: 78404 - DNA, 1701 bp, Saccharomyces pastorianus
atgcccaaagtaatgaaacccagcaacggaaaaggttctagaaagagttcaaaagcagccacacctgatactaaaaatttctttcatgcaaagaaaaaggatccggtgaaccaagataaagcaaataatgcttctcaaattacgccaacagtgccacattctcatccatcagatatggttatccctgaccatttagccgaattgattcctgagctgtattctttccaacaactggtggattccgagaaaagattagatcattttattcatctgcgaaacttacatatgaagcgaatggttgcgcagtgggagaggtcaaagctatcccaagagtttctttatcctcatttaaattttccaaatgtaaaatttctccgaatcttcatttcaaatgttagtgaaaaccaaccctggcaaatggacacaaacaatgaggctgaccttatggcactggagaatgccacttggacgatgagaatcgaaggtcgattattggacaatgtgcaagctaatgatccagcaagagaaaaatttagctcattcatagaatcgatagtggtagacttcaaaaataaggaaaacgataatgtgccatcgactaaatttaatgcggcccctgaagaaaatgccatcgaaggacccagtgataagaaattgaacttaaacttaccgttacaattttcactgccgaatggtgacaactctactacgactaataccgaccaaaataatgccacgatgggggaggagactgccaaaaaggatatgagctctacaactccaaaactagaatcagtgaaatggcagtatgacccgaataatcctgtagacttcgatggtctcgatattaagagggtagggtctgaaaatgtagaatgcactataagcatcctgcgaaagtcatccccagaagagccatttatgagctactctccacaactaaccgcaataataggattgaagagcggtacatcacatgatgcaatattttccatatataaatacatccatttaaatgaattgcttaccaatgatgagtctgcattcgaaaatttgatgggcaacaggaacaatcacaatagcaacaccagtactagtaagatgcttgatgcagcctccagtcaagtttctattgtaaaattagacactcagcttattaccttattacccagcagtcttaaagaatcttctccagatacaatgaaattaacggatttactgtcccttattaatagtactcacctgctcccattacagccgattgaaattgattacacagtacgcgttgataaagcttccacttatggtgagttggttcttgatattgaagtacctgatgtcaacgctctaaaattcaataatacacaaagagaaagtcaaattggggctgctgaattgaatgaaaatgccagggaattggaacaaatcaaacccaagatagctttacaggacaaagaaataacgtccgttctctcgaatctacacgagagcaacaaacgataccgtttcttcaagaaaattagtgaggacccagttaaagcattaaatgaatgcattgcttctacctcgaatgctttgaaagttttatcgggagatgagggctataatgaagatatggtaaggcgggctaacttttacaaggaaaatgaagctatgttgcgcgagaatatagaagtcatattatcaaatggacgaatgtag

SEQ ID NO: 78405 - DNA, 561 bp, Saccharomyces pastorianus
atgagtgctaacaatggtgtcactggcaaactctctagtagagtcatgaatatgaagtttatgaaatttggtaagacggatgacgaagagagttccaactccaatacgccgtctaatatcaactcagatgtggaacctatagagcagaaaggtaaactctttggtctggatgactcagcgtgggacctcaatagctacaaagatgatttaaaaaaaatttcaggtaaggagaagaaaaaggtgaaaagagtagtatataagaagcgacccaatctcataatctccaacgttggttacagtgaactgcgaaaacctgagggtgtgataagtgggagaaaaacctttggcgataattctgatgatagtggttccaggaagagaaagtttgatgaaggcgaacaaaatgaagacgagaaaagggatgctaaggataaggaatttacagggagccaagacgatggagaggatgaatatgacctagatgaattatttaaggatagcatcaaaaagaaaaagaccaaccataatggtaaaaataaaaatagaaattcaaaaaagtag

SEQ ID NO: 78406 - DNA, 360 bp, Saccharomyces pastorianus
atgacaaatacgaaaaaaatactacacaatgctttatattatgttctcattattatatacgaatacgtacttctgctggtgcattgtctgcgctacttttttgaatttctatttttatttttaccattatggttggtctttttctttttgatgctatccttaaataattcatctaggtcatattcatcctctccatcgtcttggctccctgtaaattccttatccttagcatcccttttctcgtcttcattttgttcgccttcatcaaactttctcttcctggaaccactatcatcagaattatcgccaaaggtttttctcccacttatcacaccctcaggttttcgcagttcactgtaa

SEQ ID NO: 78407 - DNA, 1656 bp, Saccharomyces pastorianus
atgcgttggtctgtccttgatacagtgctattgaccgtgatttcctttcatctaatccaagctccattcaccaaggtggaagagagttttaacattcaagccattcatgatattttaacctacagcgtatttgatatctcccaatatgaccacttgaaatttcctggagtagtccctagaacattcgttggtgctgtgattattgcaatgctttcgagaccttatctctacttgagttctttgatccaaacttccaggcctacgtctatagatgttcaattggtcgttagagggattgttggcctcaccaatgggctttcttttatctatttaaagaattgtttgcaagatatgtttgatgaaatcactgaaaagaaaaaggaagaaaatgaagacaaggatatatacatttacgatagcgctggtacatggtttcttttatttttaattggcagtttccacctcatgttctacagcactaggactctgcctaattttgtcatgactctgcctctaaccaacgtcgcattggggtgggttttattgggtcgttataatgcagctatattcctatctgcgctcgtggcaattgtatttagactggaagtgtcagctctcagtgttggtattgctctatttagcgtcatcttcaagaagatttctttattcgatgctatcaaattcggtatctttggcttgggacttggttccgccatcagtatcaccgttgattcatatttctggcaagaatggtgtctacctgaggtagatggtttcttgttcaacgtggttgcgggttacgcttccaagtggggtgtggagccagttactgcttatttcacgcattacttgagaatgatgtttatgccaccaactgttttactattgaattacttcggctataaattagcacctgcaaaattaaaaattgtctcactagcatctcttttccacattatcgtcttatcctttcaacctcacaaagaatggagattcatcatctacgctgttccatctatcatgttgctaggtgccacaggagcagcacatctatgggagaatatgaaagtaaaaaagattaccaatgttttatgtttggctatattgcccttatctataatgacctcctttttcatttcaatggcgttcttgtatatatcaagaatgaattatccaggcggcgaggctttaacttcttttaatgacatgattgtggaaaaaaatattacaaacgctacagttcatatcagcatacctccttgcatgacaggtgtcactttatttggtgaattgaactacgatgtgtacggcatcaattacgataagactgaaaatacgactttactgcaggaaatgtggccctcctttgatttcttgatcacccacgagccaaccgcctctcaattgccattcgagaataagactaccaaccattgggagctagttaacacaacaaagatgtttactggatttgacccaacctacattaagaactttgttttccaagagagagtgaatgttttgtctctactcaaacagatcattttcgacaagacccctaccgtttttttgaaagaattgacggccaattcgattgttaaaagcgatgtcttcttcacctataagagaatcaaacaagatgaaaaaactgattga

SEQ ID NO: 78408 - DNA, 222 bp, Saccharomyces pastorianus
atgattgaggtagttgtgaatgaccgattaggcaaaaaagtcagagtgaaatgccttggtgaagatagtgtaggtgatttcaaaaaagtattgtccttgcaaattggcacccaaccaaacaaaattgtgttgcagaagggtggaagtgttttaaaagaccatatctctctggaagattatgaggtacatgatcagacaaatttggagctgtactacctgtag

SEQ ID NO: 78409 - DNA, 966 bp, Saccharomyces pastorianus
atgacaacaaccgtacctaaagtgtttgcattccatgaatttgcaggagtagctgaggcagttgccgatcatgttattcacgcacaaaactctgcccttaagaagggtaaagtctcaaggtccacacagatgtccggaacgagccttaacggaaatggtaacacagaatccaaaacgatggagagagtaaattctgtaaggagtaatgcctccagccgtggtggtagtgaagacggcgccactaagaaattgaaaaaggagaaagaaaggcgcttcaagattgcgttgtccggtggttcgttaatccaagtgttgcacgaaggattgttgaaaagagacgacgttcaatggggtaaatgggacatttactttgctgatgaaagactagtgccctttagctccagtgaaagcaattacggtcttgctaagagaaaaatattcgatttaatagatacggagaagtacggaactccgaaaatttatcacattgatgagtcattgattaacgaccctcaagagtgtgcagataactatgagaaaattctaattaaaggatttgccggtagagattctgtgaaactaccgatgtttgatctgtttctgcttggctgcgctcctgacggtcacatagcctcgttattccccaattttcaagagaatctacgtgaaaatctggcatgggtcatacctgtagaaaatgcacccagcggaccttcgaataggatttcactgaccatcccagtgatttgtcactctcatagagtcacctttgttgtagagggcgccacaaaggcacctgtaatcaagacaataatggaaaggcctgaaaagggattgcctagtagtattgtcaatgagggcgccgccggtcgtgtttcatggtttgtagacgacgatgctttgaaagatgtctttgtaattaagaagaagtacaagttttatgatgatgagaatttgactgagtag

SEQ ID NO: 78410 - DNA, 462 bp, Saccharomyces pastorianus
atgttgtcgaggtttatgtccaacacatggtgtacgcccttgagacaggcgcagagactgttttcctccactacgacaatgcaagcgacattgaatcagattaaaagaggctccgggcctccaagacgcaagaagataagtacagctccacaactggatcagtgtccccagcggaagggtgtcgtattacgtgtaatggttttaaagcccaagaagccgaattctgcgcagagaaaggcgtgcagggtccgtttgactaacgggaacgtggtatctgcatatataccgggtgagggccacgatgctcaagagcattcgattgtatatgtcagaggtgggcgttgtcaggacttgcctggtgtgaagtaccatgttatcagaggtgctggtgacctgagtggtgtggtaaacaggatttcttcgaggtcgaaatatggagccaagaagccaagtaaatcgtga

SEQ ID NO: 78411 - DNA, 276 bp, Saccharomyces pastorianus
atgcaaccggcagctagacttttatcgcggtccgtatggaagggccccaacatcgtgccattacccataagggaggccatgactaagggcactccaataagaacaaacgcaagggccgccaccatccttcctcagttcgtgggactgaaatttcaaatacacaatggtaaggagtacgtacctattgaaatatcagaagatatggtgggtcacaaactgggcgagttcgcacctaccaggaagcgtttcagctatactcaaaccaagaacaaatga

SEQ ID NO: 78412 - DNA, 1890 bp, Saccharomyces pastorianus
atgtttgcatcgagatttgaccctagccaattgactgctcctgcagctagcgcaccagaaggaatcgtcggaactactcccccggccattgtgcctttaaagaggcaggctactgaatctgataatgaagaatatggctctcaccaagattctgatgagagttccaactctagttcagaggaagacgaagaccgtatgcaagtagattatggggctagtgaagaggattcgagtgaagtggaagaggaagagagtaagccaagtactcacagcacagtgctatcgagattcaagcaaacagtatcattgcaagaaaggctaggtgcatctgatattgctgagagtaaggaagacgaaagtattgaagacgaggcggcctcaactcaccaactaaaacagattcctcaacctgaattcgtcaaaaacccaatgaatttgaatacaaattcattacagttcaaatctacgggttggttaaatactgagaagatatattatgataattccttgatcaaaccgttctcggattacgcaaatgaattagaagcaaaactactgcagaatatttgcaagaatttctctacaaacacttttcccatccaatcgatcatcctagactccatattaccggtattgaacttcacgttgaacgtatctaagagaaacttcaccagaagaatcggtgatattcttgtaaatgctgctaccggttcaggtaaaactttggcttactccattcctattgttcaaaccctcttcaagagacaaattaacagactgcgttgtataatcatcgtccccacaaaactattgataaaccaagtttatactacgttgacaaagctaactcaagggacgtcgcttattgtgagcattgccaaattagaaaattctttgaaggacgaacacaaaaaattatcaaatttggaaccagatatcttaatcactacacctggtagattagtagatcatctaaatatgaaatcgataaatttgaaaaacctaaagtttttgattatcgatgaggctgatcgtcttttgaaccagtcctttcagggctggtgtccaaaactaatgtcccatttgaaaacggataaattagatacacttccagggaacgtgatcaaaatgatcttcagtgcgacattgactaccaacacagaaaagttaaacggcttgaacctttacaaaccaaagttgttcctgaagcaaaccgataaattgtaccagctacctaacaaattgaatgaatttaacatcaacattcccacggcgaaaagtgtttacaagccattgatattgttgtattcaatatgccaatttatggcacattcccccattgctgcaaagattttgattttcgttaaatcaaatgaatcgtctatcagattaagtaagttactacaacttatctgtgaatctcgctcacaatccagcgtattgaaaaaccttcaaaatttggcggtgagtattaattctgtcaattcaaacaactccaaagcagaaaataaaacaattgttgcgaacttctcgcatcactcggaaagcgcaggcattaccatcttaattactaccgatatcatgtcccgtggtagagatattaacgatatcactcaagtaataaactatgacccaccaatgtcttctcaacaatatgtccatcgtgttggtagaacagcaagagctaacgaacttggttccgcttataacttactagtaggtagaggtgaaagaacgtttttcgatgacttaaacaaagatctagatagagacggtaaatctgtccagccattagaactcgattttaccctattggaatctgattctgaactatatacttcgtctctagaaagtttgaaaaactatcacaataacaccgcacaagcttaa

SEQ ID NO: 78413 - DNA, 1818 bp, Saccharomyces pastorianus
atggagacgccgcaaatgaacgctatacaagaggaggacaatttgtctccggaagttgctttccagactcctaaattgaatgattccgatgcttcatcgttttctttgtccaatatgaacgctgtcgggaatgtagacggtataccatcccaaaacaggacattttttgcatcacctaggcccagttccctattttattctgctaaggaaggtaacaattccagttctagtatcatctacaatccttcgttcacttttggtgaaaacgcttctagtaatactaatatcaatgaagctgctttgatgaagggaaaaagcaacgaaggacgaaggcaatcactcaaatatataccagcaccaaagctggtgccgcctcctcccagaacaagatcaccggtaagaggcatttcccccgatgctggcagcagtaagaggtcttctatgaccttggattctccctttaattttacgacatcaacgctgcaaccgcatcaacagacaccaccctcttcagctgcatcaaggacctcatttcgtaaggggcatcgttataagcattcctctgtatccatgaatttttttcaagagcctgaggtgaaaattcctttgaacattgccaaatctcttcccattccagatttcaatgatttgctgtcaaatttgccatggccaaaggctcatattcagttatctattgccgctctacaaatctttgcatgtctgattactttccaaattggacacctgtactcatggagtaattttattacattatcgcattttattacttacgatatcatcggttcgctggtaatcatatttgtggaaaatttgtctcagttccaggtatggtttacaggcactatcacatttccattcgggttaaatagaatagacgttctactaagttttgcgcttgccgtttcgttatgctttgttgggctggaccttttattccatataattgaagaattcatagtcctctttgtagaatctggtagttctttgacgaataaccatgatcacgatgaaattaatgagcaaattcctcattcccacattgccaatgccaatgattcacaaaacgagaatattaccttatggtatagcatactaatgatcaatttagtgttatcgacgttatcactttataagacgttttatgctaacaaatacagtaatttaaagacgaagaacccgattattaccatcacttatacagcatacctattcatttatcccttactattggatctgttatcgagtatatccgatcaccttgctactttggttatttcgagtttaattctatggcatgggctgactatagcacggtggacctcgacagtgttactaatgggattttccaccacatctttatccaattcagcgttattcaataataatgacagcactgatacgaccgcccatactcaacaagtcgagtctaaagctgctaaagaaaaaccatctgtacgaccaagatcaatgagctcactacctatagcaacaaagaatacaaagatacggaaaactgggtttttgaattctgcaggtttcactgaaaatccaacaaccattaagaacatgatcaaggaccaaatcgagagattaagtgagtttaaatccagatacatcctaaattacgatgatatagtaataagcaaagtgaattttacgctttatgtggtactgatcaagataacaatgaaaggaggctccgacgatgacgaattgatgttaaggttagccattgacaagtgcattcaaacgagcattccaacgtgtgaaactacaatagacatagaccgaatataa

SEQ ID NO: 78414 - DNA, 771 bp, Saccharomyces pastorianus
atgacaaacatggctgccaagaatcagttcaaaggaagcagcttcacactagcgcagctaatcgaagaagtcggacgtaacggaggaagaaagcctgtgttccagtataaggtaccacggtcgatacgatgggcttcaactgctctagctgtagtgtttctcacatatggcgctgcatacactgatatgtcgtggagaactgctcgagaagtgtacggaaacgctactgaggaagaaaaacacagcccgtggttcaagtgcaaaacttttgggcctgtggctttaggggttttgcctgtgatcctcgctgctgccacgaaacacgtaacgtcaagactagtcacagaaatgaaatatctgccaccgctcaagaatagtacggtgccacggtgtcaattgactcgacgcacttacttgttaggaagaccagtttctatcacgagggagatcaatgaactgtctaaaaataaggccactaagatcttcacaggagtaggttctcaaggtatggaggataaggccacctttgttttcttcacagtggatgaaaaagcaccctcatttttcaataaattttacattttctcgagatctggtagcgttgtgaagaatgacgccaggatcttggactgctttttcaacagtgtggcagaaaataagctattgaacaggtcaatattaactcagatcctttcacatacgtctgccaagacccaatttcactcggggaattctagatcatccatcaagaatatcgtgaagcccaaatag

SEQ ID NO: 78415 - DNA, 1119 bp, Saccharomyces pastorianus
atgtttatttggcagagaaagagtattttactagggaggtcaattctgggcagcggccgagttaccgttgctggaatcattggaagcagcagtaagagatatacgtcttcttcctcctcctcctcctccccttcctcgaaagaatcagcacctgtgtttacgtcgaaagagttggaagttgcaagaaaggaaagattggatggactgggaccgttcgtgtctcggctgcctaagaaatggataccgtatgcggagctgatgaggctagagaaacccgtgggcacgtggctgttatatttgccctgcagttggtctatacttatgggagccatgatgcaaggtgctacattgagcgcaacagctggtatgttgggtattttcggtgtaggtgcattggtaatgagaggtgctggctgcaccatcaacgattttttggatagaaagttggatcaaagagttatcaggtccgtcgagaggcctatcgcctctggtagagtgagcccccgtcgggcgttagtattcttgggggctcaaactcttgttggaatgggcgttctatctttgcttcctgcgcagtgttggtggctaggccttgcatcgttacctattgtgttcacataccctttgtttaagcggtttacgtactatcctcaagctgcattaagtgcatgtttcaattggggagcgttacttgggtttcctgccatgggtgtaatgagctggcctacaatgatacctttgtacctgagcagttacttgtggtgtatgacttacgatactatatacgcacaccaggataaaaagtttgacatcaaggctggaatcaagtctaccgctttggcttggggtccacgcacaaagtctatcatgaaggccatgtccgcgtctcaaatcgcactgttagctgtcgccggcttgaacagtgggttgttatgggggcctgggttcattggtggactaggagtcttcgcttatagactcttcagcatgataaagaaagtggatcttgacaatcctaaaaactgctggaagtattttaatgcaaatatcaacaccggactttactttacgtacgccttggcagtcgactacatcttgagactgtttggattcttgtag

SEQ ID NO: 78416 - DNA, 429 bp, Saccharomyces pastorianus
atggtgcagccagcacctctcattaccaatgcacctacaccgaaaatacccaacataccagctgttgcgctcaatgtagcaccttgcatcatggctcccataagtatagaccaactgcagggcaaatataacagccacgtgcccacgggtttctctagcctcatcagctccgcatacggtatccatttcttaggcagccgagacacgaacggtcccagtccatccaatctttcctttcttgcaacttccaactctttcgacgtaaacacaggtgctgattctttcgaggaaggggaggaggaggaggaggaagaagacgtatatctcttactgctgcttccaatgattccagcaacggtaactcggccgctgcccagaattgacctccctagtaaaatactctttctctgccaaataaacattagttga

SEQ ID NO: 78417 - DNA, 1191 bp, Saccharomyces pastorianus
atgaccgtttacacagcatccgttaccgcacccgtcaacatcgcaacccttaagtattgggggaaaagggacacgaagttgaatctgcccaccaattcgtccatatcagtgactttatcgcaagatgacctcagaacgttaacctctgcggctactgcacctgagtttgaacgcgacactttgtggttaaatggagaaccacacagcatcgacaatgaaagaactcaaaattgtctgcgcgacctacgccaattaagaaaggaaatggaatcgaaggacgcctcattgcccacattatctcaatggaaactccacattgtctccgaaaataactttcctacagcagctggtttagcttcctccgctgctggctttgctgcattggtctctgcaattgctaagttataccaattaccacagtcaacttcagaaatatctagaatagcaagaaaggggtctggttcagcttgtagatcgttgtttggcggatacgtggcctgggaaatgggaaaagctgaagatggtcatgattccatggcagtacaaatcgcagacagctctgactggcctcagatgaaagcttgtgtcctagttgtcagcgatattaaaaaggatgtgagttccactcagggtatgcaattgaccgtggcaacctccgaactatttaaagaaagaattgaacatgtcgtaccaaagagatttgaagtcatgcgtaaagccattgttgaaaaagatttcgccacctttgcaaaggaaacaatgatggattccaactctttccatgccacatgtttggactctttccctccaatattctacatgaacgacacttccaagcgtatcatcagttggtgccacaccattaatcagttttacggagaaacaatcgttgcatacacgtttgatgcaggtccaaatgctgtgttgtactacttagctgaaaatgagtcgaaactctttgcatttatctataaattgtttggctctgttcctggatgggacaagaaatttactgctgagcagcttgaggctttcaaccatcaatttgaatcttctaactttactgcacgtgaattggatcttgagttgcaaaagggtgttgccagagtgattttaactcaagtcggttcaggcccacaagaaacaaatgaatctttgattgacgcaaagactggtctaccaaagaaataa

SEQ ID NO: 78418 - DNA, 1470 bp, Saccharomyces pastorianus
atgcatttgaaaaaggggaagaggagtattagcacagtatggcgacttttatggaagcgtttttattccgtaaactctaagacgaatatgcatttttctcgaagtaggaagaaaccagtgacaaacttcacaaggacaaacggacttctcctgagctgtaatggtgatacattcccatatctgcgtacactgtggagatacttcaatgcgcctggtaatttgatgtttgtcacaactaatattgtcgcatttatgggcattgttacgtataatacgctggttactatcagcagtgaaagagcattcgaagagcagatgatggcggcacaggtgagcctggcgaaacagagagaagagctcgagactacggccctcagcttgccacgagatattgaattgaggggtgaagaagatgatattaaatgggagcaacctgttgtagcacatgtccgggaagatcccttagccgaggagcagaacgcaaagttagacacccctataaaacagtatactttaggagatttgattttgaataagagggaaaatgtcactgattatgactcgcagcgtgcgaaggcatccatattccacatgctatatgcttatatgctgtatcgagatgttattcaacccacggccatgactcaaaataacaacagcgaggaatggcggcgtgaagtcgagcttttgactaagggaaaagaggtacaaggtactcatcgaaggatagacgtgttctacgacctgtggaataaaaatttcgataagatagtgacatcacctgagaaagtgcagaattttcaactgccgaactggtctaaatacccaacgatattgaaattcatctgcacagaacttcacaacaacagtttcaagaccttgggtgagttcaagcaattctatggaaaggtgcgatctaacgaggtaaaaaaactgttgggtctttggctgtacgaccattccttccttttcccccataatatctacgacaacagaaccgaagaagatttttacgatatattaattaatgactccatgcaggataacaagatattccagaaatactcttcaattgtaatgaatccctacaacgaacgtactcaactttttttccctaatgtaaattctccatctgtcaacaagccagtaccgagcatatctctggaaacatacacacgactactcaagggatacatcaacctgcaagaaacagactgcaaatacgactataatgacaatatattcaaactaatcagcatcctcaaactaaattgtttcctacaacgcaacaagaagaaacacgcagggccaaccgtcagaatcctactgccgagagatgtagaccgctctcaaatacttggtaccatttcgcaggcagagaagagaacctgttatcaaattctaagcaaaaatagggacgtggttgcgctgctgaaacgcatttctgatatccaagcggactcttcttaa

SEQ ID NO: 78419 - DNA, 408 bp, Saccharomyces pastorianus
atgaagttcttaaccaccaacttcctaaagtgctccgttaaagcctgtgacaccagcaacgacaacttccccctacagtacgacggcagcaaatgccaattggtacaggatgaatctatcgagttcaatccagaattccttctgaacatagtcgaccgcgtagactggcctgcagtgctcacggttgctgccgaattgggaaacaacgccttacctcctaccaaaccatccttcccatcttcgatccaggagctcaccgatgacgacatggccatccttaatgacttgcatactttactgctacagacgtccattgccgaaggtgaaatgaagtgtaggaactgcggacatatctattacatcaagaacggcattccaaacttgctgttacctccacacctggtataa

SEQ ID NO: 78420 - DNA, 2682 bp, Saccharomyces pastorianus
atggctggacaccatcacgaacatgaacaagagcgcgagcacgagcaagaacacgaacacgattcccttcaacggcctactactggatcagaaaggactagaagtatatccttttcgaagttacttacgcggtcatggaaaaggaatgcgagttcatcgaacaacatgagtgtgtctagcgtgaacctgtattcggatccagagaactcgagagaatcagatcacaataatagtggctcagagggtcagtcttcacgattttctaaattgaaaagtatgttccaatccggcaatagcagcaaaaatgccagtgcccataacagcagccaaagcagtcttgaaggtgattcggcgtcatcttcatctaagttaagatacgttaaaccaatgacttctgttgccaatgcttttccggcatctccaccactttctcccacgatcccggaaacggatgttcttcaaacaccaaagatggtacatatagatcagcatgaacatgagcgtgaacactcgaattgcgggtctccaataatgctctcatcatcctctttcagtcctactgttgccaggactgggacgggtaggagaagatcaccttctactccgataatgcccagtcagaactcgaataactctagtagcacctctgctatcagaccaaataattatcgtcaccattcaggatctcagggattttcttccaacaatccattcagagaaagggcaggtacggtacgcagtagtaacccatattttgcataccaaggtctaccaactcatgccatgtcttctcatgacctcgatgaaggattccaaccatatgcaaatggcagcggcattcactttttgtccacccccacctcgaagacaaattctttgacaaacaccaaaaatttaagtaatttatcactaaacgagattaaggaaaatgaagaagtgcaagaattcaataacgaggatttcttctttcacgatattccgaaagatttatcgctcaaagatacgctgaatggctcacccagtagaggtagttccaagagccccacaattactcaaacgttcccttcaatcattgtcggatttgacaatgagtacgaggaagataacaacaatgataaacatgatgaaaaggaagaacaacaaacgacaaccaacaataaaacgagaaatctttcacctaccaaacaaaatggtaaagctacccatccaaggataaaaatacctttaagaagagcagcttcagaaccaaacgggttgcaactcgcatctgccacatcgccgacatcttcttcagcaaggaaaacgtcagggtccagtaatataaacgacaaaatcccaggccaatcagtgcctcctccaaactcatttttccctcaagaaccccctccaaagatatctgattttccagaacctaggaggtcccgacgtttgagaactaaatctttcagcaataaatttcaagatatcatggtgggaccacagtcttttgagaaaataagattgctgggccaaggtgatgtaggtaaagttttcttagtaagagagaaaaagacgaatagagtgtatgctttgaaagtcttgagtaaagacgaaatgataaaaagaaataaaatcaaacgtgttctgacagaacaagagattcttgccaccagcaatcatcccttcatcgtcacactataccattcgttccaatctgaagactatttgtatctctgtatggaatactgtatgggcggggagtttttcagagctttacaaacaaggaaaaccaaatgtatatgtgaagacgatgccaggttttatgccagtgaagtgacagcagcactagaatatttacatctgttgggttttatctatagagatttaaaaccagagaatattttgctgcatcaatcaggccatatcatgctttctgacttcgacttgtctattcaagctaaagattccaaggttcctgttgtcaagggttccgctcaatcaacccttgttgataccaaaatatgctcagatgggtttagaaccaattcctttgtcggaactgaagaatatattgcccctgaagtcataagaggtaatggccacaccgctgcggtcgattggtggacgctagggattttgatctatgaaatgttatttggtttcactccattcaaaggcgataacacaaatgaaacttttacgaatattttgaaaaatgaggtcagttttcccaataacaatgaaatctccagaacttgtaaggatttgatcaaaaaattactgacaaaaaatgaatctaaaagactgggttgcaaaatgggcgctgccgacgtgaagaaacacccctttttcaagaaagtccaatggtctttgctgagaaatcaagaaccgcctctgataccagtgttatctgaggatggatatgattttgctaaattatcatctaataagaagagacagactagtcaagacagccataaacatctcgatgagcaagagaaaaatatgtttgaagaacgagttgaatacgacgatgaagtctctgaagatgatccattccatgacttcaattcaatgagtttgatggaacaggataacaattcaatgatttatggtaataccaattcttatgggaaaattgcatacactccaaactccaacagatcgaggagtaatagtcatcgaaccttttttaagagataa

SEQ ID NO: 78421 - DNA, 1182 bp, Saccharomyces pastorianus
atgggactgatattaaggtggaaagagaaaaaacagttgtctagtaagcaaaatgctcaaaaatccaggaaaccggcaaacacatcgtttagacaacagcgcctcaaagcctggcagcccatcttgtcgccacagagcgtactgccgttgcttattttgatggcatgcgtcttcgcacccattggtatagggctggtggtcagcacgataagtgtccaaagactagtggtaaactacacagaatgtgatgcattggcaccgtcgaagcattttgaaacgattccctctgagtacgtggactaccacttcagtaagaaagtcacagtccaacctcaatggatggtacttacggatcctgaattgggcaatcaaacttgtcgaatacagttcgaagttccaaatcatatcaagaaatctacttatgtttattaccgcctaacaaatttcaatcaaaactatagagaatatgtgcaatctcttgacctagaccaattaaaaggaaaagcattgatcggaaatgatctggatccaaactgtgaccctttaaggacggtagaaaataagaccatattcccctgtgggttgatagcaaattcgatgttcaatgatacattcggcacaacgcttactggtgtaaacgatactgcagattatttgcttaccacgaaaggcattgcgtgggacaccgacagccatagatatggaaagaccgaatacaatgcatccgatattgtaccgcccccaaattgggccaagttatttcccaatggctacactgacgataacattccagacctacaaaactgggaacagttcaaaatatggatgagaactgctgcattgcccaacttctataagctagcaatgaaaaatgagaccaatgggttaggtaagggtatttacattgctgatatagaactcaactacccagtaagatctttctatggaacaaaatcttttgtattaaccacaaacagtattatcggtgctggaaacgaggcattagggattgtttacttgattgttgctgggattgcaactcttttcgccatactattcctgataaaagtcatcttcaaaccaagacctatgcatgatcatagctacctaaattttgagaacagcgataccccattcgatgagagtagtgtcgttagtattccattgagagaaattttatga

SEQ ID NO: 78422 - DNA, 633 bp, Saccharomyces pastorianus
atgatgagtcaagtatcgcattcccaagaaggatccgggcgattttggaacaagtttaagtcgtcaaccaaatcgttatctacatcgttggcacatttatccattaaagcagaaaaagatggtgatactgtaaatactacattggtccataaagggcttgtgaaattctatgaaaatcagcatcctttccaggggttcccaggatggttgggggagaaggaagatttaccgaacgaacgtaaaatattagatactcaagtgaagcatgatatgaagaagcaaaactcgcgtcatttctcgccatccttttctaacagaaggaaggcttcttcagaagatcctatgggtacaccttcttcaaacgggaacacaccggagtacacgcctgcgagtaaatcgtttcaagatatatacaataatcatacaagctcctctagcgcgacaccgagaagagcttcatcacggccgactagaccttcagcaggccaagaattcagggcaagtctcggtcgaagtaaaacgtcgaacagtttcaacacctccagcacgccaacgccgccaccagacgcaagtagtggagtaatggcaatgaaggacagactaaagagacgcaataacgattatggattttaa

SEQ ID NO: 78423 - DNA, 1341 bp, Saccharomyces pastorianus
atgggaaagaacgttttgttgctaggatctggttttgttgcacaacctgttatcgacacattggctgctaatgatgacatcaatgtcactgtcgcatgtagaacattagccaatgcgcaagcattggccaagccctctggatccaaggctatttcattggatgttaccgatgacagtgccttagacaaagttctggctgataacgatgttgtcatctctttgattccatacaccttccatccaaatgtggtaaagagcgccatcagaacaaagaccgatgtcgtcacttcctcttacatctcacctgccttaagagaattggaaccagaaatcgtaaaggcaggtattacagttatgaacgaaattgggttggatccaggtatcgaccacttgtatgcggtcaagactattgatgaagttcacagagctggtggtaagctaaagtcattcttgtcatactgtggtggtttaccagctcctgaagactctgataatccattaggatacaaattttcatggtcctccagaggtgtgctactggctttaagaaactctgctaaatactggaaagacggaaagattgaaactgtttcttccgaagacttaatggccactgctaagccttacttcatctacccaggttatgcattcgtttgctacccaaatagagactctacccttttcaaggatctttatcatattccagaagccgaaacggtcattagaggtactttgagatatcaaggtttcccagaatttgttaaggctttagttgacatgggtatgttgaaggatgatgctaacgaaatcttcagcaagccaattgcctggaacgaagcactaaaacaatatttaggtgccaagtctacttctaaagaagatttgattgcttccattgactcaaaggctacttggaaagatgatgaagatagagaaagaatcctttccgggtttgcttggttaggcttgttctctgacgcaaagatcacaccaagaggtaatgctttagacactctatgtgcacgtttagaagaactaatgcaatatgaagacaatgaaagagatatggttgtactacaacacaaattcggtattgaatgggctgatggaactaccgaaacaagaacatccactttagttgactatggtaaggttggtggttacagttcgatggccgctactgttggttatccagttgccattgcaacgaaattcgtcttagatggtacaatcaagggaccaggcttactagcgccatactcaccagagattaatgatccaatcatgaaagaactaaaggacaagtacggcatctatctaaaggaaaagacagtggcttaa

SEQ ID NO: 78424 - DNA, 1548 bp, Saccharomyces pastorianus
atgggtgttaccgttcaagacatatgttttgcctttttgcaaaactactacgaaagaatgaggaccgacccttccaaattggcatatttttatgcaagtacagccgagttgacgcatactaattatcagtccaagtcaacaaacgaaaaagatgacgttcttccaacggtgaaagttactggacgtgaaaacattaataagtttttttctagaaatgatgccaaagttaggagcttgaaactaaaattagatactatagatttccagtacactgggcacttgcacaaaagcattctgatcatggccacgggtgaaatgttttggacaggaactccagtctataagttttgtcaaacatttatcctgctaccatccagcaatgggtctacgtttgacattaccaatgatataatcagatttattcccaattcattcaagccttatgtcttaacagatgcttctttgtcacaatctaacgaggagaactttgtcagtgcagttgaagaagataaaataaggcatgagtccggagttgaaaaagaaaaagaaaaagaaaaatcaccagaaatatcgaaaccaaaggccaaaaaggaaactgtcaaagacacaactgcgccaactgaatcgtcaactcaggaaaaaccaattgtcgatcatagtcaacctcgggctatacccgtcactaaagagtccaagattcacaccgaaacggtaccatctagtactaagggcaaccacaaacaagatgaggtctctacagaagagttaggaaacgtcactaaactaaatgaaaaatctctcaaagccgaaaagaaagctgcaccaatcaagacaaaggaaggctctgttgaggccataaatgctgttaataactcttctttgcccaacggtaaagaagttagtgatgaaaaaccggtacctgggggcgtaaaggaagctgaaactgaaattaaaccaatagagccacaggtttccgacgccaaagaatccggcaataacgcttcaacaccttcatcttctccagagcccgttgcgaatccaccaaagatgacatgggcctcaaagttgatgaatgaaaactccgacagaattagcaaaaataataccacggttgaatacatcagacctgaaacactacccaagaaaccgactgaaagaaaatttgaaatggggaatcggagggacaacgctagtgctaacagcaaaaataagaaaaaaccagtattcagcaccgttaacaaggacggcttttatccaatctacattagaggtacaaatggcttaagagaagaaaaattgagaagtgccttagaaaaagaattcggtaaagttatgaggataacagctgcagacaattttgccgtcgtcgactttgaaactcaaaagagccaaatcgatgctttagagaagaagaaaaagtcaattgatggtattgaagtatgcttagaaagaaaaacagtaaagaagcccacgagcaataatcctcctggcatatttactaatggaacacgttctcatagaaagcaacccctaaaaagaaaggactag

SEQ ID NO: 78425 - DNA, 951 bp, Saccharomyces pastorianus
atgagtgaaaaagtaaatagtgactttgaagacttttcctcagatgaggaaaccgatcaacataacgtcttaattcagaccaagaaaaaaatttctagtaaggatgatatcttcagtaagaaggtagaagacatcgaaagtgaaaacgagtcagacatagaagaagagcaaaaacaagaagaaaaagaggatgtagaacaaccagataaagagaatggagaaaagctcgatcgagaagtagaagaacaagcttcgtccaccacttcactggatttaaaaacagaaaaactaaggcaactggtaaaatcaaaggccgccaagaagtctaaacacaagactggggtggtatacttctccagtattccaccttacatgaaacctgcaaaaatgagacaaatattaactcgttttggtgaggtagatagactatttctaaagaaagaggacgatcaaaagtacaagcaaagagttaaaggtggaggaaacaagaaaaacaagtatgaagaaggttgggccgagtttattaggaaaagagacgccaaattgtgtgcggagacgttgaacgggaacattattggtggcaagaaaggtactttctaccatgatgatatcctgaacgtgaagtacctcccaggtttcaaatgggcagatttgactgaacagattgcccgcgagaacgatatcagacaggccaagttggagatggaaatctcgcaggccaacaaactgaacgcggaattcattagaaacgtggagcaaagtaagatgatacaaaacattaagaactctaggaagcgcgccggaaaagaaggagagtctgcagattctcaccctcacagggaatttaaacaacgtcgtgtggaaacaagccgtgccaatgctccctctgatatcaagcagcaatcctctgggtccaaagacttgggtaatgttctcaccaatttactataa

SEQ ID NO: 78426 - DNA, 1761 bp, Saccharomyces pastorianus
atggacaaatataccaacagggatcatccggactatattcctggcacatttaacatctattcttcccaaaatttggaaaatggtattatatacgaatcaaaattgaagaaaacctcctcaggagtcgtcctaatccctcaaccatcatactcgccaaatgatccactgaactggtctagctggaggaaattggctcattttggtctaatggcctttataactgcgtttaccgccgctactagtaacgacgctggtgctgctcaagactcattgaatgagatttatgggatatcctacgattccatgaacacaggggctggtgttcttttcctaggtattggttggtccactttattcttggctccatttgctaacttgtatggcaggaagattacgtacatagtttgcaccacattaggtctctttggtgcgctttggtttgctttggccaaaagaacgagcgacacaatatggtctcagttgtttgtaggtattagtgagtcctgtgctgaagcccaggtgcaactgtccctgagcgacatttttttccagcaccaattgggctccgtattgaccgtgtatatcatgtgcactagtatcggtacgttcttgggcccattgatcgctgggtacatatctgcatttaccaacttccgctgggtcggttgggtcgcagtgatcatatctggtggccttttaataactattatatttggctgcgaagaaacgtacttcgacagaggccagtatatgacccctttgaccagctgtcaatcgggatacgaagacggtaccactttacaaaactctgacaatacggccgtgtcgcgcaggaaacgtcatcttgacgctaaattatcaactcctggagccatgggtgagaaaggtgtagacctttcagagacggctgaattcgaagttaacaatgaagaggaagttaccatacctgagactcgcgaattgattgatggttcaaaagagcatttgaaaccatacccaaaaagagtagcaatattaaccaaagctactaatttgaaaggctacggttttaaacagtatttcaaatatctaaagatcaaccttagaatgttcttattcccgcccgtgtggttgtctggtatgttttggggtattcaagacgttttcatgacgttttatttgaccactcaagaaagcgcctactacgaacctccatggaactatagtgattttggtgtcgcaattatgaatgttcccacacttattggagcagtgatcggttgtatctgtgctggcattgttagtgactactttgttctttggatggctcgtcacaatagaggaattttagaggcagaatttagactatacttctctatcgcaactgcaattattgggccagcgggtttgctgatgtttggtatcggtaccgctagacaatggccttggcaagctatatacgtcgggttgggttttgttgggtttgcatggggttgttctggtgatattgcgatggcgtatttaatggatcgttaccccgatatggttttggaaggtatggtttgtactgctattattaacaacacgatatcttgcattttcacctttacctgttctgattggctagctgcatctggtactgaaaatacttacattgctttagctgtcatcaactttgggattactgcatttgctttaccaatgtactactatggtaagaggataagactttggactaagagatggtatttgcaatctgtcaatttgagagacggtgtgtaa

SEQ ID NO: 78427 - DNA, 1686 bp, Saccharomyces pastorianus
atgaacagagtaggggcagtgttcctatttgtatatgaaagaaatttttttttgtctattgttccagatcgtcacaggacggaaataagaatgtctagttcagaaaggtcagaagtcaagtttgacaagcactttaattggtggtccctattaggtatcgcgttctcattaagttgctcatgggtcggtatctcagcgtcgatggccgttggtattgccagtggagggccactgcttatcatctatgggttgataattgctgcttttttcagtctcatgtgtggtatatctctgggagattttgctgctatcctgccaaacagcagcggtggttcattttgggttcttaaaatgttggaacaagaatcagtcactttgaaaacccctgagtacgaggacccttctgacgatgatgaagaagtgttcctcgagaattattgtcaaactttcaacgtggaagtttcttctaaatttcaaaaggtttcttccatggttgtagggttgctgaactatttcggtgccatttttactaccgcaagtatctgctcatctttgtcaatgagctgtatcggtattcataagttgttgcatccggactacgagttaaagcactggcatgtttttgtgggttacgagtgtatcaatgccgttttgacacttttcaacatttattcaactccgttgccctatatctctcagtttgggctctatacgtctctattgtctttcgccatgactttcattatttgtattgttttaagatctgacaacaccgtagacccatggcccaaagcttctaatatatttgggagctttgataatcaaacaggctggaattcgtctggaatggcgtttgttgtcggtttggtcaatccgatctgggcatttgttggcattgactctgctacgcacatgattgatgaagtgggttatagtaagtcacgtttcttagttcccaaagttattatcactaccatcattgtgggctttgtaactagttttatttattgcgttggtttgtttttctgcatcactgaccaaacggcagtcgttgagtctattttacctatcgtagaaatattttaccaggccactggtaataggaatctcagtgtcttcctgcaatgtatgtgtatcacaacaggttttgtttcaggcattgcaagtggaacctggcaaagtcgaatcctccaatcattcgggaaaagttacgcaccattttataaagagggttccttgggaaacaaatccttgaagaagctagcagttttgacacctgggtttaagtctccattatatgcccattttttgtcacaaatatgtgtaacgataattggctgtatatttatgggatctagtaccgctttcaacgcaattatcactgcatgcatcaccctgttactaatgtcgtacgcagttccttcttttatattcctattcgttattagaaaggaaaaattcattcatagaatcgagagtgacgtaaattgtgtcagcaggcctaaccgtcgtcgtatgtctatgattcctcatattatatgtattctatggaccttgttctgcctggtgtttttatctttcccatatacactaccggttactgcaggaaacatgaattacacctcagtagtgtatgcagtagttttctgcattatcagcatcgttgtttgccctacatgcatctaa

SEQ ID NO: 78428 - DNA, 1443 bp, Saccharomyces pastorianus
atgtcccaagaaatttcatatacaccagatgtcgcggaactgctagactttgataaaaaacatatttggcatccttatacgtcattgagttcaccattgaacgtttatccggtaaagagtgctcacggatgcaagctggtgttggataccgactcaccagtggacgtcgaggtgatcgacgccatgtcgtcgtggtggtgtgttattcacgggtacaataatccagaactaaatgaggcccttaccaagcagatgttaaagttttctcacgtccttcttggtggattcacccataaaggagctgtgaatctagtccaaaaacttttaaaagtgattgatgaaccctctttgcagtactgtttcctcgcagattctggctcagtagcagtggaagtagctttgaagatggctttacaatcaaacatgtcaggggaagctactaaaaatagaacaaagtttttgacaatcaagaacgggtatcatggtgatacatttggcgctatgagtgtttgtgatcctgagaattctatgcatcatatctacaacgatcgactcagtgagaacatcttcgcccaagctccctctattgtcgatggccttccaaccagccagaacggtttcgaggaccattggaatgcagaagaagttaccgatctcaagaagcaatttgaattgcatagtgataagatctgtgctgtgattttggagcctatcttacagggtgcaggaggtttgcgaccataccatccacagttcttaatcgaagttcagaaactatgtaaccaatacgacgttttattcatcatggacgagattgctacaggatttggtagaacaggtgagattttcgcattcaagcactgtcaaaaataccaggaccaacatggcatcagtccttccgatcagatcaaagttgttcctgacatattgtgcgttgggaagggcttaaccagtggatatatgactatgagtgcagtggtagtcaacgacaaagttgcttccagaatctcttctccaaatagccctactggtggctgcttcatgcatggccccaccttcatgggcaatgccctggcatgcagtgtggcagaaaagtctatggatatactactgcgtggcgagtggagaaaacaagtgtctgcaattgaaaaccaaatttatagagaactataccagtacatcaagaacccagataatgggctcattggaactgttgttaagcgtgtgtcagttattggagctgtaggtatcgtagagctatacaagaagacagatcccgagtggttccagaaaaagtttatatccaagggagtacatatccgacctttcaactgcctgtgttacattatgccaccatatgtgatcacgacagaggaattgacgaaggttaatcaagtcttgattgaagtattacatgagtggaaatcccacataaaccaatga

SEQ ID NO: 78429 - DNA, 1743 bp, Saccharomyces pastorianus
atggtattgcgcatacgaagaattaagaaactggcaccattgatcttcacatcattgttgtctctcattgttctttttagggtctaccgacagtatccattctccgaccatttcgaaacacgcagagaagatgatcgctctggcaacgtgcactgcttttctagactgcgtcaaatagaggaatatgaaaagccggaattgacaagtaaattctatgaaccgaatagatggaaatcttttatatcttacgtgaccaggagtcgcaaggatgtgaaaactgtgtcccgatcgctatccaatttggatttgtatcaaaaatgctcaaaagaaatccgtgctgatcaggatatttcccttcttcatagcatagaaaccaagttgttcccatatataaacttcacagccctaaatagtgaacaatctcataatttttggcctgttcatacccgatttgatggaacaaagtaccgtggacaggtattacaattttcttctgagaacaattcgttcattggaacttcacccattgaattcaaggctagcgaacctttttgggagaactggttgaattcagctcttcaaaggaattcaaaaggtgtggtaatgagcgtatcggattatctggtggctgatacaattcgactaataagagttttgcagctgttaaataattcccttccaattgaaatcgttcacaaatcggatttacatgagagttctcaacagctcttgatagcagcagcaagagaatctggatccttaaattatccccctcaggaattgtggtttctggatgtgaaagacatgttaaatgacgaatatttagcgagattcaagagattttcgaataagtggctggcaattaccttttgttcatttcaaataccaatctttttggactctgatactgtaccttttgtcccgttggatacactctatgaaattgacggatttaaaagaacaggtacactgtttttcaaagacaggagttttccaacctccaagttaagtccactccaagttaaagttttgaagcagataatcaataatagtctggatgtatcctcggattcggagcaaggttttgaaatcttaaaacataacctaaacgatgagatggcaattgatgcaatagaggccttgattttcaagaaacaaaaacattacatggacagcggcttagtgatattcgataaacaaaaacactttttctgtctaccaatcgcaataatgctgcaattttcgcctatccaagagtttttccatggtgataaggaatggttttggcttagtttgtttatttccaaaaaagagtttactttttatccaatagaggcttcgaatgtaggaagattagagaagccggagactctagaaagcagtacaatctgttctacccagctatctcacacggacgtgtacggtaatcttttgtggttgaatggcggattatccgtttgcaaaaaaaattgttggaattatgattttacaaagcgtaaagagattgcggccaaatacaaaagcgttgatgaattacggaattactatcaatcacctgtgaaactcgaagctgtcataatacccgatgtcagcaagtccccctggtcgcaacagagcgaatgcgttatgtacagctattgcacacattataggaagggacagtacggaaaattgatagagtttacagattctcaaaagaaatattacgagaaagttgtagaattatggaacaaggttgtatag

SEQ ID NO: 78430 - DNA, 2160 bp, Saccharomyces pastorianus
atgttgttggtacatattatatctttccttctgttcttccagctttcggccgcaaaggccccacccagtaaaacgtctctaataaatactcatgagagaaggtcgatatattcatgctacgttggtttacgtaaagaaacatgggggttcaatgggtccgctatatgtcggtatgaaccagcaatccaatcgatgctttactgtctttacgaagacacgcatgagaaagggtattcaaataaaactttggagaaaggttttgaagaaatgagacaattttgctatacaccaaagtttttgaacatgactgatgccgagttttacacctcattggataatggaacatactatatacaagatcaacctaaagctggcatcaatatcacttatcctatcagactgaacactacactaagaaaagcatactatgatgcatactatggttactactataaccatgacattccgtattatttcgggggcattatctgtgcatactttgtgggtgtcatgttgcttgcaggtttaattcgttttttgaattataccccaataaaaaagattatgtttcagcaaaagctagtcaattacgtgagaggttatactactctacccactctttatgaaaagcatgcagagcccttctcgtacttaaaagtgataacaggctatcttcctactaggtttgaaacgttggttattttaggctacctcatacttcataccattttcatggcctacaaatatcaatatgatccataccacatcatatttgccgctcatagagcagaagtggcacattttgttgcgtacagaagcggtatactttcttttgcacacctgccactcattgttttatttgcgggaagaaataactttctccaacttatttctggcttgaagcatacctcattcattgtgttccataagtggctgggaagaatgatgtttcttgatgcaataattcatgctgccggctttacgaactattatttgtattataaaaaatggaatacggttagattaagagtctactggaaattcggtattgctgccacctgtttagcgggaatgttaattttcttttccatcgcagcatttagaagacactactatgaaacgtttatggccctccatatagtattcgcagcactatttctctatacttgttgggagcatgttactaacttcagcggtatcgaatggatttacgcggcaatagcaatttggggagtttatagaattgtacgtatcaccagaattgcactcttaggatttcctaaagcagatctacaactggttggatctgatttggtccgtgtaacggttaaaaaaccaaagaagttttggaaggcaaaaccaggccaatacgttttcgtttccttcttgcgtccattgtgcttctggcagtcgcatccatttacagtgatggattcttgcgtaaacgatagagaattggtcatctttctgaaagcaaagaaaggtgtgacaaaactggtaagaaactttgttgaacgtaaaggcggcaaggcatccatgagattagctatcgaaggcccttatggctccaagtccaccgcccatcgctttgataatgtattattgttggcaggtggctcagggcttcccggtccaatttctcatgcccttgaattaggaaagacaacagctgcaagcggtaaaaactttgtacagttagtcatagcagtaagaggactagacatgctcaacgcgtgtaagaaagaactaatggcattaaagggcttgaatgttcaagttcacatttataattctaagcaagagctagcttcgactgaaaaaatttcctcaaatgaagtcaaaaacggtgaaacgacagcagagaaggccccatctagtctaagcaattcagaaaaagctccttctgaaagtgaaaatacagaactacctctttccctgaatgacacgtctatctccgatttagaatttgccactttccatgttggaaggccaaatgttgaagaaatactaaatgaatctgttaaccattctggttcacttgccgtcgtatgttgcggaccacctattttcgtcgacaccgctagaaatcaaactgccaaagctgttatcagaaacccatcaagaatgattgaatacttggaggaataccaagcctggtga

SEQ ID NO: 78431 - DNA, 660 bp, Saccharomyces pastorianus
atgttaaagttaacaacaacatccgttactttccacgtactaagatatttccaacttggcttatctgtaactaacttgttgttagctagttttgccataatcacaaactataaagtggatcgaatccttagattgagcttaactgtttcaatcatattttcagtttattttgggattgtgagatttttgcctgttctgttaatattcgtgatggaaattgttcagaccgtcctgtggtttaccgcttgcgtaactctagcttcaaaatttggttctatgtcctgctcaagtatgccacggggtataaactttgattattcaggttcttgtaagattgctaaaatagatattttaccagaagccgttttattcatactatttctcgctaccacatatgcttcttatatcacagtcctatctcaagctaaggaaaatgggtcaagcacaagatttgttttgaaggcttgtgtgaaggcattacgtgatatcgtggaccgcttggagactagtctggaagagagtgagcctcttttagatcttgaagttcaggaagatgcgaggactgaaaccgaaagcattgaggattcaactgatagtgaggataatgctaacatcgaacaagagaaagtgattgatggttcaattgagcattcttcatga

SEQ ID NO: 78432 - DNA, 1824 bp, Saccharomyces pastorianus
atggacagatctaaggacgctagaaagagatctattagtttggcctgtactgtgtgtaggaaacgaaagttgaagtgcgatgggaacaagccatgtggaagatgtataaggctaaatacaccaaaagaatgcatttataatattgataaaaggaaagacaagagaaaaatcaaaaacgggtcgaaggtttttttattcaagaataatactatcgataacgggaataactctatactagagaacaaaggactaaatgaagacctttcttctcatatatatgagaaagaagcgccaaaattcgattcagatattgatatatcaagatttggcacaaatgatgctgtgatttttaataatgacgggtgggacacttctcttccgatcgattttgatttcgatgagtttaacactgagacaacagatttcgatgactttttaaaactattaggcgataattcaccttcaaaggaacaaaaaagtctttcctattcccctactgctacaggcttaagcggtgtggttaaagaaactgagagcgaagataacgctcctacgaggtctcggctaatcgatgtcttgtttgagaacaagcttcactccgtaccaggaatatcaaaatggcatctatatgagctggaatcccaatacccaaatttggaatgtacagaaggaaatagtgatgaaaagtttttactttcaactgtattgtgcctggggtcgttgaccatacgaaaaagggaactattgaatcattcgaacatagacaatcgtccacttttgccggagaatagtatttcaaaactgaccactgatgcttttaagtactataatgctgcgaaaacgcttgttcccgacttgttatctcatcccacaatcgatggattttgcggcctcgttctaatggcaaatttcatgacgatgatgatatccttagagcaccaattatatttgagtataaatgctttacaacttgctgtggctttaaacttgaacgacaatacaaaatacaaggaattacttgagtcgaacagcgacggaattggtgtgatcttgcttttttggaacatttggtgttcttcttgcatgttggcaacaattcatggaaaaaatccttttatcactttggaacaaattacaacacctctgccgtgtgaaatatccccccgcaataaaactaataaacttttgatagatttcatgcaaatcagaatcaagctagccactctacaaagtaagatttttcaacggctatatacttccagcaccgcaaacgaggtaccattcgtaaacttagaaagagaatttgaggaggtttcactccagattaccaggttaaaaggctttccgatattcgaagaacatcttttttacaggagcagagtcttaatgttagagctatcatgtttaagagctcaagcttcttttctattatatcgtccgtatctgatcactggagaatccttacaagcagtaaccatggcaaaatcaataattcacgaaatatggagtcaatacactaaacagtttcccgataacgaaaaggaaaggcatgaacgtttggattggaatttttgttatcctttaagaacagcgtcactgacattatgtatttcatgtattatactcctaaggtataagcaggtggtgcagttccttaaaggtactgaactatttgaatacattctagcattggaaatattgcaagatttagttcaggtacttcctattgaacaaaaccttattgatataatcaaatatccgatcagtccagtacagctgagtggtgatagctttgtcgaattttggggtcgcatactttactaa

SEQ ID NO: 78433 - DNA, 873 bp, Saccharomyces pastorianus
atgtcaaatatcattgcaagatttcacaagattcaagttcaagacggtgtaaaggtttggtaccgtgaggccggtgcagcaggtaaccccacaattttattgctacatgggttccctacatcttccaacatgttcaggaacctcattcccttactagctggacagtttcacatcattgctccggatcttcctgggttcggatttacggaaacgccagaaaactacaagttcagctttgattccctttgtgaaagtataggatatttgttagatactttgagtattgaaaaatttgccatgtatatatttgattatggatctccggtaggttttcggttagccttgaagtttccctccagaattactggcattgttactcaaaacggtaatgcttacgaagagggtctcgatgaccgcttttggggtccgttgaaggaatattggaagtcatatcaaagtgatccggtatttgttaaatcccttatcccgtaccttgaagatccagctaatgtcatatgccagtaccatgatggagtaccagctatcgaatctgttgatcccgccgcttatacgcttgatattgcgctaattcagcgtaccggccagaccgatattcaattgagattatttttcgattatcagaataatataaagttgtacccagcctttcaaaagttcttgagagattcaaagattcctgtgctagttgcatggggtgcgaatgatactatttttagcgttgccggggctgaagcttatcggaaagacgttgataatttaaaggttgtttactatgatactggccattttgcgcttgaaactcacgtagttgctattgccgaagaaatcatcagtatgtttgcagaaaattaa

SEQ ID NO: 78434 - DNA, 1311 bp, Saccharomyces pastorianus
atgatattactccaagtcatatgcacgatttggacatgtctctttattccgttactcaatgcagaggaattcgtccccaaagtaacggagactctttcagaatattcatttagtctaaagagctttgacgattccaacagtttaatcagattagataatagagtcgtgtggatgagtttcgattctggagaaaattgggaagcggtcaaagaaattgaagggcatattgtcgaattaactgttgatcctttgcatggacaggacagggcttttgcttcggtatttttatcacccaaattttacgtcaccgatgatcatggaaaatcatggagggctctgactatacccatctctgaaaactgtcgtttaggtactacttgctctatagctacccatccgacagaaaaaaagtatcttattgtagattgcccttgctttataacagacaatagttttttccaaatacaaaatgagatttactttaccaacgatggggaatccttttacaagatcgaaccttccttgaaaaagaaagaagatgaccatataacaagttcaagctgcaactttgtcaaatctagcaaggattctgatattgagggtaacgacgcttcgatactatgtttgttctcgaaccatgggtacgatagcgatcgtcacttaagtgccgcatatacacaattagccttaagtactgatggaggtaaaactttcaaaaaatttgatgagtttaatgataaagttatttatcaatacaagatattaaaatcacatataatcgtttcgacacaagatgatagatacaatgaaatgtcacccatggacatctggatatccaatgatgcgtctacttttcaaaaggcacgtctacctgctcaagtacggcacgtccatatgtatggaatttatgaagattctattggaagaataatcattcctatatctacgatattcacagatgaaaaaaacgaccaaccagctccctcagaaattttaatatcagattctcaagggttgaaatttttacctgttgaatggacaataaatcctcactttggttatattgatattgcttctcctcatttcttagaaggaacaataattggctcgtttcatccttcctttgactactctcataacaaaggaaaatataataaaaagatagccagatatgaaactaaaatatctgttgataacggcctcacatggtcaaatttgaaagtggttgacgaggaaaatgcagattcattcccttgtgatatcactaggcctgaaagatgttcgctccagaaccctttttatagtatctaa

SEQ ID NO: 78435 - DNA, 1029 bp, Saccharomyces pastorianus
atgtcaaatagtaacggtgataataagtatggtgtcattacaattggtgatgagaaaaagttccaagctaccattgcgccacttggtgcaactttggtagacctgaaggtaaacggccaatcagtcgttcaaggttattcaaacgtacaagactatttaacagatggtaacatgatgggcgctacagttggtcgttatgccaaccgtatcgccaagggtgttttcagcctggatgatggtcctcacaagttaactgttaacaattgtggtaacacaaatcacagcagtatcagttccttaaatcttaagcagtacaaggcgtcccctgttgagaatccttccaagggcgtttacgttgttgaatttaaattgttggatgatcacacacagcccaaccctaacgagtttccaggtgacttggaagtcacagtgaagtacactttgaatgttgcagaaatgactttagacatggaataccaagcacagttagttcgtggtgatgctactccaattaatatgaccaaccactcgtattttaacttgaacaaagtcaagagtgagaagtccattcgtggtacagaagttaaggtctgctcgaacaaatcgcttgaagttacagagggggcattgcttccaactggtaagatcattgaaaggaacattgctacttttgattcaactaagcccaccgttttgcatgaagatactccggtctttgattgcactttcattattgacgctaacaaggatttgaagactacagattctgtgagtgtcaacaaattggttcctgtttttaaggcctatcatcccgaatctcacatcaaatttgaggtttcgacgacagaaccaaccgttcatttgtacaccggtgataatttatgtggcaaatttgtgccaaggtctggatttgccgttcagcaaggtagatacgttgatgctatcaaccgtgatgagtggagaggttgtgttcttctgaagcgcggcgaggtatacacttcaaagactcagtacaaattcgatatttag

SEQ ID NO: 78436 - DNA, 1125 bp, Saccharomyces pastorianus
atgggggaagagattagacttttgtcctctaaaggtcttgagacccatagtagcttttgtttgcccgaggatattttcagaaaccgtttaacatggttgtgcagtgagattcgcaactcaggattttggatctggtcgctatcatggttaccgcttgccgtttggtgggggatggccagtacttggttttatccccttctgacttcagtagttctaatcctggcgctaattgctattttgccagtagttcaaatacagtacagtaaatatactttatcaaatcaactcacccagctttctaaagaaatcatcaaaagtgcaccaggtgcatactctgctgattgggacgctgttgcaatacatttcaattcctacttgtatgaaaacaaagcatggaaaactgcacattttttttttaatggtactgactgccaagaagcattcaggaaaaccattctagagccagctgttttgaggagacaaaacgaagatcctaggttcagttcaattgagattttggtcccttacaccgaagacgcggtgcaggtttattttacaaaagtaaacgcacagtggaggttgatccatggtaagaaggaatgcaaacttactatgttggaaaatgtcaagcttcctaaggaaacctatcgctgcaagctagcatggagttgccagagaatcaggatttctttctctccactagacttccttcctgatatgtctgacttctttatttgtgcaaatttatcaccagcatgcttggtatcttattggctaatagacattttctttagaatgatagatgattttcaaaacataaggcctaaatcgatgaaagttgatgataaaatgcagtacctatcagatattataaacgagcagggtgctagccctgaaaaatgggatacaattgcaaggaaaacgaatacacgattatttgaaaagagggtctggaaaaacgaagagtttttctttgatgggactgattgtcaggcattctttgaacggaactttagtagccttttgttctcaaaaaaatctgcgtcgcctagatcattaaacgttgaactttggaaatacattcaagaagcgcaattgagctgtaactatgagccgttaccataa

SEQ ID NO: 78437 - DNA, 363 bp, Saccharomyces pastorianus
atggtcaaattaacttcaatcgccgctggtgtcgctgccatcgctgctactgcttccgcaaccaccactatagctcaatctgacgaaagagtcaacttggttgaattgggtgtctacgtctctgatatcagagctcacttggcccaatactacatgttccaagccgcccacccaactgaaacctacccggttgaagttgctgaagccgttttcaactacggtgacttcaccaccatgttgactggtattgccccagaccaagtgaccagaatgatcaccggtgttccatggtactccagcagattaaagccagccatctccagtgctctatccaaggacggtatctacactatcgcaaactag

SEQ ID NO: 78438 - DNA, 273 bp, Saccharomyces pastorianus
atgcaatactgtgaactcgatttatcagggcagtggctggatacagtatattgtgaagagaatttctccgactttgtctttataaagtttctaaatccttcacagtttgaagagaagatatattgttatactttacatatcaccaaaaggacactagaaaataagagattacttttgtattatgaagatgaattcaaaaaacatggtcacgatattaatgagcttgttggcgacggtataatcttgcgttcatgctggaaccctcgacagtaa

SEQ ID NO: 78439 - DNA, 516 bp, Saccharomyces pastorianus
atggttcccttatttggtttattttgcattttttctcaattgtactcattatgctccgcatatgttgatatcaccagcggttaccaagtatttttcaacttgccaactaatatgacaaacaatcaaatctgctggctattccaagcatcttactatgatatttattctgataaaagtggtagaacacttagaacgggacggtttgaacccggcgatcagcaatctttgatttatagggataccttagttgagttggaggctattacagattcttatgagtacagtaacctagatctatcgacttataacggacctgagccatataattctgagactgattattgtacagatataatggatttggtaatgcgtgtatatgatgaagaaggacattatgttcatccagttgcgaataactcaacaaatgcttgcgctcatccaactcctcctacgttaaacaatctattgataagtaattattctgacggaagaaattataaagagtcttctatataa

SEQ ID NO: 78440 - DNA, 1821 bp, Saccharomyces pastorianus
atgctagaaactgatcactctagggatgacaatttagacgataaaagcactgtctgctacaacgaaaagacagatagcaatgttgagaagtctaccacgtctggcttgcgccgtatagacgctgtcaacaaggtcttgtctgactacagctcttttacagcttttggagttacgtttagttcactcaagaccaccctactggtggctctgtttttgcagggttactgtactggactcggagggcagatttcgcaatcaatacaaacctatgccgctaacagttttggaaagcattctcaagtaggatcaatcaataccgtcaaatcaatagtagcctctgttgtcgcagtgccatacgcacgtatgtcggaccgatttgggcgtatagaatgctggatctttgcgctggtgctttatactgtgggagaaattatttctgccgccacaccaacatttggcggactttttgcaggtattgttatacaacagttcggttattctggatttcgtcttcttgctacagcactgactggtgatctgtctggattgagagatcgtacatttgcgatgaacatatttctgattcccgtgattataaacacatgggtaagtggaaatattgttagctcagttgctggcaatgttgcaccatataaatggcgttggggctatggaattttttgcatcattgtgcccatctccaccctaatcttggtccttccctatgtatatgctcagtacatttcctggcgcaacggtaagttaccaccattaaaattaaaagaaaaaggacagaccctgcgtcaaacgctctggaaatttgcggaagacataaacttaattggagtcattctttttactgctttcttagttttagtattattacctctcacaatagctggtggagccacctccaaatggagagaaggtcacattatcgcaatgattgtggttggtggctgcttaggttttatctttctaatttgggaattaagatttgctaagaatccatttatcccacgagtatatctaggtgatccaaccatctacgttgcattgctaatggaatttgtatggcgtctaggtttgcagattgagttagagtatttggtcaccgtgttaatggtagcattcggagaatcaacattaagtgcgcagcggatagctcagctttacaattttctacagtcatgcactaatattgttgtcggcattatgctgcatttctatcctcatccgaaagtctttgtagtcgctgggtcgcttcttggtgtcctcggaatgggtcttttgtacaaatacagggtggtatatgacgggatttcgggtcttattggcgctgagattgtggtcggtatagctggtggtatgatacgttttcctatgtggacgctagtgcatgcttcaaccacccacaatgagatggcaactgtcactgggttactaatgtccgtttatcaaatcggagacgcagtaggtgcttccatcgctggtgctatatggactcagcgtctggcaaaggagttgatacagcgactcggctctagtttagggatggcaatctacaaatcaccactcaattatctaaaaaaataccctattggatcagaggttcgtgttcagatgatagaatcctattcgaagattcaacgcttattgataattgtgtcgatttcgtttgcggctttcaatgctgttctctgttttttcttgcgtggttttactgtaaacaagaagcaaagtctttccgcagaagaacgagagaaagagaagctcaaaatcaaacaacaatcatggctccgtcgtgtaattggatattga

SEQ ID NO: 78441 - DNA, 1740 bp, Saccharomyces pastorianus
atgtcagaacctcagcacgcctcaatcaaagatgaacgcccttctggacagccaacacctgcccactctaaatataagaagtttgttctaccattaattggcttattgactttggggtttgcctacataagccgttctaccggtaatgcgtcaaattcaacctttgaggtccctgtttctcaacattgtgtaaaatccaaaccatattatccgtcgttcaataagtctgtgaatttgattttgaacgacaagcaatttaaaattgactcgataaagaagttgtctggtgctattcagatacctaccgaaattagtgacgtcaatccacagccagacagcgatctagagtattattcagagtttttcaaactccacaaatactttgaagagacttttcctcttgttcattctcatttgaaggtagaaaaagtcaacaaattagggttgctgtatacatgggagggttccgatccaagtttgaaaccaatactatttatggcacaccaagacgtcgtcccagttaacagagaattatgggattcttgggattatccgccattttcgggtcactatgattcagaaactgattatatttggggtcgtgattccattgattgtaagaatttattgctcgctgaattagaaggtatagaacaactgctgcttgatggttaccaaccaaaaagatctgttatcctgtccgtgggctttgatgaagaatcaagtgggtttttcggcgctaaagctctggcatcgcttttgttggaaaggtatggtccaaacagtatgttttccattatggatgagggtgctgggctcttgaaattcagagataatctgtatgttgccgcagctgtaaatgctgagaagggctatgtcgatgttaacattgctgttcacggccatggtggtcattcatccgttcaacctgatcatactaccattggtgtcgcatcagaattgatttttatgatggaaaacgatccatttaattacgatttctcgcttgataaccccatatatgatgtgctacaatgtgttgccgaacattccacctttctgccaccccacatcaaagacgcaattctaaaagccccggtagatgaggatgaaagaaaacttttaacagagtttgctagttctcgtcgtgacctacgtgatatgatcagaacaactagagccgtggatataattaacggtggtgttaaggctaacgcattgccagggttgactagttttgttattaatcatagagtggatattcattcatcagtgaacgaaactgttgagaatgatttgtattgggctaaagttattgctaaaaaacatggctacggtttggcttaccatgatgaagttatcattccggaaacaaaactaggtcatatttctttgaattatgagaagatgctagagcctgctccagtgtcaccaacttcgggacatgtttgggatatttttgcaggtactgtcgaaaacttgtttcaaaatgaaattctggctgataataaagatgccgaggtttacgtcacaggtggtttgttctctggaaacaccgatacaaagtattactgggatttaagcagaaacatatatcggtttgttgctagtgtgtttccattacaacaactgagaaccattcactccgttaacgagcatatttctgcgtcttctcacatgtcagcgattgcttttgtgtatgaatatattgttaatgtcaatgaatatggtcatgactga

SEQ ID NO: 78442 - DNA, 1746 bp, Saccharomyces pastorianus
atgacagagactcatcacgctccgcttccggatgtgtatccttcttctaagcagccaacctcctctacctattctaagtgtaaaaaatttggtctgcaattaattggtttattgacgttgctcttagcttatatcagcagctttaccaaacccgtcccaaattccacttttgacgttcctgcctctccacaatgtaaaaagcctcaagtatatcgtccatcgtttaacaagtctgtgaatttgattctgaacgataagcaattcaaaatagactcaataagaaagttgtctggtgccattcaaattcctacagaaattagtgacacaaacccgcttccaaacgatgacccagagtactattcagaattcttcaaacttcacaaatatttcgaagagacttttcctcttgttcactctcatctaaaggtggaaaaagtcaaccaattgggtctattatatacatgggaaggtacagatccgagtttgaaaccaatattatttatggcacatcaagatgtggtgccagttaacagggaaatatgggattcttggcagtatccaccattctcgggtcactatgatcaagaaacggactatgtttggggtcgcggctccaatgattgtaagaacttaatgctggctgagttagagggtatagaacaactgcttgccgatggttatcagactgaaaggaccgttatattatctctgggctttgatgaggagtcaagcggttttatgggcgctaaagtcttggcaccatttctgttggaaaggtatggcccggatagcatgttttccattattgatgaaggtgctggactcctaagactggataaaaacctttacattgcagctgctgtaaatgctgagaagggttacgttgacgtaaggattagtatccatggtcatggtggtcattcatccgtacaacctgaccatactaccattggtgttgcatcagaattgatatatatgatggaaaatcacccattcgattataatttctcacttgataaccccatttatgatgtattacaatgtgctgccgagcattcaggttttctgccaccacatgtcagggaggcaatcttaaaagcacctgtggatgaagggaaaaggaaggttttgacggaatttgctgtatcgcaccctgacattcgtgacctaataagaacaactagagcagtcgatgtcattaatggcggtgtcaaggctaatgcattgccaggattgaccagctttattgttaaccatagagtggatattcattcatctgtgaacgaaactgtggaaaatgatttgtattgggccagagttattgctgaaaagcacgggtatggtttgacattccatgacgaggttatcatcccggaaacaaaacttggccacatttctttagcaagtgaagaaatgttagaaccagcaccagtatcgccaacttcaggacatgtctgggaaatttttgcaggtactgttcaaaacttgtttcaaaacgaaattttggccgagcagaaagatgcagatgtctacgttacgggtggcttgttttctggtaataccgataccaagtattactggggattaagcaaaaacatctatagatttgttgcaggtatctttccatttgaccaactaaggacaatacattctgttaatgaacatatttcagcatcttcacacgtttcagcagtagcatttgtctatgaatatattgtgaatgtcaacgagtatggccatgattaa

SEQ ID NO: 78443 - DNA, 1029 bp, Saccharomyces pastorianus
atgtctgtttttatatcaggtgccaacgggttcattgctcaacacattgtcgatctcttattaaaggaggactataaggttattggttctgctagaagccaagagaaggctgatgacttgatgaaggccttcggtaataatccgaacttttctatggaaatcgttccagacatttcaaaattggacgcgtttgacagtgttttccagaagtatggtaaggacattaaaatagtcttacatacagcatctcccttttgtttcgacataaccgacaatgaacgggatttgttaattcctgcgctgaacggtgttaagggaatcctaaactctatcaagaaatatgctgccgactcggtggatcgtgttgtcctgacgtcttcctttgcagctatgttcgatatatccaaagaaagcgataagtctgcaacattcaatgaagagtcttggaatcctgcaacttgggagaattgccaagttgatgccgtcaatgcttactgtggttctaagaagtttgctgaagaagctgcttggaaatttttggaggaaaatagaaatgttgtaaagttccaattaactgctattaatccagtttatgtctttggtccgcaaatgtttgataaagatgtgaagaggcatttgaacacatcctgtgagttcgtcaacaacttgattcacttatcaccagaggacaaaatacccgagttttatggtggctatattgatgttcgtgatgtggcaaaggctcacttagtggcttttcaaaagaatgaaactattggtcaaaggctgatcatatcagaaggtcgctgtacaatgcaagatattctcgatgttctgaacgatgacttccccgttttaaagggtaagattcccgtcggtaaaccaaagactggcgctacttataacactcttggtgccactctcgacaataccaaaacaaagaaactactgggatttaagttcagaaatttgaaggaaactatagacgataccgcttcacaaattcttaaatctgaaggcaaactataa

SEQ ID NO: 78444 - DNA, 696 bp, Saccharomyces pastorianus
atgaccggagcagcagcaacagcagcagagaactctgctacacaattggagttctaccgaaaagctctaaatttcaacgtcattgggagatacgatcccaaaataaagcagctgcttttccacacaccacatgcctcattgtataaatgggactttaagaaggatgaatggaataagctagagtatcaaggtgttctagcaatatatttaagggatatttcacaaaacacggatcttctaccagtttcgccccaagaaatggacatttttgattcacaaagtagcagtaataacattccaacaagcaatggtaataatggcaatagcagtaacagtgggaacgggaatggaagtaaaaataacgattcattatcctataactgcggtaagaccttaagcgggaaagacatatacaactatggactgatcatattaaacagaattaaccctgataatttctccatgggtattgtccccaatagcgttgtcaacaagaggaaagtgtttgatgctcaagaagatgcacaaaacccaatagaatgtatgggagtagaagtaaaagatgaattagtcatcattaaaaatttgaagcatgaggtctatggtatatggattcatacagttaatgatagacaaaacatttatgaactaattaaatatcttttagaaaacgaaccaaaggattcgtttgcttga

SEQ ID NO: 78445 - DNA, 696 bp, Saccharomyces pastorianus
atgaccggagcagcaactgcagcagaaaactctgccacacagttagaattctatagaaaagctttgaatttcaacgttattgggagatacgatccaaaaataaagcaactgctttttcacacaccacatgcgtcactgtataaatgggacttcaagaaggacgaatggaataaactagaatatcaaggtgttttggccatatatttgagagacgtctcgcaaaatacaaatcttctacccgtctccccacaagaagtagatatttttgattcgcaaaatggtagtaataacattcaagtaaacaatggttctgacaatagcaacaggaatagcagtggaaatgggaactcttataaaagtaatgattcgctaacatataattgcggcaaaactttaagtggaaaggacatatacaattatggattgatcatattaaaccgaattaatcctgacaatttttctatgggcattgttcccaatagtgtcgtaaataaaagaaaagtatttaatgcagaagaggatacacttaacccactagagtgcatgggggtagaagtgaaagatgaattggtcattattaagaacttgaagcatgaggtctatggtatatggattcatacagttagtgatagacaaaatatctacgaactaataaaatatcttctggaaaatgagccaaaagattcttttgcttga

SEQ ID NO: 78446 - DNA, 1830 bp, Saccharomyces pastorianus
atgagtgccgctagtccgccaggaaacgatcctcatgctttcggcattcctgtgaatgccactccatccagcatgggttcaccaggaagtccagtcaatgtgccacaaccagtgaatcctgcggctgccgccgtaaaccatcctgttatgaaagccaacatcaacaataatgtcaatgaaggtgtgagaactttgaccagggaacaaatacagcaattgcagcagaaacagaggttgttattacaacaaaagctactacagcaacaaaaacaacagcaggcgttacaaaactacgaggctcaattttatcaaatgctaatgactttaaacaagaggcccaaaagactttataacttcgtggaggatgcagactcgatcttgaaaaaatatgaacaatatagacccagttttgaatttcacatctacgagaataactataaaatttgtgctcccgcaaacaacaggctacaacaacaacaaaagcaacccgagctgacaagcgatggcctaatattgaccaagaacaacgaaactttgaaagaatttttagagtacgttgctagaggtagaatcccagatgccattatggaagtcttgagggattgtaatattcagttttatgagggaaaccttattttgcaagtttatgaccatacaaatacggtggacgtaacccctaaagaaaatcagccgaacactaatccaccttcttcttcaccctccaatgttggtaacacaaaagacaattgcaaaattcaacaaccatccgaaccaaatagtggtgcaacaagcacgaatacaagcgcaagcgcaaatgcggccaagaaaaactcatctttcaaacgacctagagtatatcgaacacttttgaagcctaatgatttaactacctattacgatatgatgtcttatgctgatcacgccagattttcagatagtatttatcaacagtttgagtctgagatattgacattgactaaaagaaacttgtcactaaacgtgccactaaatccttatgaacaccgagatatgctagaagaaaaggccttcacggaaccacattgggacgactcgaaaaataatttcgttcataatcaccgtgctgagtctactagagaaggcacaaagggtgttgtggggcacattgaagagcatgaagaatttccacagcacagttcgaactatgaacagttaatgctcataatgaacgaacgcacaacaacaataacaaactcaacgtttgcagtgtcactaaccaaaaatgcaatggaaattgcgacctccaattctaacggaatgcgtggaatttcgtcatctatttcgaattctgcatcaaatacaaggaataatagtctcgctaatggcaaccaagtagctttggcggcagcggcagcagctgccgcagtaggatcctctatgggtaacgacaacaatcaatttagtagactaaaattcattgaacaatggagaataaacaaagaaaaaagaaagcagcaagcattaagcgcggatattaatccaactcctttcaatgcaaggatatcaatgacagcaccactaactccccaacaacagcttttacaaagacaacagcaagctttggaacagcagcagaatggtggagccataaaaagctcgaataaaagaagcaacaccaatgcaagtagtaataatagtaataatgggaataattcagataaaccgaaggccaaacgacccagaaagaacgcaaaaaagagtgatagtggcacaccagctcctaaaaagaaacgggtgactaagaagaaacaaagcgcaagtagcacacccttctccaccacaatttcatag

SEQ ID NO: 78447 - DNA, 711 bp, Saccharomyces pastorianus
atggtctgtgatacactggtatatcatccctccgtgacgagattcgtcaaatttctagatggctcagctggcagagaaaaggttctcagattactgcagtatttagcaagatttttagcagtacagaactcatctcttttggccaggcaattacaagctcaatttaccacagtcagaaaatttctgaggtttctgaagcctttaaaccacttgcaggcagctgctaaattctacgataacaagttggccagcgacaacgtcgttagagtctgcaatgttttgaaaaacatcttctttgccgcatatttgtcgttagatcaagtcaatcttttgagaattttgaaagtgattcctgtaaccgttcttaccggtaagaaaatacctcgctggtccaattggtgttggctgttcggcctcctaagtggtctggctatggatcttcgtaagatccaaacatctcatgcccagattgctgcgtttgtcaaggcaaaatcacaaagccaaggcgatgagcatgaggatcacaagaaggtattagggaaggcataccaagacaggtacaccgcgttaagaagacttttctgggatgctgcagattcgttcatcgtcctcaacaacctagggtacttgtctagcaacgaagagtatgttgcgctatccggtgttgtcacatctatccttggtatgcaagacatgtggaaagctacatag

SEQ ID NO: 78448 - DNA, 711 bp, Saccharomyces pastorianus
atgatatacccatcgcttcgggttctccgagataaatgccgacgcgtagtgaaaatcgcaatggaattgatgccaactttgttcttggtattatatttttacaatagaagggcaagcatagaaaggatgggttactatgacattgatgatgtcctagcagatgggacagagtttccttgtaaatttcaatatgatattcctggtcttggttatttggaaaacaacccaggacgacccataacgaaaaacactaaactaaacctgccactatggttagcaagaatccttgcaattgtgggtggtgacgaagccttggtagatgaagaacctgtaccttttgtggaactcctgccaccagatatgttttctaccaaagttatgaacgctataaagaccgatccggtggctctggacttgcattccataaattcgcatttcttcagtctagccataaaatggataatgttgtttagcgaaaaagaactggccaatgtcgttagtgagctacttttgcaacgtgctcaagaacttaatcatcatgctagtagtttatcgattgatctcaatgcagactcgaccggaaaaaattcagcgaacactaatatagcaactagcacatttttactgaaactagaggaaatggagaaggagatatataaaaagtcgcatgaatcttataaggacacgaaaaggtggatgtttaaaaaataa

SEQ ID NO: 78449 - DNA, 3255 bp, Saccharomyces pastorianus
atgacaaacgcaatgaaggtggaaggctacccttctatggaatggccaacgtccttagatattccattaaaggcttcagaagaattggtcggtatcgatttagaaaccgacttgccggatgatccaacagatttaaagactcttttagttgaggaaaattctgaaaaagaacattggttgaccattgcacttgcttattgcaaccacggaaaaacaaacgaaggtattaagctaattgaaatggccttagatgttttccaaaactctgaaagggcttcactacacacttttctgacctgggcacatttaaatctagcaaaggggcaatcgctgagtgtggaaacgaaagagcatgaactgacacaggctgaattaaacctaaaggatgctattgggttcgaccccacatggattgggaatatgctagccacggtcgagttatactaccagcgcggccattatgacaaggctttggaaacatctgacctttttgtaaagagtattcatgctgaagaccacaggtctggtaggcaatccaaacccaattgcttgtttttacttttaagagcgaaattgctttatcagaagaaaaattatatggccagtctgaaaatttttcaagaattgctggtcatcaaccctgttttgcaaccagatcctcgtattggaattggtctgtgtttttggcaattaaaggattctaagatggctatcaaatcgtggcagagagctttacaactaaatccaaaaaacacgagtgcctccatcttagtattattgggtgaatttcgcgaatctttcaccaattctacaaacgataaaacattcaaggaggcttttacaaaggcattgagtgacttgaacaacattttctccgaaaaccagcataatcctgttttattgacgttattacaaacgtactactacttcaaaggtgattatcaaactgttttggatatttatcaccataggattttaaaaatgagtccgatgatagccaaaattgttctatctgaatcttcattttggtgtggtagagcgcattatgcattaggtgattatcgtaaatcgttcatcatgtttcaagaaagcttaaagaaaaatgaagataacctgctcgcgaaattagggctgggtcaaacccaaattaaaaataacttgttggaggaaagtatcatcacttttgagaatctttacaagacgaatgaaagtttacaagagttaaattatattttgggtttgctttatgcggggaaaactttggacgtcaagacgtccaaaagcattcctgccaaagaactaaataagctcaatgaaaaggccttacaatatctagaaagatacatcaaactgactgtggcaaagaaaaatcaattaatcatctccagagtttaccttgttatctctcaactttatgagtctcaaaatcagtacaagatctctttggattttctttccaaagctctggaagaaatggaatttgttaacaaggacgaagtcccgttggagattctcaacaatctagcttgttatcattttatcaatggcgatttaaccaaggccgacaacctctttgaacaagccaaggcgaaagttagtgacatgaataaaagtgtcaatattacacttgaatataacattgctagaactagtgaaaaaaccaattgggagaaatctgagtctatatattcccaaattacatcttcacatccttcttatatttcagcaagaataagaaatctgtacatcaagtttgcccactctaagataaacgactcagaaatgaatatagaaatagatggcctattagaaatgaacaaatctgacttagaaatgcgttcattttatggctggtatttgaagaatagcgaagaaaggaaaaacagtgaaaagagtacatctcataacaaggagacgctagtcaaatataattcccatgatgcttatgcattaatttccttggctaatctatacgtaactattgctagagatggtaagaagtctagaaatccaaaagaacaagaaaaatcaaaacactcttatttgaaagccattcaattataccaaaaggttttacaaatcgacccgttcaatgtttttgctgctcaaggtgttgcaatcatttttgctgagagtaaaagattgggacccgctttggaaattctacggaaaattagagactctttagacaatgaagatgttcaactaaacctcgctcattgtttattagagatgcgcgaatttggtaaagccattgaaaattacgaattggttttaaaaaagtttgacaatgaaaggaccagaccacatattttaaacttattgggtagagcttggtactcacgtggtatgaaagaaagatccgtgagcttcttccaaaaagctttagagaatgcaaaaaccgctttagagctttttgttcagcaatccgccaagaataaatttattcacagcgttaagtttaatatagctttattgcagttccaaattgcggaaacgctaagaagatcaaatcctaaattcagaactgttcaacagataaaggattccttggaaggattggaagaaggcttagcgttattcaaagaattgaacgatttgaaagaattcaacatgatccctaaggaagagttagaacaacgtattcagttaggtgaaaccaccatgaaaagtgcgttagaacgttctttgaatgaacaagaagaattcgaaaaagaccaaaatgcgaaaattgatgaagcacgtaagactctagaagaaaaagaaataaaggaacaggaaaggataaaacaagaggaagaagccaaacgtttaatactagaaagacaaactaaagaatataagagacttcaggatgaggcacaaaaactaatccaagagcgtgaagcaatggccgtaagcgaacatgatgtcaaggatgaccgtgattcagatctctccgacaaagataatgagtataaagaaggaaaaccaaaacagaaaaaaaagagatcaagcaagacgaaaaacgagggcgagcccaagagaaggaaagctactaaaaaggttgtttctgatagcgacgaagatgaagacgatataataaagaaatcttcgcatgtgaaaggtaagaaatctcaattatcaagtgaatttattgaagatagtgatgaggaggaagcacagatgagtgggtccgaaaacaacaaaaaaggcgacaacaacaacgacgacaacaacaacaataatgatgacgataacgacgagttgttctaa

SEQ ID NO: 78450 - DNA, 1452 bp, Saccharomyces pastorianus
atggatagtgtaattcaaaaaagaatttttgtcggaaatattttccataatgcagatgattgttattcagaactacaagatcgatttggaaaatttggtgattgccaagattttcagtttgaaaaacacaaccactttgcatttatcgatataaggtttaatgatgaggcagattttaacaagctcagaaagagctttaataatgttaagtttaaagggaacattttgaaggttgatgaagcaaagccgaattgggaaaccacctgggcggtacaacatgcaaaggaccttaaagaagatattatactaaatgctaaaatgaaaaaaaagaattggcaacattataagaaaatggaaaatgtagcgaaaagttggaaagatcataaggaagttattgctggcagaatgagggaggcgccgagaaaaaggagtcaattgaggaacattacattcaggatcaatgtcaatggttcattgaaagtttacaaatgctataagactaaattatggggttatgaaaggaacaaagaattgaatgaccttgtgtacaagtttacaaataatttctggaaaaacggatacaaccacattgtcgatagattggattacagtcgtgctgttaaaactgttcgattcaaaaatgggctgaaacagttaacagtgtcaaaagatgaaaacgtttgcagtggagagatggacagcgatgagaatatgtcagaagaggagaaggagaaaaataatgttattcttaatgacctattaaaggactttgacttcgataagccaatgacgttgaatgattcggacgaggaacttctgacagagcaacgtaaaggaggggaagaagaagaagaagaagaagaaaaagaagtaaacgctcccgaatacgagaatgttaataagacgaaggaccagagcaccctaccacaagaaaaaccagaggaaaggaaagaacaggacgagggcgacgggcaggaggataatgaatttattccgactttcaccaaggaaattggtcaaggtacaataagcaacactgagacgttaagaaacctattcaaccccaacgaggcagaacctgtatcacaattcaaattgattgaagattctgataatgatattgatcatgcgaaagatgttgatgtgaaccaactggaggaagaagtaagtaaatctgacaccctaggtttgacatcggctcccgtaccacatgtatctagagataaagataacaaaaatttcttgtttttccctcatttgcaatcgccatttttagtaggacaaacacagttgagtaaagtaagggctcctggaagagaaacaatgctatcgaactgggatgaggagttctgggctaacagaggtaattggacccgtgatatgaggcgcaaaatgaaagatgcactgaagcaccgtaagagaaaacaatcaaagagcgggcttcttctatag

SEQ ID NO: 78451 - DNA, 510 bp, Saccharomyces pastorianus
atggcagttaaaggattaggcaaaccagatcaagtttatgacggttccaaaatcagggtcggtatcattcatgcccgttggaaccgtgtcattattgacgctcttgtaaaaggtgctattgaaagaatggcttcccttggtgtcgaggaaaagaacataataattgaaactgttcctggatcctatgaattaccttgggggacaaaaaggtttgttgacagacaagcgaagttgggaaagccgctagatgttgtaattcctattggtgtacttatcaaaggtagtacaatgcactttgaatacatttcagattccaccactcacgcattgatgagcttacaagaaaaggtcgacatgcccgtcatttttggcctcttaacttgcatgactgaagaacaagccctggccagagctggcatcgatgaagcgcactccatgcacaaccatggtgaagattggggtgctgcagcagtggaaatggctgttaagttcggtaaaaatgctttttga

SEQ ID NO: 78452 - DNA, 723 bp, Saccharomyces pastorianus
atgtctacgttcatattccctggtgatagctttcctgtagaccctactacacctgttaaactgggccctggcatatattgtgaccccaatactcaagaaatacgacctgttaatacaggtgttttgcatgtttccgctaagggtaagagtggtgttcagaccgcatatatagactattctagtaagagatacattccatctgtaaacgattttgtaatcggtgtcattatagggacattttcagatagctataaggtttcgttgcaaaatttctcctccagtgtttcactatcgtatatggcttttcccaatgcttcaaagaaaaacaggccaactttgcaagtgggagatctagtgtatgcgagagtttgtaccgcagaaaaggaactagaagccgaaatagaatgttttgactcaactacaggacgcgatgctggtttcgggatattggaagatggtatgatcattgacgtgaatttgaatttcgcacgccagttgcttttcaataatgacttcccgttattaaaagtgttggctgcacataccaagtttgaagtcgccgttggtctcaatgggaagatctgggttaagtgcgaggaattatctaacactttagcttgttatagaaccataatggagtgttgtcaaaaaaacgacacggcagcgttcaaggatatagcaaaaagacagtttaaagaaatacttacggtcaaggaggagtag

SEQ ID NO: 78453 - DNA, 1272 bp, Saccharomyces pastorianus
atgtttaaaagatatttatccagtacgtcatcaagaagatttacaagcattttagaggaaaaggcctttcaagtgaccacttactctagacctgaagatctatgtataactagaggtaaaaatgcaaagctgtatgatgatgtgaatggtaaagaatatatcgatttcaccgcaggtattgcggtgaccgcattaggccatgcaaatcctaaagtggcagaaattctgcaccatcaggcaaacaaactgattcattcctccaacctttacttcactaaggaatgtttggatttaagtgaaaagattgttgaaaagaccaagcaattcggtggtcaacacgacgcctcaagagtatttttatgtaattctggtacggaagcaaatgaagctgctttgaagtttgcaaagaaacatggtataatgaaaaatcctagcaagcaaggcattgttgcatttgagaactcttttcatggccgtactatgggcgctttatctgtcacttggaatagtaaatatagaactccttttggggatttggttccccatgtctcattcttaaatttgaatgacgaaatgaccaaactacaaagttatatcgagaccaaaaaggacgagattgctggtttaattgtcgagcccatacaaggtgaaggtggggtttttcccgtagaagttgaaaagctaaccggattgaagaaaatatgtcaaaataatgatgtgattgtcattcatgatgaaattcaatgcggtttgggccgttcaggtaaactatgggctcatgcttacttaccaagtgaggctcatccggatatttttacatctgccaaagcattgggaaatggcttccccatcgctgccaccatcgtcaatgaaaaagttaataatgctttgagagttggtgaccatggcaccacgtatggtggtaatccgctggcctgttctgtaagcaactatgttttggataccatagcagacgaaacttttttgaaacaagtctctaagaagagtgatatcttacaaaagcgcttgcgcgaaattcaagccaaatatccaaatcaaataaagactatcagaggaaaaggtttgatacttggtgctgagttcgtcgaaccacccaccgaggtcatcaaaaaggccagagaattgggacttttgatcattaccgctggtaagagtaccgttagatttgttcccgcattgacgattgaagacgaactaatcgaagaagggatggatgcttttgaaaaggctattgaagcggtttacgcttag

SEQ ID NO: 78454 - DNA, 642 bp, Saccharomyces pastorianus
atgtccgttgaagaagttagcaagaagtttgaagaaaacgtttcagtcgatgataccacagctactccaaagactgttttaagtgacagtgctcacttcgatgtcaagcacccattgaacaccaaatggactttatggtacacaaagccagccgtcgataaatctgagtcgtggtctgatctattacgtcccgtcacttcattccaaactgttgaagaattttgggctatcattcaaaatattcctgagccacacgaactaccattgaaatcagattaccacgtcttccgtaatgacgttagacctgaatgggaagatgaagccaatgctaaaggtggtaaatggtctttccaacttagaggaaaaggtgctgatattgatgaattatggctaagaactttactagcagttattggtgaaacaattgatgaagacgactcccaaattaacggtgtcgttttaagcattagaaaaggtggtaacaagtttgccttatggactaaatctgaagacaaagaaccactattgagaattggtggtaaattcaagcaagttttaaaattaaccgatgacgggcatttggaattctttccacattccagtgccaatggtagacaccctcaaccatcaatcaccttgtaa

SEQ ID NO: 78455 - DNA, 4014 bp, Saccharomyces pastorianus
atgagcttatcaccacacgtagaaaatgcttccattcccaaggggagtaccccgataccaaaaaacagaaacgttagttctataggcaagggcgagtttcttggatcttcgtcaagcaacaattcttcttttcgaatgaatcattactcaaatagtggacaaccttccgtgttagattctatacggcgacctaatctaactccaactttttcttacagtaatggggtttatatgcctgaaagtcacagaactagttcattcaacgatagttatttgccatatgataagaatccttacgcaaaaacaaccggaagcatgagcaataaatcgaacatgaaaatcaaaacaaagaaaaatgcaatcaacacaaatacaagaaagtcgtctggactcatttacaccaccaaagtggataaagaattatctagtatagacaaagtgaatgatccaaacattaacggtcttgtttgtgcaggtaaaactcatttggggctctataaattctcgccctcagatagatctatcaaatgcgttcatgatttcataacacctaatagcaacacctcaacaaggggaacgacatcccttttgcccaagctgagcaaaagaacaagacagaacaaatttagtaccattgcggatgttaagactggatttaataattacaagaactgtattgcagtgtgcaacaattctacggcgatatcgatatatgatctcaataaaagttcctcgatagacaatcccttgataacatccttatgcgaacacactagatctatcaatagttttgacttcaacatggtcgaatcaaacctaataataagtggtggacaagatagttgtgtaaaaatatgggatttacgttccaataaatctaaaagctcaaatagatctgacattagtataaataccgcatctgactcaatcagagatgtaaaatggatgcccggttacaattttgcatctaagaacgatcaaggttcatcaacgtatggtaatttaaaaagcggttacaaatttgcttctattcacgattcgggatacttgctaaagtttgatcttcgacaacctgcccaatacgaaaaaaaattaaatgctcacacaggacccggtctttgtttaaattggcatcccaatcaagaatacattgctacaggtggtagagacggtaaatgctgcctctggtttgttggcgacaatgccaatgccgccgaaaatacagtcctcaattacgggaactctccctcgttacatgcccccaatacgtccttgaacaatagcggctcgctggcatttcccaaactaacaattaatacgggctatccagtcactaaattgaagttcaagcctgcttatagtagtaatatatataattcattactaggaatatcgtcaatgggtgacgaagctgaagttcgcacctattccttggcaagaaagtacattccaaaacatgttctcctatcagaaacgccttctttaggattagtatggtgggacgaaaacttgatctttaatatcgataaggggacccgtataaatggctgggacattaacaaagaaccaacagtgctcgaaaatttgagcaaaaatacaacaacttggagagatttggatggtaacggtttactttcagttgatcaagagataggctcatatgaggtggtagaaccggagcttcaacctacctcaagtaccacatgcaagaagcatccaggtacaataaaaaacccgaagaatggcaatccagagaaccagggaataattggagggataaaaaaaggatttagccatactggattaacaagttttacgccagagagaccgcctactttaaaagcaggcccaacgtttagcacaaaaagcttaacattagcatctggagcatcttcttttaacagctcttccgcatcattgacatccctgacgccacaaactgaaaatagagaagaaatcgccattgaaccgccttgtatcatcactttggatataccgcagatcttcaataacataagattaaccaaaatcgcacattcaagaaaaaagaacgtcatttccgaaagttcttctatgaaaaattctccagtagaaaagttcaaatatttggcgagacagctcaagttttcgtatattcgagagcataatgtttcagacagtgcagacactgcatataaaaatgatatagagaacattgacgtcgttaaaaacgcaaccgaaacacatggtgataatactactactaccaataataatgatgatgatgatgatgatgatgatgacaaaataatcgaaagtcaccttttgaaaaaatacaattttccagaaaataatacatgggctaccttaatgaatgaaaaagtaaataacaaaaaatccaaaagaaattccagtagttcgagggagtttgacgagaaggatgtcagatcaagtatatcttccatttctgcaagtaggcaaagtcatgacagatctaggaagatcgacaagaacgtggaagcagaactgcaagaaaaaatacaaacactggtagatttgatatctattgcaacgcataacgcatctgtttatctatccatagatgatctaaccaatttcaaaatctggatcttgataagagattcattgttatgggacttgaagtggatgacctcctcccaaatttcatcagataacgcatctaatatggatgccaatgaaagctccgatttcgaagctggagaaaatctgaaaacaggaaaagagttcccagaggaggatggtgcagggacaagtggggctgagtcgttagttgaagaaaggccgcaggcatttcgtgctaactctgatgaaccaagtgatgccgaaaagaaacctgtttctaagctcaaagagcagctcaaaaacacggaaataatcccctatgcacagccaaatgaggattcagatgaagttttaactaagctaaaagagctacagaaccaacgcttggagtcaaggactaaaatgggagaaacagtgagtgacgatgtgattatagaggaagacgaacatgaacatcaagaagaagaacagcctcatgactcaccgactaagtcagcacaatttcacgcgtctcctatcgcgaaaagtataccaatattgcagaaacgtgagcaccgcaagtcattcatagatactttcatgttgcattctcccaacggttacaatggagatacggacataggtaacgaagatgacaatatatctcccaggtttacttacaacagcgtaagcccacgcagtaaggtttcgtcgttacaaagctatgccacaacaacttcgcaactagaaacttttaaaaagctttcttcccatacagcaccaataatcggatcgcccagacatgcgccatcacggccagatagcattggtagggaacaactgtcttcttcattgacgaaaaagcttgccaaatgtaagaaaattatcgctgacccaccctgggacacgaaaaaactcatcaaacaactctacaatcaagctactgagactgggaacgtcgtattgacggtgaatattttatttcttttccaaacgatataccaaataacggaaatcgacattgcaaaagacgcaatcgctcacttcttgttattattacatcgatacgaactcttcggcatcgctgcagacgtcttaaaatactgcccattcgaagatatcatgggttctgagggtgaccaatcttccattcggttgttttgcgaacgctgtggtgagttaatcactaacgaaagttctaaagaaaagctcagagcggaagctcagcagacgggcaataagaagatcatggacaagtttggatactggtattgtgactcttgtaagaagaagaatacatcttgtgttctatgtgaaagaccattaaagaaactgaccatggtcatcctcccctgtggacacgaaggtcacttccagtgcatacaagaatggtttctcgatgagaatgaacaagaatgtcccggcggttgccccggtgttgcattcatctag

SEQ ID NO: 78456 - DNA, 1494 bp, Saccharomyces pastorianus
atggatgcttcctcggttccaccaaaggtagatgattatggaatgtatacaactgaaatttcacatcataacccaatagagttgaaaaatctgctgtcatcatcagactccagaagaaattctcaagatgaagatagtctacctaacaatacaaacttaatcaaagaaattgactggcaaggcgagaaagttaaaacgtatccactaaactatcaaactgtaccactagtaaagctgcaggtgatagcatgcttgattatgttcgtagtctttggtatgaacgatcaaacagtaggtgcactacttcctacgctaattgaatactatcatatatcgcgggtagatgtctcaaacgtatttatagtccaattatgtggttatgtgatggcgtctttatcaaatgagagattgaataagcactttggtatgagaggtggtatgcttctagcagctggtttgtgtatagtatttcttatcattttagcaactgcaccttctagtttctatgtttgtatgttttgtggccttcctcttggtttagggatcggcatcttagattctaccggtaatgttttaatgggcagtcttttagtccataagaatgaactcatgggtatcatgcatggtctttacggggcagcagctatggttactcctcccttagtttcatattttgttgaatggggtcattggtctctttttttccttattcctctgttcttttctataataggcatgattgtaatcttcccggcttttaaatttgaaactgcaagtaaatacgactacctctgctctgtagaaaacaaagaaagcaacaatgatgtggaagaagcgggtgataactcgctgatggaatctaccaaggcgagcccaggattttttgaacttttaagaaatcctgctattttcttgtactcattgtatttgtttctttacttaggtgctgaaattacaactggttcatggttctttagttatttattggaaaccaaatcaagtaataaggttgctatgtcatacatagcggcatcgttttggacaggtttgactgtaggcaggttgtgtctaggatttgttactgaaagattcttcgaaaacgagtataaagcaagcaaagcgtacgcttttttaactctatcttcatacaccttatttgtgcttgttgggttgatcaattcaagctcagttttgtatttcgtcgtgttattttttgttgttttttgttgtggtacgtttatcggaccattattcccaaacgcaagtatagttgcattacaagtattacccaaaagactacatgtgagcggggttggggttgccgtcgccgttggtggttgtggtggtgcagccattccatatttggctggagttattgcacacacagtgggaatccagtatatcccactattgtgttggattatggttgcgttatttacattggaatggacattgtatcctaaattcattaaagggcatgaagaatatttttag

SEQ ID NO: 78457 - DNA, 1194 bp, Saccharomyces pastorianus
atgggtggttcttccgattcagactctcacgatggatatttgacttcccaatataattcctcgaattctcttttttcacttcacaccggtaacagctattcaagcgcatctctcgacagagccactttagattgtcaagattctgtttttttcgataatcacaaaagttcactgctgtctacagaggtcccaaggtttatttctaacgacccgttacacttacccattacactgaattacaaaagagacaatgcagaccctacgtatacaaatggaaaagttaacaagtttatgattgttttgattgggctaccagctactgggaagtctaccatttcttctcatttaattcaatgtttgaagaacaatccgctaactaattcattacgctgtaaagtttttaatgctggtaagataagaaggcaaatcagttgcgctaccatttcaaagcctttgcttttgtcgaatacatcttcggaagacttatttaatccgaaaaataacgataaaaaggaaacgtatgccaggatcactttgcaaaagttgtttcacgaaatcaacaacgatgaatgtgacgtgggaatcttcgacgccacaaattcgaccatcgaaagaagaagatttatatttgaggaggtttgttcgttcaatacagatgagctttctagtttcaatttggtgcccataatcttacaggtgtcatgttttaacagaagctttatcaaatacaatatccacaataaatcgtttaatgaagactacttagacaaaccttatgaacttgccatcaaagattttgcaaagagattaaaacattactattcgcagtttacacctttctcccttgatgagttcaatcaaatccatcgatatatcagccaacatgaagaaatcgatacgagcttatttttcttcaatgttatcaatgcgggcgtcgttgagccacattctttaaatcaaagtcattacccttcgacctgtggcaagcaaattagggacaccattatggttattgaaaatttcatcaatcactattctcagatgtttggttttgaatacatcgaagctgttaaattgttttttgaaagttttggaaatagctcagaggaaactttaactacactagactctgttgttaatgataaattttttgatgatttgcagagcctaattgaaagcaacggatttgcttga

SEQ ID NO: 78458 - DNA, 669 bp, Saccharomyces pastorianus
atgtccaatgatcctggtaatgaggttagctccttgtacccacctccacccccatacgtgaagtttttcacacagtccaatctggaaaaattaccaaaatacaaggaaaagaaggccgcaagtacgaagcagacggctccaaataacagtgacggcggcagtgaagaggagattacatgtgcgctagattacctaatcccaccccccatgcccaaaaatcagcagtaccgagcgtttgggagtatatggcaggtgaaggaccaactgcccgatttagagagcatgggactcacccaactttataagaaatccacagaaaacgaaagcacaaattatcaatacaaaatccaagagctacgcaaactattgaaatccctcctgctaaattacttggaactcatcggcgtattgagcataaatccggatatgtatgagcgcaaagtggagaacataaggaccattcttgtcaatattcaccacctacttaatgagtacagaccccatcagtcccgagagtcccttattatgctattggaagaacaattagaatacaagcgcggcgaaattcgcgagatcgagcaagtatgcaaacaggtacacgacaaactcaccagcatacaggacaccttaagaaccggatcacaatctcctccatcgtcgtcccaatga

SEQ ID NO: 78459 - DNA, 366 bp, Saccharomyces pastorianus
atgagcaacgaagttgacaggatggatgttgatgaagatgaatcgcaaaatattgcgcaaagctcaaatcaaagtgcgccagtggaaaccaaaaagaagagatttgaaattaagaaatggaccgcagtggcgttttggtcatgggatatagctgttgacaactgtgctatttgcaggaaccatataatggaaccatgcattgaatgccagccaaaggccatgacggacactgataatgaatgtgtagcagcctggggtgtctgtaatcacgctttccatttgcactgtattaataaatggatcaagacaagagacgcatgcccattagataaccaaccttggcagttagcaagatgcggtaggtga

SEQ ID NO: 78460 - DNA, 1416 bp, Saccharomyces pastorianus
atgatggttttttcgagcacctttatttttctaattttggagttagttgtactgtgtgaagcttcagtccacaccattcaaattaaggacaagcatttcgttgacacagtgactggaaaaccattcttcatcaaaggtgtggattatcagccaggaggctcttccgacgttagtgaaaagcaggatccgttatccaatccagatgcatgcgctcgtgatattttattatttcaagaattgggaataaacacagtaagaatttattctataaacccggatctgaaccatgatgcgtgcatgactatgctcgcaatggcaggtatttatcttatattggatgtcaattccccattgcaaaaccagcacttaaacagatatgaaccttggactacctataatgaagtttatttagaacacgttttcaaagttgtcgaacaattttctcattacaataatactttaggattttttgctgggaatgaaattgtaaacgacaaaagatcagcacaatattctcctgcttatgtcaaggagttgattggaactatgaagaattacataagcgcacactcgcccagaacaattccggtaggttactctgctgcagatgacctgaactatagggtatcactgtccgaatatttggagtgtaaagatgatgataagccagagaatagcgttgatttttacggagttaactcctaccaatggtgtggccaacaaactatgcaaacttcagggtacgatacattggtggatgcttacaggagctattccaagccagtttttttttcagaatttggatgcaataaagtattgccaaggcaattccaggaaataggttatttgttttctgaggagatgtattcagtattctgtggaggtctggtttacgaattttcacaggaggataataattatgggttagttgaatatcaagaagatgattcagtacagctcttagcagattttgagaagcttaaatcgcactaccaaaacattgagtttccttctatgaagactttaaaggaaactgttcagatggaggagacgccatcatgtgcggaagattatgaaaatttgaagattgaatctaaaatcgctaaaaatttaggaagttctttgataaaaaaaggcgtgaaagttgaaaaaggcaaatacatagatattcacgaggatcagctgtccaccaatgtcacgattttagacaagcatggtgacagatggaatgggcccaaaaagattgaaattaggcaaagcctgacattggcagacctggaaggagaagaacaagaagacgcagatgaagacaaagatgatttaaaacgaaaacaccggaattctgcctctatttccggcccattgttacctcttgggttgtgtttgcttttttttacttttagtttatttttttag

SEQ ID NO: 78461 - DNA, 327 bp, Saccharomyces pastorianus
atgaatactgataagatagcacaagacgaagtccaagataaggttttgcaaagagcagaactagcacattctgtatggaacttaaggttcaacctcagtaaagttgccaaacggattcgcatggaaacaaaggtatttccagagataaagataaatgacgcgcaatcacagttagagcgatctaggtgtagaatatttagccctgacctggaggaagaacatgtgcccttgattcaaggctttaaatgtttggattcaccccctcccgttccaccaagctcatcgcagggggaggacgaagagaacacggtagattcgcaatactag

SEQ ID NO: 78462 - DNA, 2580 bp, Saccharomyces pastorianus
atgtcatcatcctcaagttcatcagagtcatcgcctaatttatcgcggtcaaactcactggctaacacgatggtttccatgaaaacagaagaccatacgggattgtacgaccataggcagcaccctgactcactgccggtccgtcaccaacctccaacattgaagaacaaggaaattgctaagtccactaaaccttctattcctaaggagcagaagagtgcaacgagatacaacagccatgtggatgtgggaagcgtacccagtaggggccgcatggattttgaagatgaagggcagggtatggatgaaacggttgctcatcatcaattgagggcatctgccattttaacttctaacgcgaggccttccagactagcccactccatgccacatcaaaggcagctttatgtggaaagtaatatacacacaccaccaaaggatgtaggtgtaaagagagactatactatgtcatcttctactgcatcatcaggtaacaaatccaagctgagcgcatcttcctcggcaagtcctattacgaaggttagaaaatcttcgctggtcagtcctgttcttgagatcccacacgaatcgaaatctgatacacactccaagctggctaaacccaggaagaggacatattctaccacatctgcgcattcatctatcaatcccgcagttttactgacgaaaagcacatcccaaaaatcggatgcagatgaagatacattggaaagaacaccagtacgtatgaatactagagcttcttttgatagtgacgtatcacaggcgtcgagagattctcaagagacggaagaagatgtttgtttccctatgccaccacaattgcataccagagttaacggtatagatttcgatgaactggaagagtacgctcagtttgcaaacgcggagaagagtcaatttttggcaagtctgcaagtgcccaacgaacagaagtacagtaacgtttctcaggatatcgggtttaccagctctacttccacttcgggatcatcagctgccctaaaatatacaccaagagtttcgcagactggtgaaaagagcgagagtaccaatgaaacagaaatccatgaaaagaaggaagacgagcatgagaaaatcaagcctagtttacaccctggtatatctttcggtaaaaataaagttgaaggggaagagaatgaaaacattccatccaatgacccggcgtattgctcttaccagggtacagactttcaaattcctaatagattttcttttttctgttccgaatctgatgaaaccgttcatgctagtgatatcccttccttagtgtctgagggacaaacattctatgaattattcaggggaggtgagccaacatggtggttagattgtagttgtccaactgatgatgaaatgcgttgcatagcaaaggcgtttggtatccatccattgactgcagaagatatcagaatgcaagaaacacgtgaaaaggtggaacttttcaaatcgtattacttcgtttgtttccatacctttgaaaatgataaagaatcagaagatttcctggagcctattaacgtttatattgttgtctgtaggtcaggtgttttaacatttcattttggcccaatatctcattgtgctaatgtcagaaggcgtgtaagacagttacgtgactatgtcaatgtcaattcagattggttatgttatgctttaatcgatgacattacagatagtttcgctcctgtaattcagtctattgaatatgaagcagatgcaatcgaagattctgtgttcatggctcgtgacatggattttgcagccatgttacaaagaattggtgaaagtaggcgtaagacaatgacgttgatgagacttcttagtggtaaggctgatgttatcaaaatgtttgccaaaagatgccaagatgaagctaatggtattagaccggcactaacatctcaaataaatattgctaacttacaggcaagacaagataacgccagccatatcaaaaataatagttcgacaactgtaccaaataattatgcgcccaccacatcacaaccgaggggggatatcgccctatacttgggtgatattcaagatcatttgttgacaatgtttcaaaatttgctggcgtacgaaaaaattttttctaggtcccatacaaactacttagctcaactgcaagtggaatcatttaattctaataataaagtgacagaaatgttgggtaaagtcaccatgataggtacaatgctagttccattaaatgttatcactggtcttttcggtatgaatgttaaagttccgggggagaattccagtatcgcgtggtggtttgggatattgggtgtgctgcttttgctggccgtccttggttggttcttggccagctattggattaaaagaatagaccctcctgcaacacttaacgaggccgctgaaagtggagccaaatcggttatttcgagcttcttgccaaaaagaaacaagagattcaatgatcgttccaaaaatataaatgtaagagccggtccttcaaacaaatcagttgcaagtcttcctagtagatatagccgctacgactga

SEQ ID NO: 78463 - DNA, 555 bp, Saccharomyces pastorianus
atggaggcagatgatcatgttagcttatttcgcttccccttcaagattcccacctttcgtggtataagaaaaggtggggtctatctttcaggtgctctctatgctctaggcttttggatatttctagacgcagtgctctattctagatattccaatgcatcagatgttcatgttacgttcattgactggattccttttctttgcagcacactgggaacattgattgtgaattctattgaaaagaatagattattgcagggagctttatcgtcagatggtggtgccttcggtagtggtgtaggcgatttagattcaagcatggcatggcaagctcgaaccgttttattttttggctttgctttattggctggtgggctatcaggctccattgtcgtgttgatcatcaaatttttagtcaaggattacaatacctatccaactttggggatgggagtaaacaatgtgttggggaatgtatgcatattattgagttgcgttgttttatggatagcccaaaatgttgaagatgaatattcatattctttgacgctctaa

SEQ ID NO: 78464 - DNA, 1431 bp, Saccharomyces pastorianus
atgttacaagataataatgggcccgctgttaagagggcgaaaccctcagaaaggttgcaatgtgaatatttcatggaaaaaaagaaacgaagatgtgggatgaccaggagttctcagaacttgtattgttcagagcatctgaatttgatgaaaaaggcggctaattctcaagtgcataataagaatggcagtgaagcagagaaagaaagagaaagagtaccttgtccgctggatcctaaccatacggtttgggcagatcaattaaaaaagcatttgaaaaaatgcaacaagaccaaactaagccatttaaacgatgataagccatactatgaaccgggctataacggagagaatggactgttatcgtcgtctgttaaaatagatattactgcggaacatttggtacaatctattgaattgctgtataaggtgtttgagggagaatccatggacgagctgcctttgagacaactgaacaataagcttatgtctctaaaacgattccctcaattgccttcgaatactaaacatgctgtacaacagtcttcactgatcgaaaacttagtggacgctggcgcatttgagaggccagaaagtttaaacttcattgagtttggatgtggcagggccgaattctcgcgctatgtcagtctgtaccttttaacacaattgacaagccttccagcggagcactcgggttcaaactcgaacgagttcgtgttgattgacagagcaactaataggatgaagttcgataaaaagataaaagacgatttttcagaaataaagtcaaactcaccttccaaacctattagctgccccagcatcaaaaggataaagatcgacattagggacttgaagatggatccgattttaaaatcgacacctggggacgatatacaatacgtgtgcatctcaaaacacctttgtggtgtagctacagatctaactttgaggtgtataggcaacagctcaattttacatggcgacgataacaacggatgcaaccccaaactgaaggcaatttgtattgccatgtgctgcaggcatgtctgtgactacggcgactatgtcaatcgcagttacgttacatcacttgttgaaaagtatagggcccatggctccatcttgacatacgaaacctttttccgcgttttaactaaactttgttcatgggctacctgcggaaggaaaccaggtacggatattacagatatagtaaacgttgtcgaatcgtttgaaggggctgagccatatacaataaccattaaagagagagaaaatattggattaatggctaggcgtgtaatcgacgagggcaggttggcatatgtgaaagaaaagtttacagagtttaatgcggagctgataaggtacgtagaatctgatgtttctttagagaacgttgctatgttagtttataagaaatag

SEQ ID NO: 78465 - DNA, 1302 bp, Saccharomyces pastorianus
atgaagaaatatctgctgtatatggtacaagttcatttgaactttagaagagcagaactggaatcgttagcagacctatataatctttccatagacttttcgcagtacgatgccaatagccctttctttattgtagagctggaaaatgatcagcaagcaaaggattggattaagaggtctattttaaccagaggtatttatgagtattgggggcagggtacaacgctcgatgagctgcataaagatattcagcgtcagtctaactttgaacaggatctgcaattgaaattcaaacattccacttttaagttcgaattcgaatgctataaaggcaacagtaaagctaagagggtagagcagattgaaactttccgttaccttggctttgaaggaaagattgatatgaaacatcctcaagaggttttcactgttatagaagagtacacaccaatatcggaaaacgttggtggtaagacccccaccaggatttattttggtaggcaggttcagatgagcaataggagtgccatggagaaatatgatttgaagaaaagaccttataaaggtacaactagcttcgaagcagaattatcgttggtcagcgccaatatagctcaagtgaaaccgggaactataatgtacgacccgtttgcaggtacaggatcctttttggtagctggtgggcattttggttctttagtgattggttcggatatagatggcagaatgattcgtggtaagggtgctcaagtgaacatttcggccaacttcaaaaaatatggcgagagttctcaattcctcgacgtgttgaccatggactttacaaataacgcattaagaaacaatcttgtcattgatactattttgtgtgatcctccatatggtatcagagaaagcataaaagtcctaggtgctaaggatccagaaagatttctaggcaaggaagatatggaaattgacggtgaaaaggcatatttgcgtcgcgattatattccaaccaaaaaaccgtatgctctagattcattactggatgatcttttacaatactcttccgaaagattaccgattggcggaagattagccttctggatgcccactgcaaacgacgccaatattgaaactattgtcccaatgcacgaaaatctagagctaaaatacaactgcgttcaagaattcaataaatggtcaaggagactactggtttatattaataggggtagcactttcaatggaccaagtaatcatggcataaaacgttcaaaagataatttcagggagcggtacttcaataattttaactga

SEQ ID NO: 78466 - DNA, 309 bp, Saccharomyces pastorianus
atgtcttttagaaagaaaaaactcaaacctccagcgggtagtcaatttactataaacgacttcgtaatgagctatattgaccgcacgaaaacactaataaggatgattggatgcaagaaccagtacataaaagcacgtatgaaagataagaccttcttctatacgaagcaattccgtacagccaaaaacaaatttttctttcatctgtaccattgggaggccactcatattaacgttgaccactatatatgtacatgtcatcccattttttggggctctatatgtcagaaactcaggagatccgcctga

SEQ ID NO: 78467 - DNA, 1938 bp, Saccharomyces pastorianus
atgtctgatgaagataacaattatgacgacttcatgttatcggatgacgaaggcatggagtcaattgaaatggaggaagaaaccgaggatgaagacaaacaaaacattgaaataaatgaagacaatagtcaggatgatcaagatcgaggagcggcacgacataagcaacatgaacaaggcaccttcgagaaacatgacagagtagaagatatttgtgaaagaatctttgagcaaggccaagctctcaaagaagacgaacgatataaagaggctcgcgatttatttttaaagatatattacaaggaagaattttcatctgacgaaagtatagaaaggctcatgacatggaaatttaaatcgcttattgagatattacgtttaagagccctacaactctattttcagaaaaacggtgcacaggatttagttctacaaattttagaggacacggcaactatgtcggtttttttacaaagaatagactttcaaattgatggaaatatatttgaattactttctgatacttttgaggtattggcacccaagtgggaaagagtattcttgttcgacatcgagaaagttgatagggaaaatatgatctgcaaaattgagttccaaaaaaacttcatggatcagtttcaatggattttaagaaagcctggcaaggattgtaaactccaaaatctccagcgtataattagaaaaaagatatttattgccgttgtttggtatcaaaggttaaccatggggaatgtattcaccccggaaatttcttcccaaatagagattcttgtgaaagataatgaatgctcttcttttgaggaaaataatgatttggaaagtgtatctatgttactgcagtattacatattggagtatatgaacactgcacgaataaacaatagaaggttgtttaagaagtgcattgacttttttgaaatgttgatatctaagtcgcttactttctcacaagaatctggactgatggtaataatatatacctctaagattgtattcattttagactctgattcagagaatgatttatcctttgcgctgatgagatattatgatcgaaaagaagagctaaaaaatatgttcctctatatcttgaaacacttggaagagatgggaaaacttcgggagagggatattacctctttgtttcacaaattcattcttagcggcttcattttcacgagcatgattctagaagcaattcgcacagataagattaatccttttggtttcgaacaagtgaagattgcgctaggcagccctattgttaacgtattagaagatgtctacaggtgcttcgcacaactggaactaagacagctgaatgcaagtatatctcttattcctgaattgtccgtagtactaagtggaattattcaagatatttactatctggcgcagacattaaagttatggagaaaaattgcacgattatactcctgtatctccataagtgacattataagtatgctgcaaataagtgatgacaatgaaatgacaagagatgatttgctaacaattttaatgaggtcaataatgaaaaatagatcggttgtgtattttaagttagatttgacaagtgatttagtctatttcggagacgagaataaagtcatgctaccgagatgttctaaagaagaatttcgtcttatgatctctcccaaggatgaagaaaccactgaaaaggccaggctaatagattttgagtacgttaacgatgtcgcgatttataataacccaacaagaataagaaccaaatcctctaaagaatttttcaatacattaagaaaatctagggaaactgtaaaattaccgagggtaaacaaccagtcgaatgaagatacttttctaccatcgtacatgaagttttccaacaagtacctcgagctgtgcaaactggcctctaacaatctggaatag

SEQ ID NO: 78468 - DNA, 1149 bp, Saccharomyces pastorianus
atggcaagtaaccagcacataggagcttcaaacctgaatgagaatgaggctatattaaccaaccgcgttgctgagctggaaaggcgtatgtcgatgtttgagggcatatttcacgcgttaagtaaccgtctcgatcttcactttaaaaaatatgatgtagtggtaaactcccaacagcaacaaatcaacgaactaaccgcgtttttatcaacattgctgaatgaccaacaacgccacgctgaaattctcagtgaaaaattaagcggaacgttgcatggggtgtcagctacgtcaatatccttaaaccaaactcttgacccacaaggcttcactgatggaactacggcaccaggagctcctagaaattatacttcagtgcctatgagtaatgatcaaactgctcatccgcaaaatgaaggggctgttagtaatgaaacactttttgaggacattttgaatggaaactcacaagaaaatgataagagtcaacaacaaactaacagctcaaatcctataagccaagaaaataatagcaccaacccttcagtggacactcggttcaacaagccgcaaaattataattccaatttagtcccatccttggaagagtattcagcaaatccacctaacaatgatggtggccaaagtcaaggactgtacataagcagcaactcttctcaatcacggcagtctcctaatctccagaaagtttctcctaaccatgaaaatgcggttgaatcaaatgcacaagagagcgtgccgacatttgaggaggaacagtatgagactaaaacaggattgaaacggaaacgaatagtctgcacaagacccttcgaatttatcaagtcaccacactctgtgatggaggtttggaaggagtatacagaaggtgttaacgggcagccttccataaggaaaatggaagctctttatcaaacggcatggaggcgagatccagcagtaaataaaagatattcgagaagaaaggttctttggaaagccattcaaactggccttaatcgtgggtattcattaaactatgttgttgaaatattagaaaactcaagatatgttaatgataaacagaaggttaaacaacctattggttggttatgccacagttctcatattccagagactttgaagtga

SEQ ID NO: 78469 - DNA, 1755 bp, Saccharomyces pastorianus
atgggggcaaagagtgtaacagtctcttcttcaaagaagattaaaaaccggcataatgggaaagtgaaaaagagcaagaaaatcaagaaagtacggaaaccaaagaagtctatatccttgaacgacgaaaacgaagtagagattttacctagtcgtaatgagcaagagacaaataaattacctaaagatcacgtcacggcggatggaattcttgtattagaacataaatctgatgatgatgaaggattcgatgtctacgatggacatttcgataaccctactgatattccctcgactactgaagaaagtaaaacgccttcattagcagtgcacggggatgagaaggatcttgctaacaatgatgattttatctctctttctgctagttctgaggatgagcaagccgaacaggaagaggagagggagaaacaagaattagaaattaaaaaagaaaagcaaaaggaaatccttaatactgattatccatggattttaaatcatgatcactccaaacagaaagaaatctcggactggctaacctttgaaatcaaggattttgttgcctatatctcaccaagtcgtgaagaaattgaaattcgtaataaaaccataagtacaataagagaggctgttaaacagttatggccagatgctgatttgcacgtgtttgggtcatattctaccgatttgtatttgcctggttccgatattgattgcgtggtaacgagcaaacttggtggtaaggaaagtaggaataacttgtattcgttagcaagccatttaaaaaaaaaaaatttggcaacagaggttgaagttgtcgccaaagctcgcgttccaatcatcaagtttgttgagccacattcagggatccacatagatgtttcatttgagagaacaaatggtattgaagcagcaaagcttattagagagtggttggacgatacccccggcctgagagaattagtccttatcgtaaaacaattcctacacgcaagaagactaaataatgtgcataccggtggtctcggtgggtttagtattatatgtcttgtcttttcctttttgcatatgcacccacgtataataactaacgaaatagatccaaaggacaacttgggtgtgctcctgatagagttttttgaactttatgggaaaaattttggttatgatgatgttgcactgggatcatcggatggttatccagtatactttccaaaatcgacatggaatgctattcagcctattaaaaatccattttcattggccattcaagatccaggtgatggatcaaataacatcagtcgagggtcctttaacattcgagatattaaaaaggcatttgctggtgcttttgatctgttgaagaatagatgttttgaattacattcagcaacttttaaggatcgattggggaaaagtatattgggaaacgtgatcaaatatcgtggaaaggcaagagatttcaaggatgaaagaggtctagtactgaataaggctattattgaaaatgaaaattatcacaagaaacgtagcagaataattcatgatgaagattttgccgaagatacagttacctccacagccaccgctaccacaacagatgatgattatgaaataacgaacccacctgctaagaaggctaaaatagaagaaaaacctgaaagtgaaccggccaagagaaatagtggagagacatatatcactgtctctagcgaagatgatgatgaagatggatataatccttataccctttaa

SEQ ID NO: 78470 - DNA, 609 bp, Saccharomyces pastorianus
atgacaacattgatgggaaagtttaaacttactgggcgctcccctctgtttgtacttcaaccaatgttgcactgcaagaaacaacagttcgttgaagaggcagtcagattgattagtaataaaaagatcggaaagaaatctgacttcgtccaggcaagaaactgggtaggagcacttaacgtaacgggcttgcccttagatcaatttattttacgttacgatagagccagcgggccaggaggccaaaacgttaataaggtaaatagtaaatgtactttgacactttctggtttatcaaactgtgcttggattcctcaggaagtgagaaacatcttaagtagcggcaggtttcgatactacgctaagggcagcgattctatagtaattcaatctgatgaaaccagatcaagggaaaccaacaaattaaaatgcttcgagaagttggttcaagaaattcggcaaacgtgccaatttcctaatgacaccactgctgagacctcaaagaaatggaataaaataaaagagaaagccaacaaagagcgacttcttgacaaaaaagttcacagcgataaaaagaaaaacagaagtaaaattaaattcaattattaa

SEQ ID NO: 78471 - DNA, 1968 bp, Saccharomyces pastorianus
atgaagggcgtaaaaaaggaaggatggatatcttataaagttgatggattgttttcgttcttatggcaaaagagatacttagtactgaatgattcgtatttagcattttacaaaagtgataagtgcaatgaggaaccagtcttatctgtgcctttgactagtataacaaatgttagcagaatacaattgaaacaaaattgttttgagattcttcgggcaacagatcaaaaagagaacatatcccccataaactcctacttttatgaatcaaattccaaaagatcgatattcatttccacaaggaccgaacgggatttgcatggctggcttgatgccatttttgccaaatgtcctctccttagtggtgtttcatcaccaacaaattttacacacaaagtacacgttgggttcgacccaaaagtgggaaactttgttggagtacctgatagttgggctaaactactacaaacctcagaaattacctacgatgattggaacaggaactcaaaagctgttattaaagcactgcagttttatgaagattacaatggactggacacaatgcaattcaatgatcacctcaacacaagcttagacttgaaacctttaaaaagtccgacaaggtatattataaacaagaggactaattccatcaagagatcagtaagtaggacgctccggaaaggcaaaacagattccattttacccgtctatcaatcagaacttaaaccattcccaaggcctagtgatgatgattataagtttaccaacatagaggacaataaagtacgcggagaaggcagggtgcatgttagtaaagaaagcatggcagattcccagacaaagcagttaggaaagaaggaacagaaagtcattcaaagccatctgcgaaggcatgataataattcaacatttagacctcatcgactagcaccatctgcacctgctacaaaaaatcatgatagtaaaactaaatggcataaggaggatctccttgaacttaagaataatgatgattcgaatgaaataataatgaagatgaaaactgttgcaattgatgtaaacccaagaccgtatttccaactggtagaaaaggcaggtcaaggagcaagtggtgcagtatacctgtcaaagcgaataaaattacctcaagaaaatgacccgagattcttgaaatcacattgccaccgagtcgtaggcgaaagagtggccattaagcagatacgtttgtctgaacaaccaaagaaacaattgattatgaatgaactcctagtgatgaatgattcgcgccaagaaaatatcgttaatttccttgaagcctatattattgatgacgaagagttatgggtgataatggagtacatggaaggtggctgcttaacagatatattggatgctgtagtaaggagcaataccggtgagcactcattgccgttaaacgaaaaccaaatggcatatatagtaaaagagacgtgccaaggtttgaagtttttgcataacaagaaaattatccatcgagatatcaaatctgataatatccttctgaattcccaagggttagtgaaaattacagacttcggtttttgtgtggaattaacagaaaaaagaagcaagcgtgccacaatggtaggtactccatattggatggcacctgaaatagtgaatcaaaagggatatgatgaaaaagtcgacgtttggtctctagggataatgcttattgagatgatagaaggtgaaccgccttacctaaatgaggatcctttgaaggcgctgtatctgatagctaacaacggttcaccaaaattgcgtcatccagagtcagtgtgcaaggaaaccaaacaattcttagatgcctgtttgcaagtgaatgtcgaatcaagagcatccgtgagaaaactactaacgtttgaatttttgtcaatggcatgcagccctgaggagctcaaagtatccttaaagtggcattga

SEQ ID NO: 78472 - DNA, 342 bp, Saccharomyces pastorianus
atgtctgaaattcaaaacaaagctgaaactgccgcccaagatgtccaacaaaagttggaagaaaccaaagaatctttgcaaaacaagggccaagaagtaaaggaacaagctgaagcttctatcgacaacctaaaaaatgaagctcctccagaaggtgaacaggtgaagaaggaagaacaaaacattgctgatggtgtcgaacaaaagaagaccgaagctgccaacaaagttgaagaaactaagaagcaagcttccgccgccgtcagtgagaagaaggaaaccaagaaggaaggcggtttcttgaagaaattgaaccgtaaaattgcttccattttcaactaa

SEQ ID NO: 78473 - DNA, 456 bp, Saccharomyces pastorianus
atgacgaacgatattaaggagatacaaacaatacaaccgggattgtccgagattaaggagataaagggtgaactggctaatgtgaagaaaaggaaacgcaggtctaagaagattaataaattgaccgatggtcaaatacgtataaatcatgtttcatctgaaaaaaaaaggagagaattggaaagagctatatttgacgaactggtagcagtagtacctgacctgcaaccccaggaaagtcggtcagaactaatcatatacctgaaaagcttgagttacttaagttggttgtatgaaaggaatgaaaagctgagaaaacaaatcatagctaagcatgaggcaaaaaccggcagcagcagcagcagcgatcccgtacaagaacaaaatggaaacattcgggatttagtaccgaaggagttaatttgggagctgggtgatggacagagtggtcagtga

SEQ ID NO: 78474 - DNA, 1029 bp, Saccharomyces pastorianus
atgcaatatagttcgaggttcctagaattgaatatcccggattcatttttaaatatcaataagattcctgatgctactaaatttattacagtcacttatatatgcttaactgcaacccttttctgtataaggagatccttgtacaacaagctagttcttgaagaccctaacttggactacaacttgattacttcgccgcttttgcaaatggtaccttcgcagatttggaggtaccccacctcattagttctatccaacttcatcgacactaaagcttggaaggtggtagtgaacttattgaatttgatcattggtggatccttcattgaacgcaattggaactcttccaaagaaatgttcaaatttatcatagttttaggttctcttacaaacgttctgatcatcatgctgactttgttagtatcttttttctctaataaggtaaggctggatattcccttagacgggaattacacaattttaatcggtttccctatcatttatagacagttattgcctgaaacaactataatccatctgaagacacctcaatttttggccaaaaactttaggttcaaattactacccatttttgtaatgtttacaatgacggtaacccaaataatatggtttcatcattttgctcaattgttctccatttgggttaccttttttgccagttggtcgtacttgaggtttttccagaaacttgcacccttgaattgtccctctttgccaacaactaattctcaaggtggtcaggaaatattggtcggcgatgcatctgatacttttcaattgatttacttctttcctgatctaattaagccgattttgaggccgattttcaatttcatttataatgtagttgttgtaaaatttaaagtcattaaaccttttcatgatattgatatagatattgggaacaccatcgcagaaaatagaggcgccaaaaaaattatgactgtagaagaaagacgaagacagttagctttacaagttttggaagagcgtatggtaaacccttga

SEQ ID NO: 78475 - DNA, 1671 bp, Saccharomyces pastorianus
atggaaagagtatggtttgcaaaattaacaaataaaggaactattaaaatcgggtatatctcatttatacttctaagtttgctatgtcaatctctgattgggctggttaatgctgattttaattatgaaggctgttacagtgccgcggatatccagtctgctggactgtctctgaaaaactcatacatatatcaatcagtgtcatactgtcaaaaccagtgccctgagtcagcagtagtagcattatttaacgggtcagattgttactgcggtaattcggtaagttttctgacttctttgacgaaatcaacagattcaaactgtggaactaaatgctctggctggccttaccaaatgtgtggggggtcatcgtacatgaacgtgtatgtaaatgctgaaacttttgtttcatcggttgaatcttcctcttccaaagaagggtctagcacttcctatatgccctcaacaacttattcattgtcctccgcccaaatttcttcaactactaggagaacgtcaacagatatgaaaagttctgaaatgatagccacgacaatttctaccacttcaacaacctcttcctcgacttcctctactacctcttctaccacctcttctaccacctcttctaccacctcttctactacctcttccactacctcttctactacctcctctactacctcttccactacctcttccactacctcttccactacctcttctactacctcctctactacctcctctactacctcctctactacctctatcttttctgttacgtctagctcctcatccattacattgtcctcatctgagcataccacagtcgatagccgtacttcttcaccctcttccaccttggtgccagtgtcctcgagtagcagcacactatcaactccaaaagtgacctcaatgacccctagtacgtcatcaacgataccaatagttacctcagtggaactagtgactagtgtggttacaaaagcgattgtgagtacttctgatcaacatcaggaaacaatatttgttacgaggacatccgtggttgaacgatcttctgaggtagctactgctactgctgccgcctcaaataatagatctaattcgacttcgaagcagcgtctgagtggtggagccattgccggtattgttattggtgttgtgtttggcgtaatttttattattttgattctattgttcctgatatggaggagacggaaatcgcacgaccaattagacttggaggaaacgaaacattatcagccctattcgttcggtgatgatgatgcaaatccaataggaccgcctccctcctctggtacgacaaattggatgagacattcaaggggtaatacagcgggttctatcggtacaagtaatatgtatggtttttctatgagtaatggtgcaaattatagtagtcctagttcaaacaccagtggaagcatcataaacaacttggctggcttacaagatgctacggttcagaaacagaaccttccatcgacagtttttgaagaggcaaatactttgaatagtgcaaatgaaaggttcagtgccaattctttacccgacatgatgatgagcggaccattgcaagtggtaaaccctgataatcctgataatcctgaattatctagtaccgtatctcataatcgagcctga

SEQ ID NO: 78476 - DNA, 1839 bp, Saccharomyces pastorianus
atggctgaaatgaagaattcgacagctgctagttccagatggacgaagagtcgtctctcccatttctttccctcgtacactaatagcagtggtatgggggccgcctcaactgatcaatcttctacgcagggagaagaactgcaccataggaagcactgtgaagaagacaatgatggtcaaaaaccgaaaaagtctcccgtatccacctctacaatgcaaataaaatctagacaggatgaggacgaggatgacggtcgaattgtcattaaaccagttaacgatgaagatgatacatcagtgattataactttcaatcagtcaatatccccttttattattacattgacattcgttgcgtccatttctgggttcatgtttggttatgatactggttacatatcgagtgcgctaatttctatcaatagagatttagacaacaaagttttaacttatggagaaaaagaattaattacggccgccacatcattgggcgctttgattacaagtgtgggcgctggtactgctgctgatgtgtttggaagaagaccatgtttaatgttctccaatctgatgtttttgatcggagcaattttacaaattaccgcgcacaagttttggcaaatggcggccggtagactgattatgggtttcggtgtcggtattggttctttgatttctcctctttttattagtgaaattgctcctaagatgatcaggggtaggttaaccgttataaattccctatggctgacaggtggtcaattgattgcttacggttgtggtgcgggcctgaaccacgtcaaaaacggttggagaatcttagttggtttgtccttgatacctactgttttgcagttttcttttttctgttttttgccggatacaccaagatactacgtaatgaaaggcgatttaaagagagcaaaaatggttctcaaacgaagttacgtaaacactgaagatgaaataattgatcaaaaagttgaagaattatctagcttaaatcaatcgataccaggaaaaaatccaataacaaaattctggaatatggtcaaggaattgcacactgtaccttcaaatttcagagctttgattattggttgtggtctacaagccattcaacaattcacaggttggaattccttaatgtatttctccggtacaatatttgaaactgttggattcaaaaattcttctgccgtttctattattgtctcaggtactaattttgtgttcacattaatagcatttttctgtattgataaaatcggccgtaggtacattttactgattgggctacctggtatgactgtggcgctggttatatgtgctatagcgttccatttcctaggtattaagtttaacggtgctgatgcagtagtggcatctgatggattttcatcttggggcattgtcattatcgtatttattattgtgtatgcagccttttatgccctcggtatcggcactgttccatggcaacaatcggaattatttccacaaaacgtcagaggtgtagggacatcctacgctactgccaccaattgggcaggttctttagtcattgcgtctacgtttctgactatgttacaaaatattacaccaacaggtacattttcattctttgccggtgtagcatgtttatcaacaattttttgttacttttgttatccagaactatcaggattggagttagaggaagttcaaacaattttaaaggacggattcaatatcaaagcctctaaagctctagctaaaaagaggaaacaacaggtggccgaaggtgctgcccatcataaactcaaattcgaacctacacaggaaattgtagaaagttag

SEQ ID NO: 78477 - DNA, 3246 bp, Saccharomyces pastorianus
atgtattttgataaggataattccatgagccctagaccgttattgccaagtgatgagcagaagctaaacattaatcttctaacgaaaaaggagaaattctcgcatttagatccccattatgacgcaaaagccactccacaaagaagcacttcgaatagaaacgttggcgatttacttttggaaaaaagaaccgctaagcctataattcaaaaggccttgacgaatacggataatttcattgaaatgtaccataatcagcagagaaaaaatcttgatgatgacactattaaagaagtaatgattaatgatgaaaacgggaaaactgtcgctagtaccaacgacggcagatatgacaacgattacgataataacgatattaatgaccaaaaaactttggataatatagcgggaagtccccacatggaaaaaaatcgaaacaaagtaaagattgaacatgactcttcatctcaaaaaccaatagctaaagagtcatccaaagcccaaaaaaatataatcaaaaagggaatcaaggactttaaatttggtagtgtaataggtgatggcgcgtattctactgtaatgttagcgacgtcgattgataccaaaaagaggtacgccgcaaaagtactaaacaaagaatatttaatacgccagaagaaagtcaaatacatcagcatagaaaaaaccgcccttcaaaagctcaataattctcctagtgttgtgcgattattttccacttttcaggatgaatcaagcctatactttctcttagagtatgcccccaatggggactttctttctttaatgaaaaagtacggttcattagacgaaacctgcgcacgctattatgctgcgcaaataatagatgcaatagactacttacattccaacggtattatccatagagatataaaaccagaaaatattcttttagatggagaaatgaagatcaaactgactgattttggtactgcgaagttactgaatcctacaaataatagcgtttcgaaaccagaatacgatttatcaacaaggtcgaaatcttttgttggcactgcagaatacgtatctccagaacttttaaatgacagttttacagattatcgttgcgatatttgggccttcggatgtatacttttccagatgattgccggaaaaccaccattcaaagctaccaatgaatacttgactttccaaaaggtaatgaaagttcagtacgcctttacaccaggtttcccacttattatcagagatttggttaagaaaatcttagtaaaaaacttagaccgaagattgacgataagccaaattaaggaacatcattttttcaaagatttgaattttaaagacggctctgtttggtcaaaaacgcctccagagatcaaaccatataaaatcaacgccaaatccatgcaggcaatgccaagcggaagcgatagaaaactggtgaagaaatcagtcaacacacttggcaaatcgcatctagtgactcaaaggtcagcttcaagtccctctgttgaggaaactactcattcaaccctatacaataacaatactcacgcttctactgaaagtgaaatatcaataaagaagagacccactgatgaaagaacagcgcagatacttgaaaatgcaagaaagggtataaacaataggaaaaatcaaccaggcaagagaacaccaagtggtgcagcttctgctgccctagcagcttctgctgctttaaccaagaaaaccatgcaaagctatccaacttctagttcgaaaagtagcaggtcaagctctcctgcgacaacatcaagaccaggaacttataagcgtacttcttctacagaaagtaaaccatttgccaaatctccacctttgtcagcatcagttttatcgtcaaaagtcccaatgcctccatacacacctccaatgtcgccccctatgacaccatatgatacatatcaaatgactcctccctatacgacaaaacagcaggattattctgataccgcaattgccgcaccgaagccttgtattagtaagcaaaatgttaaaaatagcacagattctcccttgatgaacaagcaagatattcaatggtctttttacctgaaaaacatcaacgaacatgtactaaggacggaaaaactggattttgttaccacaaattacgatatcttagagaagaaaatgcttaaactaaatggttcattgttagatcctcaactgtttggtaagcctagacagacttttttatcccaagtagctaggagtgggggagaggttacaggttttcgaaatgatccaactatgactgcttattccaaaacagaagatacgtactattcgaaaaatattatcgatttgcagctcttggaagatgattatcgaattgaaggaggtgacttatcggagttgcttactaacagaagcggaaaagggtacaaatgcaatcaaaacagcacaccagtgaaagacgatgataaatccgaatctaacaataaaggaagctctgttttttccggcaagattaaaaaattatttcaccctacctcagcagctgaaacgctctcttcctctgatgaaaaaaccaagtactataaacgaaccattgtaatgacatcatttggaagatttctagtatttgccaagaggaggcagccaaatccagttacaaatttaaagtatgaactagaatatgacataaatttgcgtcaacagggtaccaaaataaaagaactaatcattcccttagaaatgggaacaaatcatataattgtgattcagacaccttacaagtcatttcttttgagcactgataaaaaaaccacgagcaaattgtttactgttctcaaaaaaatactcaattcgaatacaaataaaatagagaaagaactgttgcaaagaaaccaaaaggtaattgaaaggagaacatcatcatccggaagagccatttctaaagatcttccaacttccaagtctccttcgccaaaacctaggacgcatagccaatctccatcaatttcaaagcacaattcgttttctgaatcgattaatagcgctaagagcaacagatcaagcagaatttttgaaacctttatcaatgccaaggaacaaaattcaaaaaaacacgctgctccagtaccgttaaccagtaaattagttaacggattgccaaaaagacaagttaccgtaggattaggtctaaacacaggaacaaatttcaaaaactcatctgcaaaatcgaagaggtcgtaa

SEQ ID NO: 78478 - DNA, 492 bp, Saccharomyces pastorianus
atgaaaatattagataaaattactaattacgacctcttcgattttgcagatgagtttttgaaatttgttcctgtgtttagacctaatcctacggtaacttgtctttttggcaatccgttaactaatttactggttaacggtactggagcagcgtgtttttttgaattttgttccttggcattgataaaggtttcaaaaattctgcttgatctgttgctcttagcgctattaatcgattcagaaaacgaattgtgctttgaaattgatggagattggctatgcgtcctaggttttggcgaaggagacttggaagttggaagatctttagaaatggctcttccggatgatgatgttctcctttcaattaccttttggtttctttgcaacagttctttctctattttatttgtattcgaattgagtatttttttgagaacagtaaacaatttgctcgtggtttttttatcagtgctcaaaagaaatgacttgtaa

SEQ ID NO: 78479 - DNA, 3114 bp, Saccharomyces pastorianus
atggggttcaagaagctcgtatcattccaaccggattatgtcccacaataccatataactaaatatatttcggaacgaactaaactgcaactggtacatataaaccacaaaacctccccattggttcacggttactttgctgttcctacagaatgtcttaatgattcaggtgctccgcataccttggagcatttgatcttcatgggttctaaatcttacccatacaaaggtttattagacacagctggtaatctgtctttgtctaacaccaatgcttggactgataccgaccaaactgtttatacattaagcagtgctggctggaagggattctcaaagttgctacctgcttatctagatcacatcctacatccaactttaacagacgaggcttgtttaactgaggtttatcacatcgacccggaaaatttgggtgataaaggtgtggtatttagtgaaatggaagccattgaaactcagggctggtacatttcagggttagaaaagcagcgattaatgtttcctgaaggaagtggctatcggtcagaaactggtgggctaaccaaaaatttaagaaccttaaccaacgacgaaatcagacaatttcacaaatctctgtattcttctgataatctttgtgtcattgtttgtggtaacgtaccaacagatgaactgttaaccgtcatggaagaatgggataacaaattgccggagattccatcgaatataccaaagaaaagaccatttttggacaacaagctttcgcacataccgcaatctagagataaagttacggaatctactgtagaatttcctgaacttgatgaaagtcagggtgaattactcttttcttggattggtgttccctactcagattttcgtaatgacctagcggttgatgtgctattagattactttactgactctgcattggcagtgtttacaagagaactggttgaaattgacgatcccatggcaaattccactgattgttgcactgattatttcatgagaaccataattgatcttcgtatccaaggtgtcccaacagaaaaaatagcagcaacaaagaccaaggtactggagattttgaaaacccataccattgatttatcaagagttagacaggtagttgaaaatactaaatgggaatatttgctgaactatgaaaaaaatggcgagagtcgtttttctagtgctgtgattaccgactatatttatggtaatgaagatggttcttcattagtgtcttctctcaaggatttaagtgattttgatgctttattacaatggtcccaaaaggactggcaatctttgctgaacagaatattcgtagacaacaaacctatcatagttaccgctaaaccaagcgctttgatgtatgaacaactagagaaagaaaaatcggatttgatcaaacaaagagaagctgaatttgatgatgaaaagaaactggttttattgaaaagattgaacaatgcaaaaaatattaatgataggccaattccgaaatctctactacagaaatttgagattgataatccttcaaagagtgttgaatttgtcaacacgaaaaacattgcaactgtcgattcgtataaatacaataatgttagtgatccgctgaccaaaaaaattttagaaacgaggccagacaattttcctcttttcattcacttaaatcatttcccgtctcaatttatagagctgcattttttggtcaactccgcatctattaaggatacctcgcttttaccatattttaatatgtttgatgagctattttccatgccaatgaaaattcttgatgaggagagtaatgtagaaactatgctctcgtttgaggaagttgtcgccaagttaaaatcagaaactattgacgcacagatcaaccaaggtttgaagggttcttgtcctgaccttattaattttaaaattcaatgtagagctgggggttactctaactctgttcaatggatcaagcactgcctatttgacatggtttttgatgaaaatcgtgttcgtattctgctggagaattatttgaattctattgtagaatggaaaagaaatggtaatgttatgttaagttctttaactaacagaaatctctattcggcaagatcgctgaaaaaatccaccgatccattatttgttgaagcaaaattacaagagatttttgcagaaattgagaatggcaactttgagaaagaaattttgccaagaatagaaacaatgagaaagcaactgagagcaaatttcaacaagtttcatattttggttcttggtgacatctcaaagatcgatgacgtttatgaaccatggaatcccttaattaagtgcttgaacattgcacatccagttgataagttaaaaattccaccagttccaagagccctagataccatttcatcgatttgcagaacacctggtgaaaaggcctttataataactactcccgcctcagaatctgcttatatgaatctaataacgtctatcccatttaacttggactaccatgatcctgaatacgctattgtctcattggcttccgaatatctagaatgtgttgaaggtccattttggaagggaatccgtggtgccggattggcctatggtgccagcatgttaaaattatgtgagataaattcttggggattcaatatttaccgcggcgctgatattattaaatgttatgaagttggaaaacagattgttcaagattatgcatcaggtgccttggaatttgatgagcagttaatccaaggtgccatcagtagtattattaacaggctggctactatcgaatgcggatactttgaaacagccctgtccaaatatgttgatgaattctgtttgcaaagggggaacaacttcaatgaactgtatttggaaaggttgcagaatgttaccaaaacagatctgaaaaatgccatgcagaaatattttgtcaacatgtttgattccaataaaagcgttgcctttgtgagctgtcatccagctaaattggaatcagttcaagaattctttgaaactcaaggtttcactgtcgaaatagaagagctagaagatgacgatgacgaaattgatagtgaagaagacgaaaatgcgtga

SEQ ID NO: 78480 - DNA, 1299 bp, Saccharomyces pastorianus
atgagcaacgacgaaactgtagagaaagtcacccaacaagtgtcggaactaaaaagcacagatgttaaagagcaagtagttacaccttgggatgtggaaggtggggttgatgaacaaggtagagcccaaaatattgattacgataaattgatcaaacaattcggtactaagccggtcaacgaagaaaccctgaagagattcaagcaagtgacgggtcgtgaaccacatcattttttgcgtaagggattgtttttcagtgagcgtgacttcactaaaatattagacctttacgaacaaggcaaaccatttttcctatacactggtagaggtccttcgagcgattctatgcacttgggtcatatgatcccttttgtcttcaccaaatggttacaggaagtgtttgacgtaccattagtcatagagttgacagatgacgaaaaatttttattcaaacacaagttgaccatcaatgacgttaagaattttgcccgtgaaaatgccaaggatatcattgctgttggatttgatccaaagaacacctttatcttttctgatttgcaatacatgggtggtgcattttacgaaactgtagtaagagtttccagacaaattacaggatccactgcaaaggctgttttcgggtttaatgactccgactgtattggtaagttccattttgcctccattcaaattgctaccgcattcccaagttcatttcctaatgtgttaggcttgcctgataagacaccatgtttgattccatgtgctattgacctagatccatatttcagagtttgtagggatgtcgcggataaattgaagtactccaaacctgctttgcttcattccagattctttccagctttgcaaggttccacgaccaaaatgtcagcctctgatgataccactgccattttcatgaccgatacaccaaagcaaattcaaaagaaaattaacaagtacgcattcagcggtggtcaagtgtccgccgacctacatagagaattaggtggtaatcccgatgtcgatgttgcataccaatacttgtcatttttcaaggatgacgatgttttcttgaaggaatgctatgacaaatataagtccggtgaattactatcaggtgaaatgaagaaactgtgtatcgagactctgcaagaattcgttaaggcgttccaggaacgcagagctcaggtggacgaagagaccttggacaaattcatggtcccacataagttggtttggggcgaaaaggaaagacttgtcgcacctaagccaaaaactaagcaagaaaagaagtaa

SEQ ID NO: 78481 - DNA, 951 bp, Saccharomyces pastorianus
atgggattcataatgttgttaagatctagatttttgaaggttgtccatgtgaggaagcaattgagcgcctgttcaagatttgcaattcaaacacaaacgagatgtaagagcacagatgcttctgaagatgaagtgaagcatttccaggagctagcccctacttggtgggatacagacggatcacaaagaattctacacaaaatgaatctagctaggttggattttgtgcagaggactgtgaggaaccaggttaaaattcagaatcctgaaatatttgtccctggatttaattacaaggagtttttaccagagtacgtttgcgacaatattcagcgggaaatgcaggaaagcatagagactaatctagataagaggccagaagtgagcgtcttggatgttggatgcggtggtggcattttgagtgaatcgctcgcgagactaaaatgggtgaagaatgttcaagggatcgatctgactcgcgattgtatcatggtagcaaaagagcatgccaagaaagaccccatgctggagggaaagataaattatgagtgcaaggctctggaggatgttactggacaatttgatattatcacctgtatggaaatgctagagcacgtggatatgcctagtgaaattttaaggcattgttggtcgaggttaaatcccggaaaaggtatactctttttaagtactataaacagagatctcatctcatggtttactacaatttttatgggtgaaaacgtcttgaagattgtcccaaagggtactcatcatttgagcaaatacataaactcaaaggaaatccttgcctggttcaatgacaactacagtggccaatttcgcttgttggatctcaaggggaccatgtacctcccatatcaagggtgggttgagcacgattgttccgatgtcggtaattattttatggctattcagagactgaattga

SEQ ID NO: 78482 - DNA, 2121 bp, Saccharomyces pastorianus
atggacaagctaactccatctcaatggaaggtaatacataagtcatatgaaccagcgtctacgataaaagtcattgcgggcccaggctcaggaaaaacgctaacgctactatataaagtactacatttaattactgtggaaaatattaagcctgaagaaatacttatattttcgttaacaaacaaagcagttgatagtattatagaaaatttactgtccatcttcgaaaactcgcatacaaataaggaaattgtccatcagattgggtgttacacagttcatgggttggctaatagaatcgttgtagagaatgaggggatgataaacattatagaagagattggatggagaggattaatgaagttgttaccgccgtcaaagagaaccccccatcatttcagatcatataaggaactcgagaaagttgttaaggattacaagctaaacaacgcaaaaaataataaccccgtcattgagaaactagttgaactgatggataactgtaaagtgatgaccaatgatgatttgatcattcgcgcaaaaaaatacttagagcttgattcttctgattcagatgcatcgtctttcactcaagatctccacaataaatacaaggttgttcttatcgatgaatttcaggacctctatccaagtttagcacccttaattaccatgatttgcaaaggcaagcagctcattatgtttggtgatacaaatcaaagcatatatggatttttggggagtaacaacgagattatgtcacaattagacaatcttcacccaaaaaatttcacgactgtcctgaaattatttgataattttaggtctacccccgaaataatctctctagcatcaaaaattatcaatcgtccactagcagagaaacagattatcgatgatactgatgaaacaccatcagagctagttcgcaagctaccgagtggtgtttcacctcaaataatgacatttgatgatctagccgcagaatctgaatttattattgataaaattacccaattgatttgttcttctgcaaagttttccgatatagcaattctatcaagaacaaattcacatctaacggctatagccagtattttgaagaaatatggtattccttatcaaaagctaaagagtcaacctgattggatggacgatttacgaattcaattccttttagatattctaaaagtgtgttctttagcctccgacgaaaagcataatcgtgagttcaatacgggtgataaatggcaaagtaacttcagcattttggtcacaatgagcgctctcaaagggattggcgatgcttcaatacaagccttgtataaagcatgcggcctgaaaaatctgtcaatttggaaatacctaactatggttcccaattttgaatggccattgggcctctccataaagaaaaaaatggaaaattacacttcaaacttatatgaaatgatcgaaaatgatcaagttcatcaattagatgatccgatggaacttttagaaaaagttgctagcatcacaaataacttaaacctaaatcctacctacttccaatccttaagtgatgctcaatcatctttagagtttaaaacacatctacaagagatggcacaagtaatgaaggtctcaaaatctaataagcccccgggtatttcatttgttaaatggtttctagagacatattttgatcaaacgatggtctttcaccagtctcagcaggcattacaaactaccggtccggggacagtaaaactatctaccatccattctgcaaagggtttagaatttcccatagtatttctaacaaacgggagcatgtccaatttcccaatggatacaaacgccctttatgtggggataactagggcaagaaacttgttgtacatgtgcaacatgaagcacgagagactggtcagtaaatcatcaccatactcaagaagcataatgtctaataatttattctggacttactacaataaggatttgaaccgatctgtatgtgacgttaaggtgacacatggttataatgtgcagcgatacaatcagttacgtaaaaattttggattttatagagcatattcttcactaagatgttgtaagagcgttttcagacgtatatag

SEQ ID NO: 78483 - DNA, 972 bp, Saccharomyces pastorianus
atgtccaaaactttatctttgcaacttccatgggttgagaaataccgtccccaagttttatctgatatagtcggtaataaagagaccattgatagacttcagcaaatcgctaaagatggtaacatgccccatatgatcatatcaggtatgccaggtataggtaagaccacttcgatacattgccttgctcacgagctccttggccgctcttatgctgacggtgttttagagttgaacgcttcagatgacagaggtattgatgtcgtcagaaaccaaataaaacattttgcccagaagaaactacatttgcctccagggaaacataaaatcgttattcttgatgaggcggattccatgactgctggtgctcagcaagcgttgagaaggaccatggagctatattcgaactctacaaggtttgcatttgcttgtaatcaatcaaacaagatcattgagccgctgcaaagtagatgtgcgattttgaggtattctaaactatccgatgaagacgttctaaaacgtcttttacaaatcataaagctagaggatgttaaatatacaaatgatgggttagaagcaatcatttttacagcggagggtgacatgagacaggccataaacaatctacaaagtacagtagcaggacacggtttagtgaacacagacaatgtcttcaaaattgttgattctcctcaccctctaatagtgaagaaaatgttactagcctccaacctagaagattcaattcaaatcttaagaacagatctttggaaaaagggttattcctcgattgatatcgtcacaacatctttccgcgttaccaagaacttagcacaagtgaaagaatcagtaagattggaaatgatgaaagaaatcggtttgacccatatgagaattctggagggtgttggaacgtacttgcaattggctagtatgttagcgaaaattcataaactaaataataaagcctga

SEQ ID NO: 78484 - DNA, 882 bp, Saccharomyces pastorianus
atgtccaatgatgagataaagcagaacgaggaaaaggtgaaaagaacaccacctttaccgcctgtgccagaaggcatgtctaaaaagcaatggaaaaaaatgtgtaaaagacagagatgggaggagaataaagccaaatacaatgcggaacgccgtgtaaagaagaagagacttcgccatgaaagaagtgcgaagattcaagaatacgttgacaggggagaagaggtcccgcaggaattgattagagagcctcgtattaatgtgaatcagactgattctgggatagagatcatacttgactgttcttttgatgagttaatgaacgacaaggaaatagtaagcttgtctaaccaggtcaccagggcatactccgcgaatagaagggcgaaccattttgcagaaataaaggtggcctcattcgacaaaagactaaagcaaaggtttgaaactactctgaaaaataccaattatgaaaactggaaccattttaaattcctaccagacgacaaaatcatgtttggagatgagcatataagtaaggacaaaatagtgtatttaacggccgatacagaggaaaagctggagaggctagaacccgggatgcgatacattgttggcggcattgtagacaagaatcgttataaagaattgtgtctgaagaaggcccaaaagatgggcattcctacgcgaagattgcccattgacgagtacatcaatctcgaaggcagaagagtgttgacgacaacgcacgtcgtgcaactcatgctgaaatactttgatgatcataactggaaaaatgcctttgaaagcgttttaccacccagaaagctggatgcggaagcaaaatccgcaagctcttcgccagctccaaaggacacataa

SEQ ID NO: 78485 - DNA, 2895 bp, Saccharomyces pastorianus
atgtcctccactaggccagagctaaaattctctgatgtatcagaggagagaaacttctataagaagtatacagggttgccgaagaaaccattaaaaaccattagattagtggataaaggcgactattacacagttataggttcagatgcgatatttgttgcagattcagtctatcatactcaatctgttttaaagaactgtcaattggaccctgtaacggcaaagaacttccatgaaccaactaaatatgttactgtttcgctacaagttcttgccactctgctgaagttatgtttgttggatctgggatataaagtcgagatatacgataagggttggaaattaataaaaagcgcatctccagggaacattgagcaagttaatgagctaatgaatatgaatattgattcgagtatcatcattgcaagtttgaaagttcaatggaattcccaagatggaaactgcattattggagttgctttcattgataccactgcatacaaggtgggaatgcttgatattgtcgataatgaagtgtattccaacctagagagtttcttgattcaattgggtgtaaaggaatgtttggtgcaggacttgacatcaaattcaaactccaatgctgaaatgcagaaagtaataaatgtaattgatcgctgtgggtgcgtcgttacattattgaaaaactcagaattttctgaaaaagatgtcgaactggatttaaccaagttactgggcgatgatttggcattatcgttaccacaaaaatactctaaactatctatgggtgcatgcaatgcattgattggatatttacaattgctctcagagcaagatcaagtaggcaagtatgaattagttgaacataaattaaaggagtttatgaagttggatgcctccgctattaaagcccttaatttattcccacaaggaccacaaaatccatttggtagcaacaatttagctgtatctggatttacgagtgctggtaattctggtaaagtaacttctcttttccagttactgaatcattgcaaaacaaatgctggtgttcggcttttaaatgaatggttgaagcaaccactgaccaatattgacgaaattaataaaagacatgatttagtcgactatctaattgaccaaatcgagttaagacagatgttgacttctgaatatttacccatgattccagatattcgtagattgactaagaaattaaataaaagaggaaacttagaggatgtcttgaaaatttaccaattcagtaaaagaataccagaaattgttcaagttttcacttcgttcttggaggatgacagccccactgaaccagtaaaggaactggtccgttctgtttggctagctcctttaagccaccacgttgaacctttgtccaaattcgaagaaatggttgaaacaacggttgatttggatgcttatgaagaaaataacgaatttatgattaaagttgagtttaatgaggaattaggaaagataagaagtaaactggatgcgttgtgtgatgaaattcactcaatccatctagattctgctgaagatctaggattcgatccggacaaaaaattgaagttggagaaccatcatctgcatggttggtgtatgaggttgacacgtaatgacgccaaggagttacgtaaacataaaaagtacattgagttgtcgacagtaaaagctggtatattttttagtaccaaacaattaaagtcaatcgccaatgaaaccaatattcttcaaaaggagtacgacaagcaacaatcggctctggttagagaaattataaatattacattaacgtacacaccagtttttgagaaactatccttagtcttagcgcatttagatgtcattgcctcttttgctcatacttcctcgtatgctcctataccatacattagacccaagttgcatcccatggattcggaaagaagaactcacctaataagctcccgtcatccagtactggaaatgcaagacgatataagctttatatccaatgatgtcacattagagagtggaaagggcgactttttaatcataactggaccaaacatgggaggtaaatctacttacatcagacaggttggtgtgatttctttaatggcccaaattggttgtttcgtaccttgtgaagaagctgaaatagccatagtagatgcaattctttgcagggtcggggcaggagattcccaattgaaaggtgtttccacatttatggttgaaatattggaaactgcttctatactaaagaatgcgagtaagaattctttgattattgtagatgaactagggcgtggtactagtacttatgatggttttggtctagcttgggcaattgctgaacatatcgcaagtaagattggatgtttcgctttgtttgcaactcactttcatgaattgacagaattgtctgaaaaattgcccaatgtcaagaatatgcatgttgttgcacatatcgagaaaaatttaaaagaacaaaaacatgacgatgaggacatcacgttgttatacaaagttgagcctggtatttcagatcagtcttttggtattcatgttgcagaagttgttcaatttccagaaaaaattgttaaaatggctaaacgtaaagccaatgaattggacgatctaaaaactaataatgaagatttgaaaaaagctaagctatcattacaggaagttaacgaaggtaatattcgtttgaaggctttactaaaagagtggattagaaaagtgaaggaggagggtttacatgacccaagcaaaattactgaagaagcttcccagcataaaatacaagagctattgcgtgctatagcaaatgaaccagaaaaggaaaacgataattacctgaaatatataaaagccttgttgttataa

SEQ ID NO: 78486 - DNA, 3093 bp, Saccharomyces pastorianus
atggaaaatcaaggtggagattacagcccaaatgggttttcaaactcagcaagcaatatgaatgcggtttttaacaatgaaatcaccggtagaagtgacatttcaaatgtaaaccatcaaactggtactccacgtctggttcctgaaactcaaatatggtcgatgcctgtgccggatcaactgatgacgatgcctaacagagaaaacacccatatgacaggtagtacagtaggtccaaatatccccataaatgtggcttatcccaatacaatatactcgccaacagagcatcagtcgcaatttcagacaccacagaaccgtgacatcagcacgatgatggaacacactaacagtaatgatatgagcggctctggcaaaaatctcaagaaacgtgtatcaaaggcctgtgaccattgccgaaaaagaaaaatcagatgtgatgaagtggaccagcagaccaaaaaatgttcaaactgtattaagtttcagttgccttgcactttcaaacatcgtgatgagattcttaagaagaaaagaaaattagaaatcaaacatcatgcaacaccaggggaatcacttcaaacctcaaatagtattaacaatcctgtagcgtcttcttcagtaccgaacagtggaaggtttgaacttttaaacggtaattcccccttagaaagcaatatcatcgataaagtctccaatattcaaaataatcttaacaaaaaaatgaattcaaagattgaaaaattggatagaaaaatgtcttacattattgacagtgtggctagacttgagtggttattggacaaggctgttaaaaagcaggaaggcaaatacaaggaaaagaacaatttgcccaaaccagcgagaaaaatatactctacggcacttttaactgctcaaaaactctattggttcaaacaaagtttaggagtgaaagcgtccaatgaggagtttctttctccaatcagcgaaatattaagcatatctttaaaatggtatgcaactcaaatgaaaaaatttatggatttgtcatctccggctttcttctccagcgaaataatattatactcattacctccgaaacagcaagcaaagagacttcttgagaattttcatgctaccttattatcctctgtaactggtataatatcgttaaaagaatgtctagacttagcagaaaagtactacagcgaaagcggcgaaaaactcacatatcctgaacatttattattaaacgtgtgtctctgctcgggtgcatctgccactcaatcaattataagaggtgattcaaagtttctaaggaaagatagatatgatccaacctcccaagagttaaaaaaaattgaaaatgttgccttactaaatgccatgtattattatcataagctgtccaccatctgttcaggtacaagaacactacaagctttattactactgaaccgatattttcaacttacctacgatactgaactagcaaattgtattttaggaactgcgattagattggcggttgacatggaattaaatagaaaatcctcttacaagtcactagactttgaagaagccataaggagaagaagtatgtggtggcattgtttttgtacagataaactatattctttaatgttatccagaccccctattgtgggggaacgcgatatggatatgctaacagatcaaaattattatgaagtgataaaaactaatattctacctgatcttattgataaaaaggaagatctcgataaaattactgatgtcaactctgcattgaatgtagtagtaaatttttgtcagcacatatcccttttcatatcatattatgtttcaaaattggttagtattgagagtaaaatatactctacttgttttgctgtcagaagtactctagatctttcattcgatgccatgcttgataaaatcaaagatctcaatgattctttgaacaattggagagacaacttgcacgtaagtatgaaactaaaaagttataaacagtatttatcggtactttacgctcaaaaatcccaagaaaatccggctttaagttttgagattgcatgctctcgtgttttgaattgtcattttagggcgctatattctaaagtgattttgagcatggtgactacatccttattgattgataacgaacgcctatacaaaggttctcgccatgatattcctcaactattcattcttttttcaagtcaatacttaaacgccagtaaagaaatgttacagctgtttcaaggcatcaattaccaggcgcatatgtataacgaggttatgtatcagttctctactgctgtgtttgttctcttcttttacgttgtggataatattaacgatctaaaaaagaaaggtgaggtaaaagagatcatcgatatcctaaaaaaatcttatgatcgattagtgggagaaaatgatgagcagttactgtttgacaatgtcaaatggaacactttgattgtgttttacagccactttttgaaatacgttttgcaacgttatcatgctttgaacgattccacgtcaatatttgattctaaaccttatgatgaaacgataacgaaagttattatgcattcaagaaagataaaagatgaaacagtcgatcaactaattatgagtctaaaatcatatggttctctccattctttacaaaagggcaacgaagccgatctcgccgatgatggactgaatacgaatgatatttcttcagaagactttgcggtggaagcaccaataaacttatttggagagttatcagtcgaaattttaaaactattaaaatctcactcccccatctcaaattttggagacctatcgccatcttcgaataggaaaggaatatctgatgactcatctttgtacccaattcgttcggacctaacatctcttgtttatcccatccatagttctgataccggagatactctttccagtgatctagagacccctgaaaattctaattttaatagtgacagtgcaataaaggaagatttcgaagcttttagagccttattgcctttaggaaaattgatctatgacagagattattctttcgtgaacacttttagggattatgaataa

SEQ ID NO: 78487 - DNA, 834 bp, Saccharomyces pastorianus
atgaaattgcacggctttttattttccgtattatcaacatgcgtcgtcattttaccagcgttggcctacagtgaagctgtcacgatggtcaagtcgattgagcagtacttcgatatctgcaataggaatgattcttacacaatgataaaatactacacttcttggtgccaacattgtaaaactctggccccagtatacgaagagcttggtgagctatacgccaaaaaagctaataaagatgataccccaattaacttccttgaagttaactgtgaattcttcgggccaactttatgtaccgacttgcctggatttccaataattgaactggtcaaacctcgtactaagcccttagttcttccgaagctcgattggtcgtctatgaaatttcatgaaagactatggcaaagaatcaagacgtggttcaacaatcctaagtaccaactggatacgtctagggttgttcgttttgaagggagtaggaacctaaagagtttaagcaactttatcgatactgtaagaagtaaagatacagaagaaagattcatagaacatattttcgatgattctaggaattgcagtgaagaattacgttctcaacagcttctgtgtaaagctggtaaagaatactactctgatactttatctaaattatacggtgacgtgaatgggctggaaaaggaaaggcgaagactagaagctttaattaagcaaaatggagatgacttgagtaaagaagttaaagaaaaactgaaaatcattcgtctacaattgagcctattatcacacatagaagaccagttagaagataccagtagtcatgacgagctttga

SEQ ID NO: 78488 - DNA, 273 bp, Saccharomyces pastorianus
atgaatgacgatgaagatagagcccaactgaaggctaggctgtggatccgtgtggaagaacgattacaacaggtgttgtcctctgaggacataaaatacacaccgagattcatcaactcattgctggagttagcatatctacaattgggtgaaatggggagcgatttgcaggcatttgctcggcatgccggtagagatgtggtcaataagagcgacctcatgctatacctgagaaagcaacctgacctacaggaaagagttactcaagaataa

SEQ ID NO: 78489 - DNA, 1047 bp, Saccharomyces pastorianus
atgtctatcccagaaactcaaaaaggtgttatcttctacgaatcccacggtaagttggaatacaaagatattccagttccaaagccaaaggccaacgaattgttgatcaacgttaaatactccggtgtctgtcacactgacttgcacgcttggcacggtgactggccattgccaactaagttaccattagttggtgggcacgaaggtgccggtgtcgttgtcggcatgggtgaaaacgttaagggctggaagatcggtgactacgccggtatcaaatggttgaacggttcttgtatggcctgtgaatactgtgaattgggtaacgaatccaactgtcctcacgctgacttgtctggttacacccacgacggttctttccaagaatacgctaccgctgacgctgttcaagccgctcacattcctcaaggtactgacttggctgaagtcgccccagttttgtgtgctggtatcaccgtctacaaggctttgaagtctgctaacttgatggccggtcactgggttgctatctccggtgctgctggtggtctaggttctttggctgttcaatacgccaaggctatgggttacagagtcttgggtattgacggtggtgaaggtaaggaagaattattcagatccatcggtggtgaagtcttcattgacttcactaaggaaaaggacattgtcggtgctgttctaaaggccactgatggtggtgctcacggtgtcatcaacgtttccgtttccgaagccgctattgaagcttccaccagatacgttagagctaacggtaccaccgttttggtcggtatgccagctggtgccaagtgttgttctgatgtcttcaaccaagtcgtcaagtccatctctattgttggttcttacgtcggtaacagagctgacaccagagaagctttggacttcttcgccagaggtttggtcaagtctccaatcaaggttgtcggcttgtctaccttgccagaaatttacgaaaagatggaaaagggtcaaatcgttggtagatacgttgttgacacttctaaataa

SEQ ID NO: 78490 - DNA, 213 bp, Saccharomyces pastorianus
atgcgcgtctcaccttcaaggtcatggtcgctctattgttcgcactaccggcaaactcgcgtctcgcaagtcttggctcattcttctagtatactcatgttgcaaatgcactcaggttctttcggcaacttaaataatgacaccagttgtcgtggtcgtcatcatcgcaaccccaaccggcattcttatggcttctccaatctcgccccttag

SEQ ID NO: 78491 - DNA, 342 bp, Saccharomyces pastorianus
atgaaggcaaaagacaaatataagggtcaaacgaaaaatgaagtgaaaagtgttgatatgatgtatttggctttgcggcgccgaaaaaacgagtttacgcaattgcacaatcatgctgactctgtggcggacccgcgctcttgccggcccggcgataacgccgggcgtgaggctgtgcccggcggagttttttgcgcctgcattttccaaggtttaccctgcgctaaggggcgagattggagaagccataagaatgccggttggggttgcgatgatgacgaccacgacaactggtgtcattatttaagttgccgaaagaacctgagtgcatttgcaacatga

SEQ ID NO: 78492 - DNA, 1239 bp, Saccharomyces pastorianus
atgaaaattgccgtagaaacgacactattcgacttctttgtcatcgatcagtttaaaaaatcgactttttcagcgccaaacaccaaagttgacactattaagggttgtattaataagtttattgaacaatttaatgtatatgatgagcaacacatattttggcaacctcctggaaaatcaaacgtcagattgctgtcaaacaccaatgattttggccaattgggaaactttttgcataaaaaaatcaaatgtaacatttttattggagaagaagcattaaggaagtacgatttggctatctgtggaccttatgacaaatttgtagaaaattctgaccctagcgttaaaaaggttgtgaacagggatgatgtcatattgtcgcgcaaatgtttaaacatcatatcggaacaactctctatacttgagaagtccataagtaaggctcaaaatcaagtgttacagtcaagtgaggttgaaggaaaaaaatgtattatcttgccggaagataaaccagaactcatcaagtttttttctaaatttgaaacgagtgttcagttacaggaggtttacgagggctataaggtatatgaaaagctattacaaaaatttgatgggcaaaaaaaaagaatggagtctttcttgaatgaaaacacgccaatgtcaggtgccgaagctatcaagcaaataaatatatctgaggagctcaaggaaaaaggggaacgtttaacaacaccaaacgatccgttattacacgttgaggtgagtaataaggataactcgctgcactttatattgtacaataaaacgaatatcataattccaggaaattgtacatttgaattttctagccaaatctccgaggtattcagtatcaaaatgggaccgcatgagataggcataaagggtcagaaagagctatggttttttccatcattacctactcctctctccaattacacaatgaaagtcgtaaaccaggatggagatactattctggttggtaaatgtgctgactccaatgaaataactctaaaatctccactagcctcattttcgacaggcagtttccagacaggcagtttccacactttgcaagatcctactaatgttttccgggcagacgcgctttcttcccctgatgaatcaagcatcatgagcactccctttctaggcgagacagatgaagtttataattctggctctacattaagtaggccatttacttgggaagaaatataa

SEQ ID NO: 78493 - DNA, 141 bp, Saccharomyces pastorianus
atgcggtcccattttgatactgaatacctcggagatttggctagaaaattcaaatgtacaatttcctggaattatgatattcgttttattgtacaatataaagtgcagcgagttatccttattactcacctcaacgtgtaa

SEQ ID NO: 78494 - DNA, 1248 bp, Saccharomyces pastorianus
atgaacaactcaaagaccaaccaacagatgaacacctcaatggggtaccccttaaccgtctacgatgaatgtaacaaattccaactaattgtgccaactttagatgcaaatatcatgctttggtgtattggacaactttcactgctgaatgattctaatggttgtaagcatttgttttggcaaccgaatgacaagtcaaatgtccgaatcttactaaataattatgactatggtcacttgttcaaatacttgcaatgtcaaagaaaatgctcagtttatatcggagaaggaacgcttaagaaatataatttgactatttctacatcctttgacaactttttggacctgacgccctccgaggagaaggaaagcttatgtaaagaagacgcacacgaagatcccgtatctccaaaggctggttccgaggaagagataagccctaattccacctctaatgtggttgtgtcaagagaatgcttggataacttcatgaaacaactccttaagttggaagaatcgttaaacaagttggaattggagcaaaaggtcacaaataaagaacctaaccacagaataagcggtgcgattgacataccagaagataggcccgaactagtgaactttttcacagaattgaaaacagtcaaacaacttgaggacgtttttcaacgttaccatgactatgagaggttatcacaagaatgtgacagtaagacggaaatcgcctctgaccatttgaaaaaggaaactaaaatagaagtggaacccccaaatgagcgctcattgcaaatcacaatgaaccaaagggacaattcattgtatttccagttgtttaacaacacaaattctgttttggcaggcaactgcaaactgaagtttactgacgctggcgataagccaaccacgcaaattattgacatgggtcctcatgaaataggaataaaggagtacaaggaataccgatactttccatacgcgcttgatttagaggccggctccactatcgagattgaaaatcagtatggagaagtgatcttcttgggcaagtatggctcttctccaatgattaacttaaggccaccttcaagattatctgcagaaagtttacaggcatcccaagagccattttactcctttcaaattgatacgttaccagaactggatgactctagtatcatcagtacatccatttcactctcttatgacggtgacgacaatgaaaaagccctgacttgggaagaactctag

SEQ ID NO: 78495 - DNA, 870 bp, Saccharomyces pastorianus
atggctctctcttcaaactggcaggcactattagcctccgaaagcaatcctacctccaatggaaagaataagcaatcaaataggaaaatcagaaacgttaacaaagttagcaaaacagtaaatgtcagtagtacaactcaatatgcccctcgaaagcgcaaaaacggcagtaaaattatggacatggtatataacatgaacaaggagattagtaagcatgagaaagacaagctcgagggaaaagtgtttgaattcaacccaaataaagcaaatactagtactactattaaagagccagtaaaagtgggtatttcggaagatactcgtattaatagtaataagagtaaagaaattgggaaatacattgccatggattgtgaatttgtaggcgttggtcccgagggtaaagagtctgcgttagctagaatatcaatcgtaaattattttggacatgtcgtcttcgatgaatttgttaagccaagagagaaagttgtagaatggagaacttgggttagtggtattaaaccagagcatatgaaaaatgccattacattcaaagaagctcaaaaaaagactgcggatattctggaaggtagaattcttgtagggcacgctttaaagcatgatctcgaagcattgatgttatcccacccaaagtcactactcagggacacttcaagacacctcccattcaggaagttgtatgctaagggtaaaacacccagcttaaagaaattaaccaaggaggttttaaaaatttccattcaagaaggtgagcattcttcagtcgaagatgctcgtgccaccatgctattatataaaaaggaaaaaacggaatttgaaaaaattcacagaaacactttcaactaa

SEQ ID NO: 78496 - DNA, 207 bp, Saccharomyces pastorianus
atgggtgctgcttatcatttcatggggaaagctattcctccacaccaactagccattgggacattaggactgctaggtttattggttgttccaaatccttttaaaagcgcaaagccaaaaacagtcgacatcaaaacagacaacaaagacgaggaaaaattcattgaaaactacttaaagaaacattcggaaaagcaagatgcgtaa

SEQ ID NO: 78497 - DNA, 876 bp, Saccharomyces pastorianus
atgtcttctatctacaaagccctcgcaggaaagagcaaagataataaatctgaaaagaagcaaggcaatgtcaagcaatttatgaacaagcaaagaactcttctgatttcgagtagaggtgttaactatagacatcgtcatttaattcaagacttaagcggattattgcctcattccagaaaggagccaaaattggatactaaaaaggatcttcaacagttgaacgaaatcgctgagttgtacaattgtaataatgttctattctttgaggccagaaaacaccaagatttgtatctatggttatccaagccgccaaatgggccaactataaaattttacattcaaaacttgcatactatggatgagttgaattttacaggtaactgtttaaagggttctcgtccggtattgtcgtttgatcaacgtttcgaatcctccccacactaccaattaattaaggagttgctagtgcataattttggtgtaccaccaaatgctagaaaatctaagccatttattgatcacgtcatgtccttcagtattgtagatgataaaatatgggtgaggacatatgagatctcacacagtactaagaacaaagaagaatatgaagatggcgaagaagacatatcattagtggaaattggccctaggtttgttatgactgtcattttgatcctagaaggttcatttggtggtccaaagatctatgaaaataaacaatatgtttcgccaaacgtcgtaagagctcaaattaaacaacaagctgctgcggaggcaaagtctagagctgaagctgctgtggaaagaaaaattaagagaagagagaatgttcttgccgccgatcctttatcaaacgatgccttgtttaaataa

SEQ ID NO: 78498 - DNA, 969 bp, Saccharomyces pastorianus
atgtctatggagcctcctgttgggcttacggctatgcccgtcaccaagctagccatgatcacgacgcttgtggttcccttagttgcctcgattgcaagttacaaacatatatttctattgcaatatgatccttttctgcagacctaccatcaatactaccgtctgctcatattccagttctgcgccatcaatgaatccgatacagtaatactggcgttgatatggtatctgtttaggcatttagaacggctactaggatcccacaagtacttgaccttgattgttttgtcatgggcctacaccaccttaggaatttggggattgaatctgatctggaacgcatttattggacagtacaagtggcttcaatggaacaattttagtacaggttcactgcccattgttttaagcttagtacatttttacaaagaatacacccctcagatttacgaatggaatataagattactaggacctcgaggaggagcatcaagtcacaatgataacaagcgagaagacaagagcgccgtagagtggaaaatcaacgatcagtttcttttaaatgggttaattctcctgcttatattaaatcaggggtttgcgggaatactatgcggattcataagctggatgtgtggtattttcatcgataagggcctgttaccgggattagaccattggagaataccgtttgtatcctatttcatctctcaaggcccacccacgagggctaacgttgctatagcggccaatgcggccacgaatacagcagcagcaagagccactgtagaagcagctactgctgctacaggaaatggaaatacaggcaactctgggcctacaagcctaccgcttcgtggttcaagcaccacccctacaaatacctctaacgctggtgatgacgagcctggtgccgatgaacctgcaagaccactgggagtccaatttttggatacctttaggagatga

SEQ ID NO: 78499 - DNA, 489 bp, Saccharomyces pastorianus
atgcacaatatgtttccagcactcacaaagacactgtcgttgcaaggctacaagattatcaactctcaaacagggtccgctgcatggtcgtgcggtcgtaggtggtttagtagtgataaagatgaccacgacgatgtggtgacgaggattaaaattgcccccataaagagaactaacgagccattggacaagaaaagagctcggttgatacatcaatcacgcaaaagagggatcttggagacggacttgctgctatctgggttcgctgccaaatatttgaagaagatgaacgaagaagaactggaagaatacgattcgctattgaatgagttggactgggacatatactattgggccacaaaaaatttcaaaaccagccccttgcctgacaagtgggccaattctaaattgctgaagcagctacaagaattcagtgaaaataaagagaaggaaattttaagtatgccggacttgtccaagtatcaatga

SEQ ID NO: 78500 - DNA, 1506 bp, Saccharomyces pastorianus
atgtcagaagagagggaagaaaacgagatatctagtgctacgctgaatacgcagcgactttcagcaatgatcgattcactgaacaatgagaaagatgacaggctctttccatctcccacaactaccaggacaatgatcccagaggaaaaggcggatcaaagtgatgtctttaaaccaccatcgagattgttgagatcacctgttggtgacgtttcgctgccacctggtgataacagatcaagtatgatttccaactactctggaattattcaagaaggcgttgaagtatcatatgtggtcaaaaaccggcaacagacccaagaacggcgcacaagtaaggattccaatagtttgtactccttgaaagagcccgtgagcaagaacgagttaccgtcgttgcccatgttgccttcagaagcgacattgacaaaacatctaagtgataaccaaagcacaaaatcgaataccaatgcagacgaaattgtcattaaaccagttactaatgccaaaccggtgggaaggtttaactctaacacttcaaaaaaagtagagggtcgtggctcactgaaactgttatctagtcctctacgtcaggaaaaagttatgcgttcctctattggttcaggtaatttagccagcgagagcggatcttccacttataataccaaattccatcaatctattcaagagcagctcgaagaagaagaggaaggaaatgttagtgataagctttcaattgtttccagtgtcatacccgagttgtatacaacgaccaacgaagcgcccaaagcgataaacccaatacgttctgaaaccaatgactacaatccaactattccgcccagaagtaaggaccgtcctaggtcaaggttgttcatcgaagaaggtgatggcgagggggatcttttaaccgaagaaatattaccaacgccggtccaacctggtggccactataagaactcatctcagatttccacagttagtgaacaaaaatcggaatcttactattctgcggcaacgagtatgcctccagaggaagagacttacttgacaagaccattgcccagcacacccaatgaggatagcagagttacatcgaatttgaaacgtgacgacacattgaaggctattcatgatagggcaaatcatacctctacttcgacaaacaaacaagatgatgacatgtacgaggacatcattgaggaaacgcccaagaaaactaaactcaagaaggatacgaaaaaaaagctcaataaaaaaaaatctgtgaaggaattgcgatcctttgatatcgacacactaaatcaactgttgagtgtgacaaagggaaccttaatcgggtctgaatttgcgcaactggggatgaaaattgaggagaaacgtgccctggagagactagtagactctttgtccaggttaacagcagacatggttcttgatccggaccgctatgaagaaggactgaaaagattagacaaagctacaaaggctcttgaagggttttga

SEQ ID NO: 78501 - DNA, 1512 bp, Saccharomyces pastorianus
atgaacatattgctaatgcaacggatagttagttttattttggtggttagtcaagggcgatactttcatgttggagagctgaccatgacaatgttgaaaagacctcaagaagaagagtcagataataatgctacgaagaagctgaaaacgagattaacgtacccttgtatcctcgggaaggataaggtgacgggcaaattcatctttcctgcaatcactaaagatgatgttatgaatgcaagactgtttttgaaggacaacgatttgaaaacttttttagaatattttttgccagtggaagtcaactcgatctacatttatttcatgataaaattgctgggattcgacgtcaaagataaagaactatttatggcgttaaactctaatatcacttctaataaagaacgttctagtgcggaactatcgtctatacatgcaaaagctgaagatgaggacgagttgaccgatcccttagagaaaaagcatgcagtaaaattaatcaaagatttacaaaaagccataaataaagtccttagtacaaggcttcgattacccaacttcaatacgattgatcatttcaccgccactttgcgtaacgccaaaaaaattttggttctgacgggcgctggagtttccacttctttaggtattcccgattttagatcatctgaggggttttattctaagatccgacaccttggattggaagaccctcaggatgttttcaacttggatatattcttacaggacccttctgttttttacaatattgcccatatggttttaccaccagagaacatgtattctccgttgcacagcttcattaaaatgctacaagacaagggcaaactattaagaaactacacacagaatatagataacttagaatcgtatgcagggatagatcctgataaattagtgcaatgtcacggttcattcgccactgcatcttgtgtgacttgccattggcaaatacctggtgagaaaatattcgaaaatattagaaaccttgaactaccattatgtccctactgttatcaaaaaagaaaacaatattttcctatgagtaatggcaataatacggtgcaaacaaacataaatttcaactcacccattttaaagtcgtatggtgttttgaaaccagacatgacattttttggcgaggccctgccatcgcgatttcataagaccatccgcaaagatatactggaatgcgatctattgatttgtataggaacaagtttgaaagtggctcctgtgtctgaaattgtcaatatggtaccttcacatgttccgcagattttgatcaatagggatatggttacacatgcagagtttgacttaaacctgttgggattctgtgatgacgtggccagtctcgtagctaaaaaatgccattgggatataccgcataaaaaatggcaagatctaaagaagatagattacaactgtacggaaatagataaaggtacgtataagattaagaaacagccacgaaagaaacaacagtaa

SEQ ID NO: 78502 - DNA, 534 bp, Saccharomyces pastorianus
atgagcagcattccagctggcactgatcctgggtcctgcggtgctaatttcaagaatgaccgcaagcgcagagataagatcaacgaccgtattcaagaactattgagtatcattcccaaagacttctttagagattattacggcaattctggtagcaatgacacgttaagtgaatccactcccggtgcgcttgggttgtccagcaaggccaaaggtacagggaccaaggacggaaagcccaacaagggccaaattctcacacaggcggtagagtacatatcacatctacaaaatcaagtggacacacagaacagagaggaggtggaactgatggtgaaggccactcagttggccaagcagacaggcaccattgtcaacgatataaacttagagaacaccagcgctgaagtcgccctgtccaggattggcgtaggaccgctggccgcaacaaatgatgactcagtaagaccgccagcaaagaggttgagctccttcgagtacggaggatatggtgagtacggtaatggtagctaa

SEQ ID NO: 78503 - DNA, 1155 bp, Saccharomyces pastorianus
atgaacaaaacgaattggaaggtatctgtaactacattcaattgtggtaaggaatttcccgttgaaaattcgaaagcaatcgttaaacaattgcttttcccctacgatgacggcatctcccaattggaattgcaagatctatatgtattggggttccaagaactagtccccatatggcaaggctccttccctgctgttaatcgtgatttaatcgatagaattacaaccactgcggttaattgtctgaatgaaaaagtgtcagctacacaaggggatgagcagtattcatgtttaggggtgaatagtcttggagcgattaccataatagtattatacaataataaagcgctaaaggtaaaagatgatattttgaaacggaatgggaaatgtggttggtttggtacacacttaaaaggtggaactttgataagttttcagatgacacgcaatggcgaggagaactgggaaagatttagctatatttgtgctcatttaaatgcaaatgaaggtgtcaacaatagaaatcaaagaatagatgattacaaacgaataatgagtgaagtgtgtgattctgaggttgcaaaaagcgaccactttttctttctaggcgatttgaattttagggttactagtacttatgatccaacttccgattattcgtccaccacaacgttaaggcgtctattagaaaatcatgaagaactaaatctgctacgtaaaggagaggatgaaccgttatgcaaaggttttcaggagctggagataacatttccaccgacttacaaattcatgttgtttgaaaaggaaacatataatacaaaaagaatcccgtcgtggtgcgataggattctctacaaaagctatgcagtgccaactttcgcacaagaaggtacttaccattccgtccctaggtccaatgctctattatttagcgatcatcaacccgttaatcttaccgtaagattaccaaggtctacagggatgccagtgccgttatccttacatatcgaaaagtatcctttatcatggagctctggcctgattggacaaattggtgacgcagtcatcgggtactgcggttggctagttactaagaatgtacattattggatattaggttctttactattatatttactattaaaaatcctgtaa

SEQ ID NO: 78504 - DNA, 2136 bp, Saccharomyces pastorianus
atgagccactttttcgccgatcatgatgctcctctgagcatgctttctgttaaaacagaatactttcctcaattgactgataaggaacaaaaatatgcgcatttcatgtcaaaagcctcccatgcgggttcaagggttgtaatgagacaagtttctcatgagagtgagccaatttttgacctaatccttgccattcattcaaagctagacggcaagtacccagaggacgatattacgcagaagcagcaaacgggtttgtatttggaatacgtttctcaattcttatctaatttgggtaatttcaaatcctttggtgacactaagtttattcctcgttgtgaggtagaattcttcaaacagcttttggagctggccaagattaatccgtgttcttctccgctcactttatctcctgttgacgttaaccatgaattcacatctcatcatcttttttccaccatcaatgagctaattgatattggtatttaccatgtggaagagaaggcggctctcttagggtttccctctcaaggttatacttcagcctattatctgggtttacctgtgacacctgaagatatggctcttttgaaagagcagttgtttgctgaacttgccatcttgcctgaaaacacaagaatcaacaaagttggtgaaaacagtttccaaatctgggttgcctctgagaatgtgaaaaatcagataacagaaacctaccccagtggacagatcacattatccaatgctgtaaccaaagtagaattcatttttggtgatcattcacgtgaaatgcgtttagtagcatcgtatttaaaggaagctcaaaaattcgcggctaatgatactcaaaaagcaatgcttcaggaatacatcaaccactttgtcactggctcttctcaagcacataaagaagcacaaaaactttgggtcaaagatatatctcccgtcattgaaacaaatatcggttttatcgaaacatatagagaaccctcgggcataattggagaatttgaatcgttggttgcaattcaaaacaaagaacgtactgctaaattttccagcttggttaacaacgcagaagaattcatttccttactaccatggtctaaagattacgaaaaaccgattttcaatccaccagatttcacctctctagaagtattaacgtttactggatcgggtataccagcgggcatcaatattccaaactatgatgatgttcggcttaaaattgggttcaagaatgtttctttgggaaatatcttaagcgcggctgccaaaagctcatccaagcatccgccaagttttatatcgcaagaagatcgcccaatttttgaaaaatatcaaagtgattcttttgaagttcaagtaggcatccatgaattattaggacatggttcaggaaagttgttgacagaatttacagacggctttaattttgataaggaaaaccctcctttaggtttggatgggaaaccggtgagcacatactacaaagttggtgaaacttggggttccaaatttggacagttagctggcccatttgaagaatgtcgtgcggaagtaattgccatgtttttgcttactaataagaagattcttgatattttcggtttccatgatgtcgaatctcaagataaagtgatctacgctggatatctacaaatggcccgtgcgggtctcctagctttagagtactggaatccaaaaactggtaagtggggacaaccacacatgcaagcaagattttctatcatgaaaacatttatgaagcactctacagataagaatttcttaaagttggagatgaacagcacgaatgatgattttgccatcaagttggataaatctctcattaaaacagcgggacatgaatgtgtgaaagactatttaaagcatttgcatgtttacaaatgttcaggcgatgtggaacagggaagtaagtactttattgatagatcaacggtgacaccggatttggcgtctttaagagacatcgtcttatctaagagattgccaagaagacaattcatacaatcgaattcttatattgacgacaataacaaggtaaccctgaaagaatatgatgaaactccacagggtatgctccaatctttccttgatagagaattatga

SEQ ID NO: 78505 - DNA, 912 bp, Saccharomyces pastorianus
atgactgttactgacacttttaaactgtttattttaaggcatggtcaaagtgaattaaactcagaaaacatattctgcggatggattgatgctcaattaacggaaaaagggaagtctcaggcccgccactctgcaaaattgatcaagcagttttgcgattctaacaatatttctttgcctcagattggctatacttcaaggttgattcgaactcagcagaccatggacgttattctcgaagagttgggactaaaacacaccaattatgtaattactacgaatacaaacattaaggagaagctgcaggacacaagatttgaaggaagtatgcctgtgttgcaaacctggaggttaaatgagcgtcattacggcgcatggcaaggacaaagaaagccggatatcttgaaagaatacggtaaggaaaaatacatgtatatcagaagagattacaacggaaaaccccctaaagtcaacctaaacctggaaatggtccaagaggaaaatgatcaggggtcctccacaggctatgattttaaggagcccaatagacacttaaaatacggccccgaagagaaggctaatgagcgtctgccagagagtgagtctctttgtgaagtggtcgtcagattgaaaccatttttaaataatgttgttctgtctaccgccaacaaaatcagtcaagaatcgtgtgttatagttgggcatggcagctctgtaagatctctgctgaaagtattggaaggtatctcagatgaagacatcaaagatgttgatattcccaacggcattccgctagttatagagttggatagagacaattactcttttgtgaggaaattttacttggatccagaatcagctaaagttaatgctcaaatggttcgtgatgagggtttcgaaaagaatccatga

SEQ ID NO: 78506 - DNA, 1656 bp, Saccharomyces pastorianus
atgacctattctacagttagcatcaacacgcctccaccatatcttactttagcctgcaacgaaaagttgccaacagttttatccattgctggaacagatccaagtggtggagccggtatcgaagctgatgtcaaaactatcacagcacacagatgttatgccatgacatgtatcactgctttaaatgctcaaactccagttaaagtctacagcataaataacacaccaaaagaagtggttttccaaactttggaatccaatttaaaggatatgaaatgtaatgttatcaaaaccggtatgcttaccgcagctgctatcgaagtcttgcacgaaaaactgctgcaactcggcgaaaatagacctaagttggttgttgatccagttcttgtcgctacttctggttcttctttagctggaaaggatatagttagtttgattacggagaaggttgcaccttttgctgatattttgactcctaacatcccagagtgttacaaattgttaggtgaggaaagaaaggttgacggattacaggatattttccaaatcgcaaaagaccttgctaaaataaccaagtgttcgaatatactagtgaagggtggccatattccatggaatgatgaaaaggaaaagtacattaccgacgttcttttcttgggtgctgaacaaaaattcattatctttaaaggcaatttcgttaacaccacgcatacacatggtactgggtgcacactagcttctgccattgcatcaaacttggctcgtggttattctcttcctcagtctgtttatgggggtattgaatacgtccaaaatgccgtggcaattggttgtgatgtcacaaaagaaactgtcaaggataatggaccaattaatcatgtttacgccgtggaaattccattggagaaaatgctcagtgatgaatgttttactgcatcagatgttatacctaaaaagccgctcaaaagtgctgctgacaaaatcccaggcggtaatttctatgaatacctgatcaatcaccctaaagttaagccacactgggattcctatattaaccatgagtttgttaaaaaggttgcggacggtacattagaacgtaagaagtttcagttctttattgaacaagattatgcatacttggttgattatgctagagttcattgtatcgcgggtagtaaagctccatgcctagaagatatggaaaaggagctagtcattgttggaggtgttcgtactgaaatgggtcaacatgaaaagagattaaaagaagtatttggtgttaaagatcctgattactttcaaaagattaagagaggacctgcattaagagcttactctcgttactttaacgatgtttccagaagaggtaactggcaagaattggttgcatcccttactccttgtttgatgggttatggtgaagctttaactaaaatgaagggtaaagtcaccgcacctgaagggtccgtttaccacgaatggtgtgaaacttacgcatcttcatggtatcgtgaagccatggatgaaggtgaaaaacttttgaaccacatcttagaaacataccctccagagcaacttgacactttagtaacaatctacgctgaagtttgtgaattagaaacaaatttttggaccgctgcgctagaatacgagtag

SEQ ID NO: 78507 - DNA, 1221 bp, Saccharomyces pastorianus
atgggcgacgaattacacaaccgtttacttcaccaaaacgatggcaccaaggacgccatactttataagataatagaatcgttagtttgctccatctgccacgattatatgtttgtaccgatgatgacaccttgtggtcataattattgctatggttgtctgaacacctggtttgccagcaataatcaaaaagaattggcttgtccgcagtgcagatctgatattaccaccattcccgcattgaatacaacgttgcaacagtatctatcattcattttagagaaattaagggaccagaatgatgaatcttttaaaaaacttttaacaactaaaaccaaggaggaaaatgattacaagaatgacaaggaaaaggacacattgtttgacaaagtatttaagaatagcgcattggcagtggccgacgactcggatgatggtatcacacgttgtagtaattgtcattgggaattagaccaagacgaagtagaggacggaaatgtttgtccccactgcaatgccagaatacggaattacgcaggtggtcgcgacgaatttgatgaagaagaatacagtgaaggagagttggatgaaatccgggaaagcatgcgtaggcgtagagaggatcgatttgcgtctaccaatccgtttgctaatagagatgatgtaagttctgaagaagatgatagcagtgaagaggagcccatgcgagaacatatcccactaggccgttgggccaggtcacataatcgtagtattgctgtggatgctgtggatgatgaagacgacgaagaagaggatgaggaagaagaagaggagatggattccgatttgaaagattttatagaggacgatgaagatgacgaagatgaagatggaagtaggaggaatttggtattgtctgcactcaagaacagacatgtaattattactgatgatgaggaagaggagcaacggcgacatgctacagaagaggaagatcgcgatagtgacttttacgagcataatgatgatggttttgtaagtggtgatagccttgatgaggatcagaaggaggttacacagatacaatcgagttctgattccgaagatcgttcactttcgtattccggctccagcgatgtcaaggataacaatgacgataacacggaagaattagatgacccacaaccgaaaaggcagaaacgcttccgtgtagttctaggagacagtgacgatgaataa

SEQ ID NO: 78508 - DNA, 1191 bp, Saccharomyces pastorianus
atgactgtcaccataaaagaattgactaaccacaactacattgaccacgaactatcagccactttagactcaacggatgcgttcgagggtcccgagaagttgctggaaatctggttcttccctcacaagaagtccatcacgaccgaaaagacattaagaaatattggcatggatagatggatcgagattttgaaattagtgaaatgcgaagtcctttccatgaagaagactaaagaactggatgcctttttgttgagtgagtcttcactcttcgtcttcgatcacaaattgacgatgaagacgtgcggtactacaaccacattgttctgtctcgaaaagcttttccagatcgttgagcaagagttatcgtgggctttccgcacaacacaagggggcaagtacaaaccatttaaagtgttttattctagacgatgtttccttttcccctgtaagcaagccgctatccatcaaaactgggctgacgaagtcgactatttgaacaaatttttcgacaatggtaaaagttattccgtgggaagaaatgacaagagcaaccactggaacctgtacgtcaccgagacggaccgctccacacctaagggaaaggagtacatcgaggatgacgacgaaactttcgaagtactgatgacggagctggacccagaatgcgctagtaagtttgtttgcgggcctgaggcatccacaaccgctctcgtggagccaaacgaagataagggccacaacctcggctaccaaatgactaaaaatacaaggcttgacgaaatatatgtcaactcggcccaagactccgatttatcatttcaccacgatgcatttgcattcacgccatgtggatactcatccaatatgattctcgctgaaaaatactattacaccctgcacgtgactccggaaaagggttggtcctacgcctctttcgaaagtaacatacccgtatttgacatttcccaagggaagcaagacaacttggacgttcttctacatattctgaacgtttttcaaccaagggagttctcgatgaccttttttaccaaaaattatcagaaccaatccttccaaaaactactaagcatcaacgagtcactgcccgactacatcaagttagacaaaattgtttatgatctggacgactaccaccttttctatatgaaattgcagaagaaaatatga

SEQ ID NO: 78509 - DNA, 321 bp, Saccharomyces pastorianus
atggaaacttcaaatgttcaagtagcacttgtccaattattccaatcccatacattgaattgttctgaactagtcccagaagttaaaaatggagcttcatttgttacttcttgtttttcactagttgtggctcctgattttgtcatgaatgggtcatcaggagaatctactttaatttttttagaatcactcattatatttgaatctggtgatagcaccgaggctatcgaatcttgcgggcttatttctaatacgctggcttttctttttcttgggttgccgacatccatattagaagatgtggacggcgatgatgaatga

SEQ ID NO: 78510 - DNA, 1476 bp, Saccharomyces pastorianus
atggcacactatccaccttccaaggatcaattgaatgaattgatccaggaagttaaccaatgggctatcactaatggattatccatgtatcctcctaaattcgaggagaacccatcaaatgcatcggtgtcaccggtaactatctatccaaccccaattcctaggaaatgttttgatgaggccgttcaaatacaaccggtattcaatgaattatacgcccatattacccaagatatggcccaacctgattcttatttacataaaacaactgaagcgttagctctatcagattccgagtttactggcaaactgtggtctctataccttgctaccttaaaatctgcacagtacaaaaagcagaattttaggctaggtatatttagatcagattatttgattgataagaaaaagggtactgaacagattaagcaagtcgagtttaatacagtgtcagtgtcatttgcaggccttagcgagaaagttgatagattgcactcttatttaaatagggcaaacaagtacgatcctaaaggaccaatttataatgatcaaaatatggtcatttctgattcaggataccttttgtctaaggcattggccaaagctgtggaatcgtataagtcacaacaaagttcttctacaactattgatcctattgtcgcattcattgtgcaaagaaacgagagaaatgtgtttgatcaaaaggtcttggaattgaatctgttggaaaaatttggtaccaaatctgttaggttgacgtttgatgatgttaacgataaattgttcattgatgataaaacgggaaagcttttcattagggacacagagcaggaaatagcggtggtttattacagaacggggtacacaaccactgattacacgtccgaaaaggactgggaggcaagactattcctcgaaaaaagtttcgcaataaaggccccagatttactcactcaattatctggctccaagaaaattcagcaattgttgacagatgagggcgtattaggtaaatacatctccgatgctgagaaaaagagtagtttgttaaaaacttttgtcaaaatatatcccttggatgatacgaagcttggcagggaaggcaagaggctggcattaagtgagccctctaaatacgtgttaaaaccacagcgggaaggtggcggaaacaatgtttataaagaaaatattcctaattttttgaaaggtatcgaagaacgtcactgggatgcatatattctcatggagttgattgaaccagagttgaatgaaaataatattatattacgtgataacaaatcttacaacgaaccaatcatcagtgaactaggaatttatggttgcgttctatttaacgacgagcaagttttatcgaacgaatttagtggctcattactaagatccaaatttaatacttcaaatgaaggtggagtggcggcaggattcggatgtttggacagtattattcttcactaa

SEQ ID NO: 78511 - DNA, 321 bp, Saccharomyces pastorianus
atgttttttaaagtctccaattttacttcactaacattactgtcgctaattcctattgtaggaccaatcttggcaaatcaactaatggccccaaaaagaacctttacctatttgcagaggtactttttactaaagggattcagtaagaaacaggccaaagattttcagtacgagcattacgcaagtttcatatgtttcggtatgtccgccggtctactagagttaatacccttcttcacaatagtcaccatatctagcaacactgttggtgcagctaaatggtgttcttcgctactaaagggtgaaagaaagaaggaatga

SEQ ID NO: 78512 - DNA, 675 bp, Saccharomyces pastorianus
atgtctgaatcaaagtttattttcttgatattcaataacgatagcatgtgtaaatcggaagctctttcgaaggaattattttccaatgctaaatttagcaagaataacaagttttctaactcggacttggctggattcagtttactggcagtatcattatcaggcaacaccattaaggacgttgctctctgtatcacgggtctactagcaggagatggcatattggatactaatggtgaaattagagacccatttaacggatctcgcgatgctgataacgtggcagtctctgttaagtttcttgtgtgtctaagtgagggggggtatgctattacgggtgcttttttcttcaactcatgtaagatgtcaggactgtttaccattatttccaaagaccttcttaagatggtcaaccttactcccagtgagtttggtgatatgggattatacgaaaatgcatgcggcgactcattaggtacagcaacaaggtccgaacgatcatcatcactgaatgttgacgaaaacgaatcgacggacgaggaagcgtgttggtacaagcatggaggtttagagagccctaccaacggggtatttttagaatatgaaatgtcggcaggagcggctgcactaaccgggtatgtcattgtgttctttgtttatgattctttactttaa

SEQ ID NO: 78513 - DNA, 3306 bp, Saccharomyces pastorianus
atgacatacccggttagtgcagccgctcctgccgacatttcatattctaaaaataccccgttggtagggctctctaaacctccatgcttgtaccaacacgcttcctcgtccgtcgattcgttttcgtcaacattcagtgatgatgatcgttcggaccttgttgctgtacctaatgagtcgccgcatgcattttcgtataatcccatatcaccaaactcactgggagtaaggttgaccatcttaagaaggtctttggaaataatggtaaacagtcctgacatcttacatgagttgaagaaaaaagcacccgtaatagcataccccccctcacttagacacacaagaaacttaacagagactgccacgttatcagcatcgcgagatccgttaaatgggtctctaatttcaccattagtatccaatatgccatctcctgctagtagacccgtgatacagagagcaacgtccttaatggtgttgcctgataatgatactgccagtaaactgaatccagccaagtccgagttagaaaacttgttattcttgctaaatttagcattggaaaataattccttcgaaagagcttccgatttacacatgctatcgttattgaatatcaagaaaataaactttgattcagacattcaaaaatcagaaactttgaaaaaggttttattagatagtttagcagaaccattttttgaaaactacaagaagttccctcacaaagatttaggttcgaaatcgcaatataatgaatatgaggagaaacacgatgatatagtctccttagcagacatcaaaccacaacaggactatagccgaattcttcatcctttcacatctgcaaaaaattctggtccagaggccatttttacatgttctcaacaatacccttggaacttcaaagctgccaatgatttggcgtgtctaacgttcggtatatcaaagaatgttatcaaggcacttactttactagaccttattcatacggatagcagaaattttgttctagagaaaatcatgaatgcagaagatgataaccaagaaattgtgtttaccggagaaactatacctatcgtccagccaaattcgacaagcaataataatgtaccaaatctgatttgggcttcactatgggccaagcggaagaatggcctactggtctgcgtatttgaaaaaacgccttgcgattacattgacgtcatgttaaacttgagagatttttcagtggacagcattattgatacaacacactttctggaaaactttgacaagaaaaagcagcaagaatcaacttcgccaatgacagaaaagaaaacggtaaaatttgcaaatgaaattcacgatattgggtcagtaagtcactcactgagtaaactaattgatgatgtacgttttggaaaagtgttttctgcagatgatgatttattacccttgtctatcagggtggcaaatcatgtcaacgaagagagatattttacgttgaattgtctatctgaaaatataccatgtgctgttacaacttccgtattggaaaacgaaataaaattaaaaattcatagtttgccctatcaggctgggctatttattgttgacagtcacactttaagtcttttaagtttcaacaaatcagtcgccaaaaacatgtttggcttgcgacttcacgagttggccggtagttcggttactaagttggttccttctttggcggacatgttatcttatatcaataaaacttatcctatgttaaatatcacattaccagaaaataaaggattggttttaacagaacattttttcagaaaaattgaggctgaaatgcatcatgataaggactcgttttacacttctattggtctagacggctgtcacaaagatggtaatttgataaaggtggatgttcaattacgggtcttgaatacgaatgctgtattattatggattacacactcaagagacgtggtcattgaaaattataccaccgttccttcgcagctaccgatgttaaaggagaacgaaattgatgtcgttggcagtagaggtagttccagtgcatcttccaagaaatcttcggaaaaaattcctgtgaatactttgaaggcaatggctgatctgtcgattagctccgctgaaacgatttctaattcagacgatgaagtagacttaaatcaagtgaatgaaaaactacgagaaacttcttgcggtaaagtgagaggtatcgaatctaatgacaacaataactatgacgatgacatgacaatggttgatgatcctgagttaaaacataaaattgaattaacgaaaatgtacacgcaggacaaatcaaaatttgtaaaggacgacaactttaaagtggatgaaaaatttataatgagcataattgaaccgattaacggagaagaaatcaaaaaggaaacaaatgagctagaccaaagaaattctactttaaaagctacatacttgactactccagaggctaatataggctcacaaaagcgcataaagaaattttctgattttaccattctgcaagtgatgggtgagggtgcgtacggtaaagtcaatttgtgcattcataacaaagaacactatatcgtggtcatcaaaatgattttcaaagagaggattttagtagacacatgggtgagagatagaaaattaggtactataccttctgagatccaaattatggcgaccttgaataaaaattcccaagaaaatatcttgaagttattagatttttttgaagatgacgattattattacattgaaacaccggtccatggagaaactggtagtattgatctatttgatgttatcgaattcaaaaaagatatggttgaacatgaagctaaactggtgtttaaacaggtagtcgctagtataaagcatttacatgaccaaggaattgttcatagagacataaaggacgaaaatgttattgttgattctcatggctttgtaaaattaatcgatttcggttcggctgcctatatcaagagtggaccattcgatgtttttgtgggaacaatggactatgctgcacctgaagtccttggtggttcctcttacaaaggtaaaccacaagatatttgggctcttggtgtgctactttataccataatttataaagagaatccttattacaacattgatgaaatcttggaaggtgaattaagattcgataaatcggaacatgtcagtgaagaatgcatcagtttgataaaaagaattttgacaagagaagttgataaaagacctactattgatgaaatatatgaagataaatggcttaaaatctag

SEQ ID NO: 78514 - DNA, 1143 bp, Saccharomyces pastorianus
atgagagaggaaagtaggcctaggaagagaaagcatattcctgttgatattgaagaagtagaagttcgatctaagtatttcaaaaagaatgagagaactgttgagttagtaaaagaaagtaaaatcaataaagatttgcaaaattacggcggagtaaatattgactggatcaaggcactgaagccaatagagtattttgaatggatcgaatcaaggacttgtgatgatccgagaacttggggacggccaataactaaagaagaaatgattaacgattctggggcgaaaattcctgagagtttcttacccatatataatcgggtgagattaatgaggtccaaggttaaaaccccggtagatgctatgggatgtagcatgattcctgttttagtttctaataaatgtgggatacctagtgaaaaagtcgatccaaagaatttcaggcttcaatttcttattggcactatgctttctgctcaaacgagggacgaaaggatggcgcaagcggctttgaatatcaccgaatactgcttaaacacattgaaaatagcagaaggtattacgctagatggactgcttaaaattgatgaacctgtattagcaaatctaattcgatgcgttagcttctataccagaaaagccaatttcatcaaaagaaccgcacaattattggtagacaatttcgattcagatataccgtatgatatagagggaattctctcgttacctggagttggacctaaaatgggatatttaacactgcaaaaaggttgggggctgattgccggcatatgcgtcgatgttcatgtccataggctgtgtaaaatgtggaattgggtagaccctattaagtgtaagactgccgagcatactagaaaggagttacaggtttggctacctcactcactgtggtacgaaataaacaccgttttggttggatttggtcaattgatctgcatggccaggggtaagaggtgtgatttatgtctagcaaacgatgtctgcaatgctcgcaatgagaagctaatcgaatcttccaaatttcatcaattggaggacaaagaagacatcgagaaagtatattcgcattggttggacacggttacaaatggaattacaacagaaagacacaagaaaaaatag

SEQ ID NO: 78515 - DNA, 1092 bp, Saccharomyces pastorianus
atgttcactcgaaggtttattccagttgttcagtcaactaagcaaaacatcggtaaatatgtgcgaaaagatgctaggttcactttattaacatacaacatgctctcaccgtcatatatgtggccacaggtatacacatacgttgcagagccatataaaaactggagttataggcacagactgctggagaaagaacttttgaatactttcaaggctgatattatgtgtctccaagaaatgaccgcaagagattatgaagattattggcacgattccataggggtagatgtcaattatgggtccaaattcatttccaagacacccccaaagtattggaaaaaaccggttaaagatatggacggtgtatctattttctataatcttgcaaaatttgactttatatcgtcatcagggatctacttaaaccagctactgaatgttttcaatcaaagggaactgaaatacttatacaataagaaggtaacattaaccgatggtgcttccaatgttattggtgaagacagcttattggatgttttaaaaggcaagaatcaggtatgcttattcgtatctctaagacataaggagacgggtactatttttgtcgttttaaatactcatttgtattggaaatatgacgaagttaagctaacacaatgcatgattataatgagagagttatcaaagatcattaagcagctcttaccgggagatgtaaaaggccaagaaagggtgaagattttattcactggtgatctaaattctacaagagattcgctagttgttaattttctgcaaggtcagatagttagccatggagaccttaatcttattaacccaatgaggccgtatttggatcgttgtgtctatgacgatataccaaaggattattttgtacatacgtgctattcaggaaaattgaagggcatctttgattacgtatggtaccatgattcagattttttactaactaagatcctaaccggtaatgaagtatcagacgaattgctagcgtctaatcagttgggtttacccaatgaaaaccatcctagtgatcatatacctctactaacagaattcaaaatactgtga

SEQ ID NO: 78516 - DNA, 1380 bp, Saccharomyces pastorianus
atgtcctctgcaattgacaatctctttggtaacattgatgagaaaaaaatagaatcttcagtagataagctatttagttcatcctgtggacctattaataaattggaagtcaaaagcaaaacacgtactgtccttcctgattcgaagaaaagggaaagagccgccgaagctgatcaagaagaaaaagaagcaagcaaacctgatgtttcagatgagcaaactgaagaagttgcccttccaaaagtaaagaaggccaaaaaaagtaaaaggaatgacgaggatgaagacttagaagcccgctattatgcgaaactactaaatgaagaagctgaggctgaggatgataaaccaacagtaacgaaaactgatgaaacttcagtaccactgacatcagcagctaagaaagttgatttcaaagaagacgagttagaaaaggcagaaagaactgttttcattggtaacatcttaagtactgtcatcacatctaaaaaggtttataaagaattcaaaaaactttttggtacaaatccgatagcagaaactgaggaatctggtaatgaaaaagaagaggaaagttctaagaaaagtgacaataacgaatttgccattgaaagcataagattcagatctatttcctttgatgaagctcttcctagaaaagttgcgtttgtccaacaaaaatttcataagtcaagggatacaataaacgcttacatcgtctataagaataagtctgctgtaagaaaaatctgctcgaatttgaatgctgtcgttttccaagatcatcacttaagagttgattcagttgctcatccagctccgcatgataagaagcgttcaatctttgtaggtaacttggattttgaagaaatagaagaaagtctttggaaacattttgaaccatgtggcgatattgaatatgtccgtattatcagagattcaaagacaaatatgggtaagggatttgcttatgttcaatttaaagatttacaaagtgtaaacaaagcacttttattgaacgaaaagcctatgaagtcacaaaaacaagaagacgaaaatacaaagaaaccaactaaaaaggcaagaaaattgcgtgtttccagatgtgagaacatgaagaagggtactactattgggaccggcttggatagaaatgggttgacagattcacaaagaaccagagcaggtagagctaaaaagattttaggtaaggctgatagagccactttgggccaagagataactatcgaaggtttaagagcaaagaaaggcgagggttccacccatctaaaaaagaagaaacaaagatccgctacaggtagggttaccaaaagatcgatagcattcaagaaagctcaagctgaaaagagcaagaaatag

SEQ ID NO: 78517 - DNA, 429 bp, Saccharomyces pastorianus
atgtctcaagctgttaatgccaagaagagagtttttaagacccactcttacagaggtgtcgatttggaaaaattgttggaaatgtccactgaagatttcgtcaagttggccccagctagagttagaagaagatttgcccgtggtatgacttccaagccagccggtttcatgaagaagttgagagctgccaagttggctgccccagaaaatgaaaagccagctccagtcagaacccacatgagaaacatgatcattgttccagaaatgatcggttccgtcgtcggtatctacaacggtaaggctttcaaccaagttgaaatcagaccagaaatgttgggtcactatttgggtgaattctccattacttacaccccagtcagacatggtagagccggtgctactacttcccgtttcatcccattgaaataa

SEQ ID NO: 78518 - DNA, 321 bp, Saccharomyces pastorianus
atgaagtacttagctgcttacctattattgaacgctgctggtaacaccccagatgccaccaagattaaggctattttggaatccgtcggtatcgaaatcgaagacgaaaatgtttcctccgttttgtccgctttggaaggtaagtctgttgacgaattaattactgaaggtaacgaaaagttggctgctgttccagctgctggtccagcttctgctggcggtgctgctgctgcctctggtgatgctgctgctgaagaagaaaaggaagaagaagccgctgaagaatctgacgacgacatgggtttcggtttattcgactaa

SEQ ID NO: 78519 - DNA, 765 bp, Saccharomyces pastorianus
atgagtggttacgatagagctttgtccattttctccccagatggacacattttccaagtggagtacgccctggaggcggtaaagaggggtacctgtgctgtaggtgtcaagggtaagaattgtgtagtattgggctgcgaaagaaggtctactttgaagctgcaagacactagaattacgccttccaaagtttccaaaattgactcgcatgtggtgttgtcattttctggtttaaatgcagattccagaatccttatcgagaaggctagagtggaggcccaaagtcacagactaacgttggaggatcccgtgacggtggagtatctcacacgttatgtcgctggtgtgcaacaaaggtacacgcagtcaggaggtgttagaccatttggtgtgtcgacgctgattgccggcttcgacccgagagatgatgaacccaagctttaccagaccgagccaagtggtatatactcttcgtggtccgctcagaccattgggagaaactccaagacggtacgtgagtttttggagaagaattacgatcgcaaagaaccaccagccacagtggaagaatgtgtcaaacttactgtaagatctctgttggaggtagttcaaacaggtgcaaaaaatattgaaatcactgttgttaagccggactcagatattgttgcgttgagcagtgaggaaattaaccagtacgtcacccaaatcgaacaagaaaagcaagagcagcaagagcaggacaaaaagaaaaaatctaaccattaa

SEQ ID NO: 78520 - DNA, 354 bp, Saccharomyces pastorianus
atgtccaagttatcgcgcaaatcaatattggatgaagatgaggacgtagaggagatcctccccaaaacacgaggagatgaacgatccacttgggtgagttcgtcatcgtttgtttcctcctccttaatattttgcaaatgcgtagtaactgttgttgagctcgatgttggtgtggcgctcttgggcatcgtaggcagggtagtaccgttatacacagtgactctattagagccagagttcctgaatctaggtggcgaactatcttggtgttccatgacaaacttttgtgaactttttttttatttcttttcttttttcttctcaaagaaaagaccaaatatcgattctaaatag

SEQ ID NO: 78521 - DNA, 2286 bp, Saccharomyces pastorianus
atggaacaccaagatagttcgccacctagattcaggaactctggctctaatagagtcactgtgtataacggtactaccctgcctacgatgcccaagagcgccacaccaacatcgagctcaacaacagttactacgcatttgcaaaatattaaggaggaggaaacaaacgatgacgaactcacccaagtggatcgttcatctcctcgtgttttggggaggatctcctctacgtcctcatcttcatccaatattgatttgcgcgataacttggacatgttacacgaaatagaaaaatcaaatactaatatttctttatcagctcctaatttgcatgaggaactgggcgttctcagcgataaaggtaacagtaaagaagaattggctttgttaccacctttacctcacacaggagaaatggaaatcactccacaatttgatatcaacgaggctatttttgaacgagatgacatcagccactcttcaaggctagaaccagatgacgtgttagcaaagttagcgaactctactcgagatgctacgggtgaagatcaggggtttgttgtcatgactcatggccacgatgcgtcgacaaacgacgattcgcaattaagcgctactattcttgacaatcagacgtcatttgatctttctaaagctctagagatgactagccattcaaatatttctaatattattaatagttccggttctgagggaagacgttcaaggacaccggtaagcaattccactctgaaaccaaatttatcatctcctgaaagcgcagaacgtgaagcaaacacgactttgtcttcctctacgtcggatcacggggcaacaatgcaatatgatcccaagaaaataataactccagttcctgttttaccttcctctgtccgtgaacagcaacagaacaatgcacctttgagagaaagaagcagatctaattctagtgcactggcatctacactgagagatacgatcatttcaggactgcctcaaaatattaattctgtagaaagaaagttatcaaggaagagtaacaggagtaggaagaatacggtgacttttgaagatcgtcttcagaaattgccacccttaagcacccaaatttcgaaccagtacgccaaggtagcaccagctgagaacaatatcgccttacactttcataacttacctacaccagtatcaaacactcaaacgcctgttacgtttcagtctgaatccggactgacagggggagaaaagaaaatgccttttttgagaagagcatctagtgccctattaagaaagacatctgctaaaaattgctccaatttaaccagaacaaatacacctactttatcgacatcctcaacatttgagtcagatctaaatgctcggcagcccatgctaattcgacgatcttccactattgataataaactacctaggaggcagctttcgtgctcgaagctttattcgcgcctcaattcggacagcaagtttgcgaatagcagtcgagcttcggaggaggtcttagtgtccactccaaatgacacagaacacgtctacagaaagacatctctaggttctaagataaagagaggttttactagaatattgagcgacagtaataatagtaaggaaattctcactttatcacccaaatctatggtgactacggggcctacagaattgtcgttttcctctttatcaaccgtgggaggacatccgacaacgccagtctcaaaagaaaatgatcgagtttcaatagatggcgtgagtacatttaatcgagcatcaacatctcttccacaatcatcaacagacgacatctctccactacgcgaagaaggtaagattaatgttcctaaaagaacgtcaagtagaaagatactgtctaaaaattcaagcaaaaaaaatgtactgcctgaacagcaaacaaagccaagtgaaatatatctggataaagaagccttacaaaattttgttcccgtactctctgtcacagaaggtactcatcgcatcaatcgctcgtcgttacaaacgcaatctaccatcggactatgcattaccaatttaagaaacaaagaaggcatgaagctcaatgccaaggaatacgtggaaatcctggctcagcagcaacgcaaggaagatgaaaggtatgctgttttggaaagaaaatttgcgtcttgtagatggtgcagtgataaggacctgcagtatttgaaaaagaaacgaatttccatgaataagatatggtctgattatgtccgattttaccgtggaaagttgaacaacccatga

SEQ ID NO: 78522 - DNA, 303 bp, Saccharomyces pastorianus
atgcgtgtttaccaccatatatacgtgtatacttatattttgtctgccgttatatatagccaagacctttttccttcatgggttgttcaactttccacggtaaaatcggacataatcagaccatatcttattcatggaaattcgtttctttttcaaatactgcaggtccttatcactgcaccatctacaagacgcaaattttctttccaaaacagcatacctttcatcttccttgcgttgctgctgagccaggatttccacgtattccttggcattgagcttcatgccttctttgtttcttaa

SEQ ID NO: 78523 - DNA, 1611 bp, Saccharomyces pastorianus
atgatcatgttgagaataccgacacggtcttattgttcaccttcgaagctaataaagggcgtaggtctctcaccattgaagaaatctctattatccaagaaaataaaggaagatatccatccttctttacctgttagaactaggtttgcgccttctccaactgggtttttacacttggggtcactgagaacagccctttacaattacctattagcaagaaacaccaatgggcagtttttgcttcgtttagaagatacagaccagaagaggctaatagagggagcagaagaaaacatctacgagattctgaaatggtgtaacataaactacgatgaaacccctataaagcaaagtgaaaggaaactaatatatgacaaatatgtaaaaatattactatcttctgggatggcgtatagatgtttttgttcaaaggagcgattgaacgatttgagacactctgcaatggaattgaaacctccttcgatggcaagctatgatcgatgttgtgcacacttaggggaggaagaaataaaatctaagctagcgcaaggtatacctttcactgtgcggtttaaatcgccagaacgatatccaacgtttactgatcttttacatggacaaataaatcttcaaccgcaagtaaactttaacgataaacggtacgatgaccttatccttgttaagtcggataagttgccaacctatcatctggcaaatgttgtggatgaccatttgatgggaataacccatgttataagaggtgaggaatggctgccctctactcctaaacatatcgccctatataatgcatttgggtgggcttgcccaaagttcatccacattcccttattgacgacggttggtgataagaaattgagtaaaagaaaaggtgatatgtctatctcggatttaaaaagacagggagttttgccagaagctttgattaacttttgtgcgctatttggctggtctcctccaagagatctggcttcgaaaaagcatgagtgtttttcaatggaggaattggaaaccatttttaatttgaatggtttgacgaagggaaatgccaaagtcgatgataaaaaattgtggttcttcaataagcattttttgcaaaaaaggatacttaatccttctacattgagggagcttgtcgacgacattatgccttctttagagtccatatataacacatctaccataagccgtgagaaagtagctaaaattttactgaactgtggtggttctctatcaaggattaacgattttcatgatgaattttattatttttttgaaaagcccaaatataatgataatgatgctgtcacgaaatttctaagcaagaacgaaagccgccacattgctcacttattgaagaagcttggacagtttcaagagggcaccgatgctcaagaagtcgaatctatggtcgaaacgatgtattatgagaacggtttttctaggaaagtcacgtatcaggcaatgagatttgctcttgcgggatgtcacccaggtgccaaaatagcagccatgatagatattttgggcatcaaggaaagtaacaaaagattatccgaaggtttacagttcttgcaaagagagaaaaagtaa

SEQ ID NO: 78524 - DNA, 1266 bp, Saccharomyces pastorianus
atggtccggattcttcccataattttgagcgccctatcttcgaaattagtggcgagtacaatattgcattcatccatacactcagtgccatctggaggcgaaatcatatctgcagaagatcttaaagaacttgaaatttcagggaattcgatctgcgttgataatcgttgctatcctaagatatttgaaccaagacacgattggcagcccatactgccaggtcaagaactccccggtggtttggacattagaataaacatggacacaggtttaaaagaggcaaaactaaatgatgagaagaatgtcggtgataatggtagccatgagttaattgtatcttcagaagacatgaaagcatcgcctgatgactatgaattttccagtgatttcaaagaaatgagaaacatcatagattctaacccgaccttatcttcacaggacattgccagattggaggatagttttgatagaataatggaatttgcgcatgattacaagcacggctacaaaattattacccatgaattcgccctcttggccaaccttagtctcaatgaaaatttaccattaacattgagagagctcagtactagagtcattaccagctgcttgagaaacaatcctcctgtagttgagttcattaatgaaagttttccaaattttaaaagcaaaatcatggccgctctgtcaaatttgaatgattctaaccacagatcctctaatatcctaataaaaagatacttgtccattttaaacgaattacctgtcacatccgaagatcttcctatatactctacggttgttttacaaaatgtatatgaaagaaacaacaaggacaaacagttacaaataaaagtcctggagttgatcagcaaaattttgaaggccgacatgtacgaaaatgacgatacaaatctaattttgttcaaaagaaatgctgagaattggtcgtcaaatctgcaagagtgggcaaacgagttccaagagatggtccagaacaaaagtatagatgaactacatacaagaacgttttttgacaccctttacaacttgaagaaaattttcaaaagtgacatcacgatcaacaaagggtttttgaattggttagcgcaacaatgtaaagccaggcaatctaacttggacaatgggctccaagagagagatactgaacaagactcatttgataagaaacttatcgacagcagacacttgatctttggcaaccccatggctcatagaataaaaaatttcagagatgaactctga

SEQ ID NO: 78525 - DNA, 1470 bp, Saccharomyces pastorianus
atgttactacgttctcttacaagtgccttcgttttgagtgctggtttggctcaggctgctagcagcagtaacagttccacaccatccattgaaattaaaggcaatgcattttttaattcggaatcaggtgaaaggttttatattcgtggtgttgattaccagcctggtggttcttctaacttgactgatcccttagcagacgcatctgtctgtgacagagacgtccccgttctgaaagatctagggataaatactgtcagagtttatactgtggataactcgcaagatcattcccattgtatgaaactattgcaggagaacggtatatacttgatcctggatgtcaatacccccacgagtgctatttctcgttacgatccagcctgctcctataacgctgactacttacaaaatgtctttgccaccattgatacctttgctgattacgacaatgttctaggttttttcgctggtaacgaggtcatcaatagtgttaatactaccaacactgctacttatgtcaaggcagtggtcagggacatgaagaaatacatcaaggctagaaaatacagacaaattccggtaggttactcggctgctgatatcgtcgctaacagacaattggctgctgaatactttaactgtggtgatgaagctgacgctagaatcgacatgtttggtgttaatgactattcttggtgtggtgaatcttcatttgtggtatcgggttattccaccaagatgaagctatatcaagattactccgttcctgtcttcttaagtgaatttggttgtaaccaagtcaagagctctcgtccattcacagaaattgaagctatctattccactcaaatgtcttctgtattctccggtgggctagtctacgaatattccaatgaaactaacaattacgggctcgttcaaattgatggtgacaaggtcactaaattgacagattttgaaaacttgaaaaatgaatacagcaaagtatccaacccagaaggcaatggtggttacagtacttccaacaactattctacatgtcctgattatgaaaagggtgtctgggaagctaataacactttgcctgctatgccaagtgctgcttctgcttacttcacatctggagcaggttctcctatgggaaccggaatcgccacccaacaaagttgtgatgctaaggacgatgacgacgaagaagacgacgacacctcctcttcatcctcttcttcctcttcatcttcatcttccgcttcttcatcttctgcttcttcatcttctgaatcctcatcctcggcttcaaaggcatcttcctcctccccttccgctagcgaaacgagcttgctaaaatctgccgcatctgctacttcgtccagccaatcgtcctcgaaatcaaagggtgctgccggaattattgaggttcctttgatattccgtgctttggcagaactttataacttggttttatga

SEQ ID NO: 78526 - DNA, 738 bp, Saccharomyces pastorianus
atgagtcaacgaaggtctgtagtagcagttagcgtaaagcccaaaggcttcaaattggggcataaacagggttccatgtctacgacgtctccacctccatcctcaccagatggaaatgtgagtacatcaggaccgtcagctattaagttatccaagaattgggagttaccacagcgcctaaaaccgggccgcaaaccgaaatccaagcgcggggatgcatcagctaataatgatggatcgtccaagataaagaaggttcaaacttccaaccagaaagaccaaatgaccacaaaagatcatgagaacgaaggcgcaaaaggtcacgggggaaaatctgatgatgaaggcaacggaagtggtgatgaaaacggtgtcgatagcgtggaaaagcgaaggaggcaaaatagagatgcgcaaagagcatatagggaacgcagaacaacaagaatccaggttctggaagaaaaggttgagatgctacacaatttggtcgatgattggcaaaggaaatataaactgctggaatctgagttttccgatacaaaggaaaacttgcaaaaatcaatagcattaaacaacgaattgcaaaaagccttgcctttgattgttaatactccatttcaacagcagccagagaacccgccagacaatcctatttcgatattagaaatggtagaaaacttcaaaccaatcggcgctgtcagtttaaaaaaaggaaagctgaaggcccattgttaa

SEQ ID NO: 78527 - DNA, 342 bp, Saccharomyces pastorianus
atgacagaggttgtgggattctgggagagcgtgtcagatgacgaatcagaagacaaagactgtatggaggtgcagaacacagtgagtgccgatgagagcccacttgtgcagagccttgtatcctttgtaggctcgtgctccatcaacctacttttgcctttcctcaacggcatgatgctcggcttcggcgagctatttgctcacgagctctgctggagattcaattggtttaaccatagaaacaaggggtataaggtgtacccagagtcgcgcaaaatagcagcattgaaagagatttcaagccctggcacccgtgggagggttgcgtccaagttcctttaa

SEQ ID NO: 78528 - DNA, 519 bp, Saccharomyces pastorianus
atgtcaaaactatcgtcttatcctcatgctgccgattttataaatatggaagaaccgccaaaatctaaagagtttttcgatgatctttgtgccgtccctaatttactcaaaagacgttttccaaactctcgaagatcgacgcattattgtgaggctttaaattattctaggaaaaagcttcctgttgtgttgtctaaaatgacactgcaagagttgaggcacaatatgtcaacattttttttgcaggaaaaggatcaaataaatatttatgacacctgtaaggtgatagacatgggagaccgtgtcttggtcgaaactatgcctccacagccaagagatttatttgaaaaattgcatgcaagtaaaacaaatttaatagttgagacagcagctttggatgaacccctacttacagtaaaagcagagctacagtcatcttcctttccacaaaaatcaagcctatttctgtatgaggattataaaaaatttatttatcaacaactagatatgtttagttaa

SEQ ID NO: 78529 - DNA, 2031 bp, Saccharomyces pastorianus
atgctcagaagacacggattattctggttaaagacatgtccccgtctaaatgttcttctaaatcaatccataccgatacctcatttacttcatagccgtgatatttgccagcaaagatggtatgcaaaagggaaaagaaggaaccagatttccaagaaagagttaaagcctctcaatttttctattccgaattatatttctgtaaataaattagccaatttgttaaattgtcgtgtggaaagattaatcaaagatttgacagcattaggtttcgaaaatattacaaccacgtatatattatcaaaagaatacgtcgaattgattttacaagaatacaactttgcccttccgaatctgtcaacgtctacaaatttagataatgtttatgatgagctaaaatctcctgtaaacccaaaattattaaccaaaagagcccccgtggtaactataatgggccatgttgatcatggtaagaccactatcatagactatctaaggaaatcttctgttgtggctcaagaacatggtggaatcacgcaacacattggtgcctttcaaataacagctccgaagtctgggaaaaagatcacatttttagacacccctggccatgctgcctttttgaaaatgagagaaagaggtgcaaatattactgatattattgttttggtggtatctgtagaagattctctgatgccccagacattagaagccataaaacatgccaaaaattcaggaaatgaaatgataattgcaataacgaaaatagatagaattccacagccaaaagaacgtgaaaaaaaaattgaaaaagttataaatgatttgattgttcaaggaataccagtagagaaaattggcggagacgttcaagtgatcccgataagtgccaaaactggtgagaacatggaccttttagaggaatcaatagtcctattaagtgaagtaatggatataagagctgaaaactcccctaaaactatcgcagagggttggattatcgaaagtcaagttaaaaaacaggtcggaaatgtggcgaccgtcttggttaagaagggcactttacaaaaagggaaaattctaatttgtggtaatacattctgcaagatcaaaaatttaattgatgataagggcataccgattcttaaggcaacaccatcatatgctacagaggttcttggttggaaagatgtaccccatgttggagatgaggtcattcaggtaaagagcgaagcgatcgctaaaaagttcatcagtaaaaggcaagatcttatcgaagttcaaaaaaactctagtatcgttgaaaaattaaatgaagaaagggcccttgccaaagagcaacacctaaataaggaattggaacatgagaatactgtccaggaacacgaacaaaatactggtcctaaacttattaattacatcatcaaatgtgatgtctctggctcagcagaagcggtttcagaaagcatttcctctctaggaaatgacgaagtgagatgtaatgttatctcttcttctgttggtatacctacggaaagtgacttaaagatggcgcaaataacggagagtacaattctatgcttcaatttggggaatttgccgagtgaggtgatcaacaatcgtgctggcatcaaaataaaacagtacaatgttatctataagctaattgaagacgtcactgaaacactaactgaaaatctaaagcccatctttgaaaaaaagatcgtttcaactgttgacgttcgtgaaacctttgactttagattaaagaaaaaaattattaagattgcaggttgcaaagtaaacaacggtgtcatcaaaaaaaattcattggtgcaggtagttagaggtcctaacgaagatgtaatttttgatgggaaaatctcaactttgaagcacaataaagatgacgtagcagaagtttcaaaagggcatgaatgtggaatcacttttgagagtggattcgagggtttcaaaccaggtgataagatcctagtttatgaaaacgtgcgagttcctcgttacttgtaa

SEQ ID NO: 78530 - DNA, 1227 bp, Saccharomyces pastorianus
atgtctaaaatagaagagctaccaccatcagatactgatgaccattcgtattctagtaaaccgggagatgtatttttagcatttgtggacgcacctgttaaagagactgatgacatattagttgaagatagctttattggcggtgaacctaagtggctacatccggattctgaaccacctgctgaactattgaaatgtggtgcttgtaaatcagcggataatatgaagctgttactacaagctttttcgcccttagatgatgagcagatgagtgccatacaacaacgtcttggtatcaataatatgagctatattaatccccaggatgacagagtattatatgtcttcctgtgtaccgaatgtcaaaggaagggcaattctgttcgctgtatcagaggagtaaagaagaataaaaacgttgatagcctttccgaaaaaatggcttcaacttcattggaaaaagacttccaaatcaatccctttgacttgtcgaataattcagattctaaatgtaatgctttttcaagcaacccatttggcggtgcaaatgctaacccttttggagctgatagcattaattccaatatatcacaaagcaaggacgaaggcaaaaagaaggaatctgctaccgtttctgcaaagacggcgagaaaactacatgatttacaaaaggacaaagaatacgatggcaataaatgctttaaaagttgtttgttgtacgttgaagaggaaaccttcaaaaataaaaagccagctcatctgcagctgccaaaaaatttaaaaattgataaggaggcactagatttaacaggagatgaggatctcgaaaaagatccgatcaaattggacccgaggacagaaaaattatccaagtttcttgatgacgacacattccaaaaattccaagaagtggttggttacaacccgcttcaagtattacgttatgacttaggcggaaaacctttgctatatgccgaaacaaaagtcgatattttaagcactgtgccaagaccgggctacaacccatcgagccaaagaatctttgaaatgcagttaatgccaaagatgatttttgatctggaagaagtagtgtctgtcgataacggcatggaatggggtaccattcttgttttcactgatgttgaaaattacatgcctgaatttgatgaacatggtgtcggttatgtagaagaatgtgtcaaagttcagtgggaatcgagaacgtga

SEQ ID NO: 78531 - DNA, 1779 bp, Saccharomyces pastorianus
atgaccgaagactttatttcttctgtcaagcgttcaaatgaggagctgaaggagcgaaaatctaactttggatttgtagaatacaaatccaagcaattaacatcatcctcatcacacaattcaaactcatcgcatcacgatgatgaccaccaacacggcaagaggaatattttccagcgatgtgttgattctttcaagtctcctctggacggctcgttcgacacaagtaatttgaagaggactctgaaaccaaggcacttaatcatgattgccattgggggcagtataggtactggtttgtttgtcggtagtggtaaggcaatcgccgaaggtggtcctcttggtgtcgtcattggttgggctattgcaggctctcaaatcatcgggacgattcatgggctaggtgaaatcacggtgcggttccccgttgtcggggcctttgccaattacggcacaaggtttttggatccaagtataagttttgttgtttcgaccatatacgtgctacagtggttttttgtattacccttagaaatcattgcggcggcaatgaccgtacagtactggaactcgtctattgaccccgtaatttgggtagccatcttttatgctgttattgtttccataaatttgtttggtgtacgaggttttggggaagcggaatttgcattttccaccataaaagcaataacagtttgcggattcattatattgtgcgttgtcctcatttgtggtggaggtcccgaccacgagttcattggcgccaaatactggcacgaccctggttgtttggccaatgggtttccgggcgttctatctgttcttgttgttgcttcgtattctctcggtggtatagaaatgacgtgcctggcatcaggtgaaacggaccccaaaggcttaccaagtgctatcaagcaagtgttttggaggatcttatttttctttttgatatcactgaccctggtaggattcctggttccatatacaaaccaaaacttactgggtggttcatctgtggacaactcaccttttgtcattgccataaaattgcatcacattaaagccttgccctccatcgtcaatgcggtcatccttatcagtgttttgagtgtaggtaactcctgcatcttcgcttcaagtagaacgttgtgttcgatggcccaccaaggccttattccatggtggtttggttatatcgaccgtgctggtaggccactggttggcattatggcaaattcactatttggattactagcatttctggtcaaatctggctcgatgtctgaagttttcaattggttaatggccattgccggcctggccacgtgcattgtctggttgagcatcaacctgtcacatatcagatttagactggcgatgaaggctcaagggaagtctctggatgaattagaatttgttagtgctgtcgggatttggggatcagcgtattccgctttaatcaactgtctaatcttgatagctcaattctattgttcactatggcccattggtggctggaccagcgacaaagaaagggctaaaatattttttcaaaattatctgtgtgccttaatcatgttatttatattcatcgtccacaaaatttattacaagtgtcaaacaggcaaatggtggggggttaaggcgttaaaggacatagatttggaaaccgatcgtaaagatatcgacatcgaaatagtcaagcaagaaattgccgaaaagaaaatgtacctagattcccgtccatggtacgtgagacagttccatttctggtgttaa

SEQ ID NO: 78532 - DNA, 153 bp, Saccharomyces pastorianus
atgtctaacacctttgttgcagtcgaattctcgtggctgtacgcaatttctcttatcctaccgtgtgaaacaattcgcgtcgcgtgggcgccgaaaagggcttatcacggcacatctgaagaaaagagacggctggctccagctggtatttag

SEQ ID NO: 78533 - DNA, 1656 bp, Saccharomyces pastorianus
atgaagaaaaattcttcggtagttttcttccttgtgggtctatcacaattcgtcactatggcgtttctcattatcggatccattacggctccaattttcaaacaaataggctattctaaatatgatgagatcacatacggtacattcggctactgtaaagagggctcctgctcaaaagcaagttataattatcaccccgatgagctatcagacagtgatagcaactggaaactcaatagcaacgctaggtctatattggggaaaatcatctttatcacacccattgctgctggtcttaattttttgggatttctttgtaccatcatgagcgttttattagttaacgtgctatccagtgatagagttggtagtgcctctgccatcatgttttttgttaatttgacattttccactctaggctttctttctgcttctttgatatgtatcgtggtatttttactgttttacccacatgaaacctggtgttcatgggtcctgataccaggagctgctttatctctactagtaattcctttgatattctcagcttattcaagaagctcaggctcaagggatgatgacgaaaccgaggaactggaagaaaagggcatgctgctgaatgacccatatctaagttcgaagtccgggagattcgatatcgacgctgatagtgaggccaatctccgtggtgattcaagaacgaatttattgggtgacaattttaagaacggtactaatatcactgttgtcccaaatattatttcacacaatcaagatccgaaattatcaaacataaccacttctaccacgtctgatatttctactttcgacaaagaagcaaaggacatggaaaattcaaatggttccggacttaatgaagaagaggacgatggcatggcatatgacaaaaggaggtcaacttcaacgtattctgtcattgaaagtgaaagtggcttgaaaaatgggagtgtttctaataattatgtgagaaacaatggtagtaacaccagcaacaatataaactataaagttccgctaggaaaaacggaaatatcatccagtgcatcattagcgtcctcagactactctcaaagagaggtcataccgcacagaaatccttcgagactactaaacgacatcatggagacttccttcaatgaaccaaacgatagccacatcaacagcatgtcctcctacaacgataaagattcaacgttgacttcaatatcacagagaggtgtcaatccggaagtatacaatcaaatgcctcgagaaacagccgctggtcctgcaaatataaggccgtacgctggtcagccacacccggcgccattagtgtatccccaacaacgactacaaccgcaacaacaccaaccacagcagcaatatcatcaatacaatttatatcaaagaactactcctgctggtccagatccttctaatgttattttacaaagcaatccttatttcaacgttgccccaaaccaagtgccacagcacagaaatccggtaccaggcgtcggttttgctccgaatcctttaccaaaccaaagcccgataacacaaggatataagcctgcctataagaggagaatgcaaaacaaaaacttgccccgagctactacttcactgaacaatccttacggatttaggtaa

SEQ ID NO: 78534 - DNA, 1194 bp, Saccharomyces pastorianus
atgtttagagatagaactaatttatttttatcataccgtaggactttccctcataacataactttctcatctgggaaggcacccttgggcgatgatcaagatattgaaatgggtacatacccgatgatgaatatgtctcacgatatatcggccagattgacagatgaacgaaaaaacaagcatgagaatcacagtgatgcgttaccacccatatttattgatatagcgcaggatgttgatgattatcttctggaggtgagacggttaagtgagcagttggcgaaggtttataggaagaattcgttacctggctttgaagacaagagtcatgatgaggcgctgattgaagatctaagtttcaaagtaattcagatgctgcagaaatgttacgctgttatgaaacgattaaagaccatatacaactctcaatttgtggatggtaagcaattaagtcgagaagagctgatcatactagataatttacagaagatttatgcagaaaagatacaaaccgaaagtaataagttcagagtattacaaaacaattacttgaaatttttgaacaaggatgatttgaaacctatccgcaataaggccagtgccgagaacacgctattattagatgatgaggaagaggaggcagcaagagagaagagagagggtctcgatattgaagattactcaaaaaggacgttgcagagacagcaacagcttcatgacacttctgcagaagcatatttgagagaacgtgacgaagaaattactcagttggcaaggggtgtattagaagtgagcactattttcagggaaatgcaagatttggttgttgaccaggggactattgtggacaggattgattataatctggaaaatacagtggtagagctaaaaagtgcagataaagagttgaataaagcaacacactaccagaagagaactcaaaaatgtaaagtcattttattactaacattgtgcgtaatagcgctctttttctttgttatgctgaaaccacatggcggtggcagtggtggtcgtaataatggtagcaacaagtacaacaatgacgataataaaacagttaataacagtcatgatgacggcagtaatacccatattaatgacgaagagagcaacttgccgagtatcgttgaggtaacagaatctgaaaatgaagctttggatgacctactttga

SEQ ID NO: 78535 - DNA, 1344 bp, Saccharomyces pastorianus
atgcccaaggagtcagaggtcataaattctgaatttcatgtagatgtccaagatccagagcgtctaaacggccaccctgtagcaaaatttatcaataaattaagcggtcaacctgaatcttacgtcaacaggactaattatattttcggtcgaacactgggtgccggttccttcggtgttgtgagacaagccagaaagttgtccacaaatgaagatgttgctataaagatcttattgaagaaggcattgcagggaaacaatgtgcaattacagatgctgtacgaagagctgtccattcttcaaaaattgagtcatccgaacattgtgtcattcaaggattggtttgaatcgaaggataagttctatattgtcactcagctggcaacaggaggtgaattatttgatagaattctgtctagagggaagttcacagaagtggatgctgttgaaatcatagttcagattcttggtgccgtggagtatatgcattccaagaatgttgttcatagagatttgaaacctgagaacgttttgtatgttgataagtcagaaaattcgcctctggtaattgcggacttcggtatagctaaacaattgaagggggaggaggatttgatatacaaagcagccggatcgttgggctatgtggcaccagaagtcctcacacaagatggacatggtaagccttgtgatatatggtccattggtgtgatcacatatactttactgtgcggttattctccttttattgccgaaagcgttgaaggattcatggaggaatgtacagcttcgagatacccggtaaccttccatatgccatattgggataacatatctattgatgccaagcgtttcatcttgaaggcattgagattgaatccagctgacagaccaactgctacggaattgctggacgatccatggattacttcaaagagagttgaaactagtaatattttaccagacgttaagaaagggttttctttgcgtaagaaattacgtgacgctattgaaattgtgaagcttaataatagaattaagagattaagaaatatgtattcattaggggacgatggcgataacgatatagaagagaattccctcaatgaaagtcttctggacggcgtcacacattcgttggatgatttacgtctgcaatctcagaagaaagggggagaactaacagaagagcaaatgaaattgaagtctgcattaacaaaggatgcctttgttcaaatcgtcaaagctgcaacaaagaataaacataaagttttggctggcgaagaggaagacgatagcaagaaaacactgcatgatgatcgggagtcgaagtcagaagactaa

SEQ ID NO: 78536 - DNA, 1761 bp, Saccharomyces pastorianus
atgttcattgaatactctagattaccaggtttcgaaagcatcaatatatcattttctagaggcatgctaagattggctaaatttactaatttcgctacatacaaacaaaaattagagtacttcaggctgttggcaggttcaaacaaatacatccaacgaatcagcgttgctgactttgagagacatccagatgaaatcaattatatttacattatactaatatctattctccaaatggaagagtgtatgccagtcctagttctatgtccaactgtttattgggtacgattccactggcctggaaaatgttccgtgaacagtttgaactttacgaatgaaacgttgaaaagcgctttccatgctgtcttcactccctattttgcactaatgaaaaaagttcttggaaggattaaaaacaacatgttgctatttgcagaacctcatgcaaatttaaataatttgtttgtcaagcatttccacgatctcatatataagagcgtaaaggatgaaaaaaccggcgaggcaattctatatttgagaactaacgttaatgttccaaatgtttttattgacgataaaagagcagtttttcatggtgacggtatgaaaattggaaaatttaccggcaaatttttatgcttttccttcaaacgaacaataagatggtcaaaattagattcagtggattcttttgcggttacgacagtaaattatagagtatctgtaaattgggaaaagacgccaagaaagactttcctttctctagacagtgacaccaaaaatttacactatatatcgaaaaagatattgaataaaaagggaaagaacgccactacatcaaaaacaacaaaaagttcatgcacaagtgagaacgtttgcgatgataaaacattctccgtcgaattcccacttacaacgtcagcaaaaactgaatatttgttgagaagtaatttttctttagaaaaaattaatgaaaacaacaatcctacccttcaagaacttactttaaaccgtacacatcgcttataccgatcaaattttcgcaatgaacaaagcaccacacagaggaagtttgaaaaaatcggtagaactgtctctactgattcaggcaataaactgcttacgtttccggaacaaaaggccacgagagatagtagccccttctcaatcgaattgacacatgcaacagtaatttccagcgacgaaagtgccttaaaagacactactagtcaagcgatagccgaaatgcaacgtataactcctgctattgcaaagacaatctcgagaagaacagcaaattgggtctgctcaaacccagctcctgatccgtatggggaaccttcaacgtggtccagaattttgacccctaatttgaaaataatatcggaatcatcaccatattatccagtccatctagcttcaccaaattctacctttagtagagatcaaagtgtaagaagtgttgtcatgaggagaagttctgtatgtgttgaaaaacaaaatagtttcttcagaaattacgaacatttcaaaaatatattgtcgagaagaattattaaggttaagacatcatgtcctaggctgagcgttgacgtaagtgacaacaaaagagaaaatttatcacaagaacacctcattttaccgaacaaatctagagaaaaagtcaaccgatttaaaaattgcctacatagagttgcagaagcgctcagagctgccaaagaaaactgggatcagcacaatcccaggaactctattcattaa

SEQ ID NO: 78537 - DNA, 291 bp, Saccharomyces pastorianus
atgagtgattttgagataattgttggaatttcatcgttgttacaggttataatattaaatatacaaaatatgctggaagttcttcttgagtatataggaattcacaaaaggagagtcgatatatctacatattatgataatgtttacttcttcttccattttatatgttatcattcattatcctattgcattatcaatcttaggaattctgcttcctttatatgtgattgctgttccttaatcattatgtcaccttcctatgccgtatgtgataatatactagtaacatga

SEQ ID NO: 78538 - DNA, 1656 bp, Saccharomyces pastorianus
atggtgccagaaaatagaaggaaacagttggcaatttttgtagttgtcacatatttgctcacattttattgcgtgtattcagccaccaagacaagcgtttcctttttgcaagtaacactgaagctaaatgaaggcttcaatctaatggttttatcgatattcatcttattaaattctaccttactatggcagctcctaacgaaactattatttggtgaactgaggcttattgagcatgagcacatttttgaaaggttaccatttaccattataaacaccttgtttatgtcctcactgttccacgaacggtattttttcacagtggcattttttggactattactactctatctgaaagttttccattggattttaaaggataggctggaggccttattacagtcaataaatgattccaccacaatgaaaacccttatctttagtagattctcatttaacctcgtactattggcggttgtagactaccagataataacacgatgcatctcctccatatatacaaaccaaaagagtgatattgaatccacatccctttacctgatacaagtaatggagtttaccatgcttttgattgatttgctaaatttattcctacagacttgtttgaatttctgggaattttatcgctcacaacaaagtctgtctaatgagaacaaccatattgtccatggcgatcctacagatgaaaacacggttgagtctgatcaatctcagccagtgctgaatgacgacgacgatgacgacgatgatgatagacaatttaccggcctggagggtaaattcatgtatgaaaaagcaattgacgtattcacaagattcttaaaaacggcacttcatttgtctatgctaataccatttaggatgcctatgatgcttttgaaagatgtggtgtgggatatctcggcactatatcaaagtggcacaagtttgtggaaaatctggagaaataacaaacagctcgacgacactcttgtcactgtcaccgtagaacagctacaaaattctgcaaatgatgacaatatttgtatcatttgtatggatgagttaatacattctccaaaccagcagacgtggaagaataaaaacaagaaacccaaaaggttaccttgtggccacatacttcatttgtcgtgtttaaagaattggatggaacgttctcagacttgtcctatttgtagattgcctgtctttgatgaaaaaggtaatgttgtgcaaacgactttcacttccaatagtgatatcacgacacagaccaccgtaacagatagcactgggatagcgacagatcaacaaggtttcgcaaacgaagtagatctacttcccacaagaacaacttcccctgatataaggatagtgcctactcaaaatatagacacattagcaatgagaacaacgtcaacctctacaccatctcctacgtggtatacgttcccattacataaaactggtgataattctgttgggtcaagtcgatcagcctacgaatttttgatcacaaattcagatgagaaagaaaatggtattcctgtcaaattaacaatagaaaatcacgaagtaaattctctgcatggagacgggggcgagcaaattgccaagaaaattgtcataccagataaatttatccagcatatctag

SEQ ID NO: 78539 - DNA, 405 bp, Saccharomyces pastorianus
atgtcaggaaaagctcatggatttacaggtaaatccggcgctaaagacagtggttcattaagatctcaatcttcttcagcaagggctggcttgcagtttcctgtcggtaggattaagcgttacctgaaaaggcacgctaccggccgaacaagagtaggatccaaagctgccatttatttgactgctgtgttggaatatctgactgctgaagtgctggagttggctggtaatgcagccaaggatcttaaagtcaagaggattaccccaagacatctgcaattggccattagaggtgacgatgagttagattctttgatcagggctacaattgcttcaggtggtgttttgcctcatataaataaagcattattattgaaagtggaaaaaaagggaagtaagaaataa

SEQ ID NO: 78540 - DNA, 2061 bp, Saccharomyces pastorianus
  modified_base (1272)..(1272): a, c, g, t, unknown, or other
atgatacgtccattatgttcaaaaatcattatcagttacatattcgcaatttctcagtttctactggccgctaatgcgtggtcgcccacagatagttatgttcctggcaccgtgtcgtgtcccgatgacataaatctggtaagagaggctacgtctatatctcagaatgagagcgcatggttagaaaagagaaataaagtcactagtgtagctttaaaagatttcttgactagagctactgcaaatttttcagatagctcagaagttttgtcgaagctatttaatgatggcaacagcgaaaacctgccgaaaattgctgtcgccgtttcaggtgggggctatcggtccatgctaacaggtgcgggtgttctagcagcaatggataacagaactgaaggtgcttatgagcatgggctgggtggacttttacaaagcacaacatatttatctggtgcctcgggcggcaactggctagttggtacattagccttgaacaattggacatccgtgcaagacattcttaataatatgcagaacgacgattctatttgggatttgtcagattctattgttacccccggcggcattaatatattcaaaacagccaaaaggtgggatcatatctctaatgctgtcgaatctaagcagaacgccgattacaatacttctttggccgatatttggggcagagccttggcgtataattttttcccttctctaaatagagggggtataggcctgacttggtcttccattagggatttcccagtgtttcaaaatgctgaaatgccttttccaatttctgttgcggacggtaggtatcctggaacaaaagtcatcaatttgaacgcaacggtttttgaatttaatccctttgaaatgggatcctgggatccctctttgaactcttttgccaacgttaagtaccttggaacgaatgtctccaatggtgtaccattggaaaggggaaaatgtaccgcaggctttgataatgcaggttttatcatgggtacttcctccaccttatttaaccagtttcttttgagaataaactccactcacttacctagtttcatcacaagattagcaagacattttctaaaggatttatctcaagattttaatgatatcgctgtttacagtcctaatccatttaaagacacgaagtttttggatagtgactatacgacaagtattgttgattcagacagcctattcttagttgacggcggtgaagacgacgaaaatgttcctgtgttaccgcttatacanaaggaacgtgatgtggacattatttttccggtagataattctgccgatatgagattggcttggcctgacggttcttctttagtccatacctatgagcgtcaattcgttaagcaaggtcaaggtatgtccttcccatatgttccagatacgaatacattcgttaatttgggtttgaacaagaaaccaaccttcttcggttgcgatgctaataatttgaccgatcttcaatatattccacctctagttgtttatctgccaaatgcagaatactctttcaatagtaatcagagcgcgttcaagctatcatattccgaatcccaaagaagaagtatgattcaaaacgggtttgaaattgcaactaggaacaacttcactgatgatcctgaattcatgggctgcgtcggctgcgccatcattagacgtaagcaacaagctttgaatattactttgcctccggaatgtgaaacctgttttaaaaattattgctggaatggtaccctggatactaccccattaccagatgttgaaaaggatgttcaccactcctttatcaacgtcaatagcttcaacagctccataggacaagaagaaagtctttacgccggatcttcagcttcccagtcatcgtcttcatcttcgtcttcatcttcgtcttcggaaattccttcggctactgcaacccttgagaaaaaggcagctactaattctggatcacatttatctggcataagtgtaaagttctctgctatgattatgcttactttattgatgtttaccggagcagtataa

SEQ ID NO: 78541 - DNA, 1104 bp, Saccharomyces pastorianus
atgtcatcttccgcccccatatacaccactttccaagggtcacaaaattttaggttacggatcgtcttggcaacattatcagggaaaccaataaaaattgaaaaaatccgttcaggcgacttaaatcccggtctgaaagattatgaagtgtcttttctaaggctgatcgagtcggtcaccaacgggagtgtaattgaaatttcttataccggtactactgtgatttataggcccggtatcatagttggtggtgcatcaactcatatctgccctagttccaaaccggtaggttatttcgtcgaaccaatgctatatttggctccattttcaaaaaagaaattttctatattattcaaaggcataactgcatctcacaacgatgccggtattgaagctatcaaatggggactcatgcccgttatggaaaaatttggcgttagagagtgcgccctacatactttgaaaagaggttcaccaccactaggaggtggcgaagtgcatttggttgttgattctttgattgcgcaacctataactatgcatgaaatagataggcccataatttcatcgattaccggtgtagcatactctaccagagtaagtccgtcgcttgtgaatagaatgatcgatggtgctaagaaggtattgaaaaatctgcaatgcgaagttaacataacggcagatgtctggagaggtgaaaattcagggaagagtccaggctggggtattactttggttgctcagtccaagcagaaaggttggagttattttgcagaagatatcggtgatgcaggttctatacctgaagaacttggtgaaaaagttgcctgtcaattattagaagaaatatcaaagagtgcagcagttggtagaaaccagcttccattagcaattgtttacatggtcatcgggaaagaagatatcggcagattgagaattaataaggaacagatagacgaaagattcataatcctcttgagagatattaagaagatctttaatactgaagtctttttaaaaccagttgacgaggcggataatgaagacatgatagctactatcaagggtattggtttcacaaacacaagcaaaaagattgcatag

SEQ ID NO: 78542 - DNA, 816 bp, Saccharomyces pastorianus
atgtcttttgatattaattggagtacattggaatctgacaatagactgaatgatcttataagaaaacatctaaattcatatttacaaaatacgcaactaccaagctacgtaagtaatcttagggtactagattttgatctgggaaaagttggtcctgctataacactgaaagaaataacagatcccctagatgagttttatgattcaattagagaggaggctgatcaagagacggaggaaaataatgacaacaaggaggacagcgaacatgtttgtcctgatcgtactatagctaatcatgaaggacctaaagatgattttgaggcgcctgtggtgatgccatcccccaacgatatacaatttttactagaggtcgagtacaagggtgacttactcgttacgattggtgccgaccttgtgctgaattatcccgtagaaaaatttatgactttgccagtaaaactttctatcagtgatatcggtctccattccctttgcattgttgcatgtttatcaaagcaactgtttcttagctttctgtgtgatgttagtgatcctgcactggatgacaaccaaactgttttagatcctaaggggccaattctggcagctactaagccattggagcgaatatccattgtgagaagtatgaagattgaaaccgaaataggggaacaatatcagggacagggctcagtattaagaagtgttggagaactagaacagtttttgtttacgatattcaaagattttttaagaaaggagttagcatggccaagttggattaatctggatttcaacgatgatgatgagtaa

SEQ ID NO: 78543 - DNA, 624 bp, Saccharomyces pastorianus
atggttttgataataaggcccccacagacattgatattattcaggaaagcgatgctcaagccaattgggagatatcctcttaaaagaaatttttttggtttgagcggtaccaatcacactattagggaacagcgatatgttttgcgcaaggccataaacgcccctccaagcacagtctacgctgcagtgtcagaagttgcccaatataaggaatttattccttattgtgttgattcgtttgtagataaacgaaatcctgtggataacaagcctctcattgcggggcttcgagttggtttcaaacaatacgatgaggaatttatatgcaatgttacctgtaaagatactgatcatacgtataccgttgttgcagaaacaatatctcataatttgtttcaccttttgatttcgaaatggaccataatgcctcacccaaatagaccaaatgcggccatggtagaacttctattaagatttaaattcaaatctcggatatataacagtgtctctctaatatttgcgaaaactgtgactgaattggtgatgaacgcatttgccaaaagagcataccatttagtaagattagcaatgctaaaaccttcttctaaagaaggttctccgtga

SEQ ID NO: 78544 - DNA, 1026 bp, Saccharomyces pastorianus
atgagactgccagaaatctccatttggaaagtgatactactacttcatttgtttgctctacaagaatttcaacttgtctccgctgcaaatttgccctctttatcaagtagtacaaaggcagcagatagttctagtaaaggcagctcttcagccaagacaaccacgtccttaggcaaaagctcagtaaccagtaaggatgtttcgtcaagtcataatgtcacttcaagcactaaaatgcccaaaatcaccacgagcgctagtacaagcttatacaccaactctagtttatggagcaacaacagtgtaatatcaacttcatctattacaccttccagcgtttatatcccggttacggacggaaataaattcttatatcaggctcatcatcctaacggtactgtgttcattgcatttgctggctgtttaggtgcaattctactatcactgacgggtgcatggattgcattgaatataaagtcatggcgaagtgctagaaaggaaaataagctgagaaatctagaaaatcaataccaacacgatcctttctacttccaaacaaacattaatgacgacgaaagtgaaacatcttcccattctgacgacagtgacatatcagaaaaagttctgaaaaataactcatctcgtatgagtttgtatactctaggatccacttctgttttgaatcttttgaacaataaaacagatgccaacgataacttcagatcatctatgtttatttcacccaccgaaattctgcaatctgatgccaacaactctaatacatggtctcaaagcaatgagagtgctatatatgattccttgtccagtactccaagggaacctggtgctacccaaatactgggaaagtttacagacagtactaatccattcaattatacatcatacaatttaagtcctgactctgaagaccgctctacgccaaaatcaaatgttagtcagggtaaagtaaagaagtaccgtcctcccagtgttcatctggatcaactgctcgacggtaaggaataa

SEQ ID NO: 78545 - DNA, 2310 bp, Saccharomyces pastorianus
atgactattgctgatgcttccaaagttaatcatgagttgtcttctgatgacgatgatgatgtgccattatctcaaactttaaaaaaaagaaaggtggcgtccatgaactctgcctctcttcaagacgaagcggaaccttatgatagtgatgaggcaatctctaagatttccaagaaaaagactaagaaaataaagaccgaaccagtgcaatcgtcgtcattaccatcgcctccagcaaagaaaagcgcgacatcaaagcctaaaaaaatcaagaaagaagatggtgatgtaaaggtaaaaacaactaaaaaggaagaacaggagaacgaaaaaaagaaacgagaagaagaagaagaggaggacaagaaagcgaaggaggaggaggaagaatataaatggtgggaaaaagaaaacgaagatgacaccataaaatgggtcacactgaagcataacggtgttatattccctccaccataccagcccttaccatctcacatcaaattatattacgatgggaagccagtagatttacctccgcaagctgaagaagtagccgggttctttgctgccctattagagagtgatcatgccaaaaatcctgttttccaaaagaacttcttcaatgatttcttgcaagtactgaaagaaagtggtggtcccctcaatggaattgagataaaggaattttctcgttgcgatttcaccaaaatgtttgattacttccagttacaaaaagaacagaaaaagcaactgacttcccaagaaaagaaacagattcgtttggaaagagaaaaattcgaggaagattataaattctgtgaattagatggcagaagggaacaagtagggaatttcaaggttgaacctcctgatctatttagaggtcgtggcgctcacccaaaaacaggcaaattgaagagaagagtgaatcctgaggatatcgttttaaatctaagtaaagacgcacccgttccgccagccccagaagggcacaagtggggtgaaatcagacacgacaataccgttcaatggttagccatgtggagagagaatattttcaactcattcaaatacgtcagattggcagcgaactcttcattgaagggtcaaagtgactacaagaagtttgaaaaggcgagacaattgaaatcctatatcgatgccatcagaagggattacacgagaaatttgaaaagcaaagttatgctagagcgccaaaaggccgtagccatttatttgatcgatgtattcgctttaagagccggtggtgaaaaatccgaagatgaagccgatactgtgggttgttgttcattgcgatatgagcatgttactttgaaacctccgaatactgttatctttgatttcttaggtaaggattctattagattttatcaagaggtagaagttgacaaacaagttttcaaaaatttgacaatttttaaaaggccgcccaaacagccaggacatcaactgtttgatcgtctagatccatctatactgaacaaatatctacaaaactacatgccgggattgactgctaaagttttccgtacatataatgcttccaaaacaatgcaagatcaactggatctaattccaaataaaggatctgtcgcagagaaaatattgaagtacaacgcagcaaatagaactgtagccatcctatgtaaccatcaaaggactgtcacgaaggggcatgcacaaacagtggaaaaggccaataatagaatacaagagttggaatggcaaaagattcgttgcaagagggccattttacaattggataaggatcttttaaagaaagagccaaaatatttcgaagaaatcgacgatttgacgaaagaagatgaagccaccattcacaagagaattattgatagagaaattgaaaaatatcagcgaaaatttgttagggagaacgataagaggaaatttgaaaaggaagaattattgccggaaagtcaattgaaggaatggttggagaaagtcgacgaaaagaaacaagaattcgaaaaggaattgaaaaccggtgaagtggaactgaaatcaagttggaattcagtcgaaaaaataaaagcacaagtagagaaattagaacagcgtatccaaactagttccattcagttgaaagataaagaggaaaactcccaggtttcactgggcacttccaaaatcaattatatagaccctagactttctgtggtattttgcaaaaagtatgatgttccgattgaaaagatttttacaaaaaccctaagagagaaattcaaatgggccatagaatcggtagatgaaaattggaggttttaa

SEQ ID NO: 78546 - DNA, 363 bp, Saccharomyces pastorianus
atgaatgctccagacagattcgaactgttccttctgggtgaaggggaatccaagctaaagattgaccccgacaccaaagcccccaacgcagtagtgataacgtttgagaaggaggaccacacgttgggaaacctgattcgtgcagaacttctgaacgacagaaaagtgctgtttgccgcttacaaggttgagcatcccttctttgctcgtttcaagctgagaatacagaccaccgagggctacgacccgaaggatgccttgaaaaacgcctgtaacagcatcattaacaagcttggcgccctgaagacaaatttcgaaaccgagtggaacctgcaaactctagccgccgacgacgcattttga

SEQ ID NO: 78547 - DNA, 882 bp, Saccharomyces pastorianus
atggaaagcacatcaggagaccgttccgaaaatatacatgaggatcaagggataccaaaagtaattctgcccgctgattttaataaatgctctagaactgacctagtggtactcatatcacgaatgttagtatcgctgatagcaatcaatgaaaattcagcaacaaagaaatctgatgaccaaattactttaacacgataccattctaagattcctccaaacatatcaatcttcaactatttcatacgactgacaaagttttcctctttagaacattgtgtgcttatgacatcactctattatatcgatttattgcaaactgtgtatcctgattttacgcttaattcgttgactgcccataggtttttattaacagccaccacagtcgcaacaaaaggcttatgtgattcgttctcaacaaacgcccattatgcaaaagttggaggagtacgatgtcacgaattgaatatactggagaacgattttttaaagagagtaaactacagaatcattccgcgggatcataacattacgttatgtagtatagagcaaaaacagaaaaagtttgtcatagataaaaacgcattagggtctctcgatttggattcttattcttacgttaatcgtccaaaaagtggatataatgttatagataaatactatcgaagaatagttcagctggtgggttcctttaacgcttcacctgataagagtagaaaggttgattatgttctcccgtcaaatattgatatagtgagtgaaagtggctcccaaactactcaactaaaggggtcgtcatcacccaattctcactcttcacaaaagcgatattctgaggcaaaggacgcacatatctataacaagcgatcaaagccagattaa

SEQ ID NO: 78548 - DNA, 1635 bp, Saccharomyces pastorianus
atggccattggcaaaaggttactggtgaacaaaccagcagaagaatcattttatgcttctccaatgtatgattttttgtatccgtttaggccagtggggaaccaatggctgccagaatatattatctttgtatgtgctgtaatagtgaggtgcacaattggacttggtccatattctgggaaaggcagtccaccgctgtacggcgattttgaggctcagagacattggatggaaattacgcaacatttaccgctttctaagtggtactggtatgatttgcaatactggggattggactatccaccattaacagcatttcattcgtaccttctgggcctaattggatcttttttcaatccatcttggtttgcactagaaaagtcacgtggctttgaatcccccgataatggcctgaaaacatatatgcgttctactgtcatcattagcgacatattgttttactttcctgcagtaatatactttactaagtggcttggtagatatcgaaaccagtcgcccataggacaatctattgcggcatcagcgattttgttccaaccttcattaatgctcattgaccatgggcactttcaatataattcagtcatgcttggccttactgcttatgccataaataacttattagatgagtattatgctatggcggccgtttgttttgtcctatccatttgttttaaacaaatggcattgtattatgcaccgattttttttgcttatctattaagtcgatcattgctgttccccaaatttaacatagctagattgacggttattgcgtttgcaacactcgcaacttttgctataatatttgcgccattatatttcttgggaggaggattaaagaatattcaccaatgtattcacaggatattcccttttgccaggggcatcttcgaagacaaggttgctaacttctggtgcgttacgaacgtgtttgtaaaatacaaggaaagattcactatacaacaactccagctatattcattgattgccaccgtgattggtttcttaccagccatgataatgacattacttcatcccaaaaagcatcttctcccatacgtgttaatcgcatgttcgatgtccttttttctttttagctttcaagtacatgagaaaactatcctcgtcccacttttgcctattacactactctactcctctactgattggaatgttctatctcttgtaagttggataaacaatgtggctttgtttacgctatggcctttgttgaaaaaggacggtcttcatttacagtatgccgtatctttcttactaagcaattggctgattggaaatttcagttttattacaccaaggttcttgccaaaatctttaactcctgggccttctatcagcagcatcaatagcgactatagaaggagaagcttactgccatataatgtggtttggaaaagttttatcataggaacgtatattgctatgggcttttatcatttcttagatcaatttgtagcacctccatcgaaatatccagacttgtgggtgttgttgaactgtgctgttgggttcatttgctttagcatattttggctatggtcttattacaagatattcacttccggtagcaaatccatgaaggacttgtag

SEQ ID NO: 78549 - DNA, 1041 bp, Saccharomyces pastorianus
atgtcagcatcaaaagaagaaattgctgcccttattgtaaactacttttcttccattgtggaaaagaaagaaattgcagaagatggcgccgattctttaaatgttgctatggactgtatctctgaagcctttggctttgaaagagaagctgtttcaggcattttaggcaagtctgaattcaagggtcaacatcttgctgatatattaaattctgcgtcaagagttccagaatcgaataagaaagacgatgctgagaatgtcgagattaatattccagaagatgatgcggaaactaaagccaaagctgaggacttgaaaatgcaaggtaataaagcaatggccaacaaggattacgaactggcaatcaataaatatactgaagccattaaagttttaccaacgaatgctatttattacgccaatagagcggctgctcattcatccctgaaagaatatgatcaagcggtcaaagacgctgaatctgcaatttctattgacccatcttatttcagaggctactctagattgggttttgctaaatatgcgcaaggtaaacccgaagaagcccttgaagcatacaaaaaggttcttgatatagagggcgataatgcaacagaagctatgaaaagggattatgaaagtgccaagaagaaggttgagcaatctttgaatctggagaaaaccgttccagaacagtcaagggatgctgatgtcgatgcaagtcagggtgctagtgcgggtggattgccagatcttggttctttattaggaggtggtcttggaggtttaatgaacaacccacaattgatgcaggctgcgcaaaaaatgatgagcaatccaggtgcaatgcagaatattcaaaaaatgatgcaagatccaagtatcagacagatggctgaaggctttgcttcaggcggaggaactccgaatttgtctgacttgatgaataacccagcactcagaaacatggcaggcaatctttttggtggagcaggtgcccaatctacagatgaaacaccagacaatgagaacaagcaatag

SEQ ID NO: 78550 - DNA, 102 bp, Saccharomyces pastorianus
atggcaaccaaaggcaacttaaaaagactaacgaagtacttttcaacaatagcttacactgaaactcgcggagaggcgacgctgcgcgcgaattatcagtaa

SEQ ID NO: 78551 - DNA, 723 bp, Saccharomyces pastorianus
atggcttacatcaagatcgctttattagctgctatcgctgctttggcttctgcccaaactcaggaagaaattgacgaattgaacgttattttgaatgacgttaagtccaacttgcaagaatatattagtttggctgaagattcttcatctggattttccttaagcagtctgccatctggtgttttagacatcggtttagctttggcttccgccactgatgactcctacactactttgtactctgaggttgactttgctgctgttagcaagatgttgaccatggttccatggtattcttccaggcttctaccagaattggaatccttgttaggaacttctaccaccgctgcctcttctactgaagcttcttctgctgctacttcttccgctgttgcttcctccagtgaaactacttcttctgccgtcgcttcttccagtgaagcttcttcttctgcaactacttcttctgctgtcgcttcttccagtgaggctacctcttccaccgtcgcttcctctaccaaggctgcctcttccactaaggcttcttcctctgctgtttcttcagctgttgcttcttccaccaaagcctccgccatttctcaaatcagtgatggtcaagttcaagccactagcactgtttccgaacaaactgaaaacggtgctgccaaggctgtcatcggtatgggtgctggtgtcatggccgctgccgccatgttattataa

SEQ ID NO: 78552 - DNA, 4185 bp, Saccharomyces pastorianus
atgtcaatttcaaagtacttcactcccgttgctgacgggtcactcactttcaatggcgcgaacattcaatttggcgccgatgctcaaggcgagtcaaaaaagagttatgacgctgaggacagcatgccgaatccggcaaatcaactaaatgacataaccttccaagcagaggctggtgaaatggttttggttttgggttatcccacatccactctatttaagactttgtttcatggtaaaactagtttgtcatactctcctccaggctcgattaaatttaaaaataatgagtttaagagcttttccgaaaaatgtccccaccaaatcatttacaataatgaacaagatgtgcatttcccatttctaacggtagagcaaacaattgattttgccttgagttgtaagttcgatattccaaaaggtgagcgcgatcaaataagaaatgaacttttaagagaattcggcctgtctcatgtattgaaaactattgtaggaaatgattttttccgtggtgtttctggtggtgagcgtaaacgtatttctattattgaaacgtttattgctaatggttccgtttatctatgggataattctactaaaggtttagattccgccacagctctggattttttggaaattcttagaaaaatggcaaaagctactcgttctgtaaacttagtcagaatttctcaggcaagtgataaaattgttgataagtttgacaagattcttatgctatccgattcctaccagcttttctatggtacggtcgatgagtgtttgacttattttcgtgacactttaggtattgagaaagatcctaacgattgtattattgaatatctgacctctatcttaaattttcagttcaaaaataaaaatttggggaatttatcaaattcatcatctgctagcgttctcaaaaccgcaacaggggaagtcactaagtatacttataattctgatttcgatttatatgatcaatggaaacattcttcgtactatagaaatataaagcagcaaatccaggggtcttcaattgatgactccattaaggaagtggatccctctgatgtctcacctatttttaatattccgttgaagaaacaattattattttgcacaaaaagagcttttcaacgaagtttgggtgataaagcttatatgacggcacaatttatttccgtcgttattcaatctttggtcattggttcactgttttacgaaattccgttgactaccattggttcatactcaagaggttctttaacctttttctccattcttttcttcacttttctttctcttgcagatatgcctattgccttccaaagacaacccgtcgttaaaaagcaatcccaacttcacttctatactaactgggttgaaaccctttcaacaacagtgttcgactactgctttaaactttgtttggtaattgtattcagtatcatcctatacttccttgctcacctgcaatacaaggctgcaagatttttcattttcctcctgttcctttccttttacaatttctgtatggtgtccttattcgctttgacgacactagttgctccaaccatttcagttgcaaatttatttgcaggtattctgctactagctatagcaatgtatgcttcttacgtcatctacctgaaaaatatgcatccttggtttgtatggattgcttatctaaatcctgcaatgtacgctatggaggcaatactgtctaatgagctttacaatttgaagctggattgtagtgagacaattgttccaagaggtcctacttacgacgatgttccattttcccataaggcctgtgcttggcaaggtgctactctgggtaatgattacgttagaggtcgtgattacttgaagcaaggtttatcctacacgtatcatcatgtgtggagaaactttggtattattattggtttcctagtattctttattgcctgtactctgtttgcatctcaatatattaagccttatttcaataaggatgaaatagagcgcaacaatagtcgtttgacaagatggctaccatttttgaataaaaagagaggtaccaggtcctctgcaagaaatgacagtaagtatgttggtattccaaagtcgcactccgtttcgtcttcctcgtctagcctgtcggctgttccatatcagatatcaccctcaaataaggaaatggctctaaacgattataacgagcaacctatcacggaaacagtagagactcaaaagcatatcatctcttggaaaaatatcaactacacagttggtacaaagaaactgattaataatgcatccggtttcatcagttctggtttgaccgccttaatgggtgagtccggtgcaggtaaaactactttgctgaatgtcttatcacaaagagttgagacaggtgttgttagcggcgaaattttgatcgatggccacccattgacagatgaggacgcatttaagagaagtattggttttgttcaacaacaggatttgcatctagatttgctgtctgtgaaagaatctctggaaatatcatgtcttttgagaggtgatggtgacagggcatacttagacactgtttcaaatttactgaaattgccatctgacattttagtcgctgatttaaacccgactcaaaggaagcttttatctatcggtgttgaacttgttactaagccttcacttttattattcctagacgaaccaacctctgggctggacgctgaggctgcactaacaatcgtcaaatttttaaaacaactttctttacagggtcaggctattttttgtaccattcatcagcctagtaaaagtgtcatcagccattttgacaatattttcttattgaaaaggggtggtgaatgtgtcttctttggaccaatggacgatgcctgcggctatttcatgtctcatgacaacacgctcgtttacgataaagaacatgataaccctgcagatttcgtcattgatgcagtaggtagcagtaactcctcggcagggaaagatacagcggaggaagctcttactttgaacaaagaagccatagattggagtgcattatgggaatcttctgtagaaaagaaactagttgaaaaagaaacagctaggttagaagatgatgctcgtgcgtctggtgttgattacacaacctcattgtggaagcagccttcctacttacagcaattagctcttattacaagaagacaatatatttgtacgaaaagagacatgacttatgtcatggccaagtactgtttgaatggtggcgctggtttgtttatcggtttctcattttggcacattaagcataatattatcggtttgcaggatagtatcttcttctgtttcatggctctttgtgtttcatctccattgatcaatcaaattcaggacaaagccttgaaaacaaaggaagtttatgttgctagggaggcgagatcgaacacttatcactggactgttcttcttttgtcacagtcaattattgaactaccactggcacttacaagttccacactatttttcgtctgtgcctttttctgttgtggatttaacaacgctggctggagtgccggtgttttctttttaaactatatgcttttcgctgcttattactcgactcttggtttatggctgatctatactgctcctaatctacaaactgctgctgtttttgttgcgtttattgacagttttacagcatcattctgtggtgttatgcaaccatactctttgtttccaactttttggaaattcatgtacagggtttcgccatacacatattttgtggaaacttttgttagtattctattgcataactgggaaatcaagtgtgacatgtcggagatggttcctggtcaacctctgacggggcaatcttgtggccaatttatggaagctttcatagaagaatacggtggctatctacataataagaacactttcacagtctgcgcttattgtacgtacactgttggcgatgacttcctgaaaaatgagaatatgagttacgaccacgtttggaggaactttggtattgaatgggcttttgttggtttcaatttctttgcgatgtttgctggttactacttaacttacgtggcaagaatatggccaaaggtctttaaaattatcaccaaagtaattccacacagagggaagaagcctgtacagaactaa

SEQ ID NO: 78553 - DNA, 207 bp, Saccharomyces pastorianus
atggcaaaatcggttttcaatttctttcattttgaaatattggagtatttaaaccgttttgtgtatcattcacaatactttcttccatactactgctctcttgaagttcttgggaagagccgaaaaaattggacatttcaatattggtgcttatacattactactaacaagaagataataaaaaagaaagatttctatcaccgatag

SEQ ID NO: 78554 - DNA, 414 bp, Saccharomyces pastorianus
atggtagcatcatcgatcaatgaagaatcctctttggcggtaaacttgacaagcgatgtagagaaggcttcgaaaactttgtttaaggcattcgaaaagtcatacgcaaatgactacttgatgaaaaagttcttccatatcccaatcactgaaaaagtttcaagggcaagaataaatgcaatgatacattactacacgacgtgctaccatgacttggatggtgaaattgctgaggcaaatgatttcgatgcagtcgcaatatggagccgccctgggtgccacttgcctgctacactatctgacgacgagtctttcaataagatttttttttcacgacttgactgtgaggaagcacgaagtcatgcctctgggaatggactattactacctttatgccatcggaaaagatcctag

SEQ ID NO: 78555 - DNA, 471 bp, Saccharomyces pastorianus
atgacttggatggtgaaattgctgaggcaaatgatttcgatgcagtcgcaatatggagccgccctgggtgccacttgcctgctacactatctgacgacgagtctttcaataagatttttttttcacgacttgactgtgaggaagcacgaagtcatgcctctgggaatggactattactacctttatgccatcggaaaagatcctagccatcccgaatttagaggttcagtcagaaaaatactcgaaaaatataaaaccaaagcagacaaggccaattgcgcccttgctctcgaggctatttcggagcacgcaagatctgtgtacgaatatttcggtttcaaaacctatttggtgtttcagttcggggttggagaagtgaactccaaaggagaacccgatccgcaggggaaggggttcacggcctacttgatgctctaccacaaggatgcagacaccatctttcacgcctga

SEQ ID NO: 78556 - DNA, 2274 bp, Saccharomyces pastorianus
atgatgcgtggtttcaagcaaagattaataaagaagaccaccgggtcttcttcttcttcaagcagtaaaaagaaggacaaagagaaggaaaaagaaaaaagttccactacctcatccacatcaaagaagcccgcttcggctagtagctcttcccacgggactactcacagttctgccagcagtaccggatcaaagtctacaactgagaagggcaagcaatctggtagtgttccctcgcaagggaagcatcatagtagctctacatcaaaaacaaaaacagcgacgaccccttcttccagcagcagtagcagtagaagctcaagtgtcagtcgctccggttcaagctccacaaagaaaacaagttcaagaaaaggacaagaacagtccaaacaatcgcaacagccatcacaatctcaaaagcaaggatcttcttcatcctctgccgctataatgaaccccactccagtactcactgttactaaggacgacaaaagcacttctggtgaagatcatgcacatcctactttgctgggggcagtatccgctgttccatcatctcccatttcaaatgcttcaggtacagcagtttcttctgatgtagaaaatggtaatagtaataataacaatatgaatatgaatactagtaatactcaggatgcaaaccacgcctcctcacaaagtatcgacattccgagatcatcacactcatttgagagactaccaacacccacaaaacttaaccctgacacagatttagagttaattaagactccccaacgtcattcttcatctagattcgagccatctagatatacgccattaacgaaattgccaaattttaatgaagtttctcctgaagaaaaaatccctttgttcattgccaaagttgaccagtgtaacactatgtttgactttaatgatccgagttttgacattcaaggtaaagagattaaaagaagcaccttagatgagctaatagaattccttgtaacaaataggttcacttacacgaatgagatgtacgctcatgtggtgaacatgttcaaaatcaatctgtttagacctattccaccaccagtaaatccagttggtgacatttatgacccagatgaagatgaacctgttaacgaactagcctggcctcatatgcaagctgtttacgaattctttttaaggtttgtggaaagtcctgatttcaatcatcagattgctaaacaatatattgatcaggactttattttaaagttactggaattatttgatagcgaagatatcagagaaagagactgtttgaaaacgacactgcatagaatatatgggaagttcttatcattaagaagctttattcgtcggtcgatgaataatatttttttgcaatttatttatgagactgagaagtttaacggtgtggcagaattgttagaaattttgggttccataattaatggatttgcacttccattaaaggaagagcacaaggttttcttggtgaggatattgataccattacacaaggtccgttgtttatcattataccaccctcagttggcttactgtatcgttcaatttctcgaaaaagatcctttattaaccgaagaggtagttatgggcttactgcgttattggccaaaaataaattccacaaaagagataatgtttctaaatgaaatcgaggatatttttgaagtgatcgaaccgctggaatttattaaagtagaagttccgttatttgttcaattagctaagtgtatttcttctccacatttccaagtggcggaaaaggttttaagttattggaataatgaatatttcttaaacttatgtatcgaaaatgccgaagtcatcctacccattatatttcctgcattatatgaattaacttctcagttagagctagatacagcaaatggcgaagatagcatttcagatccttacatgcttgttgagcaagcaatcaattctggttcgtggaatagggcaattcatgctatggcattcaaggcattgaaaatttttctggaaacaaacccagtattgtacgaaaactgtaatgcattgtacttatcaagtgtaaaagaaactcaacagcgtaaggtgcaacgtgaagaaaattggagcaaacttgaagaatatgtaaaaaatctaaggattaacaatgataaggaccaatacacaatcaaaaacccagaattaagaaacagtttcaacacagcaagtgagaataatacattaaatgaagagaacgaaaatgattgtgacagcgagatacagtga

SEQ ID NO: 78557 - DNA, 624 bp, Saccharomyces pastorianus
atgcgcgtttttactttgattgcgattttgtttggttcatctttgttaacacatgcattctcctctaattatgctcctgtaggcatatctttacctgcttttaccaaagaatgtctttactatgatttatcctctgataaagatgtccttgtggtcagttaccaagttttgacaggtgggaatttcgagatagacttcgatattaccgcccctgatggctctgttatcgtcactgaaagacaaaagaagcattctgattttctactgaagtcgtttggtataggtaaatacactttctgtttgagtaataactacggcacttccccaaagaaagttgaaatcaccctcgaaaaggaaaaggaaattgtttcttcccatgaaagcaaagaggacataatcgcaaacaacgccatcgaggaaattgataggaacctgaataagatcaccaaaacaatggattatttaagggctagagaatggagaaacatgtacactgtgagttctactgagtcaagattagcatggctctcattactaattatgggggtaatggttggtatcagtatagtgcaggcattaattattcagttcttttttaccagtcgccaaaaaaactacgtatag

SEQ ID NO: 78558 - DNA, 2403 bp, Saccharomyces pastorianus
atggggttctacaactgtagattcctgtccagacgtctatctgttgagcgttgcagaataggtagcgccgctaaaagctatcaacagcgatcgatttatcactttggcgctgctctcacaaatgcccctagtggaagagaaacaccagacaagctacgttctgacctgcatagtgctttagagatggtcgatgaaatatatgacacaaattcgactgtagaggacattggaaacaaggaaaagggaggtcgacaaaaatatacggaagaaatggacaaggcgattaatatactgaaaacaaatataaggaaggagtatagacatgataagtatttggagcggacaaaggtaggaacgtatcctggtagaagaacatatcctggtaggagaacatatcccgctaggagaacatatcccgctagcagaacatattcagatagcaattcatacacttttcggataaatgtccagaagattaggcacgcattagtacgttacaatcaagatggtgttcaaaaacacaaccaaaagcctcctaggattggtcatggattaacgagagtgttataccaaccgttgtcgctacaaaaattgagagataataggagcagaatgtataattttgaccctgcagtggaaaatattaatccagagtatttggaaaagaaaagtgaaaaagatgtgaacacagactcctctggagaaggacaaagcaagccaatattcatcacaccccacaaagatgaatctctgttaaaggttgccaaagaacatagaaaaaagtacatatcttcatcaagttccatgacatcagtactttctcagttgcactatttattatccaatttcagaagattgaatatcattgattcctcgatatcgaaaaattttcctcaaaaaaactgcaattattcagaaagtgcatattttccgtcagcagtcattctgagaaagaagagaaatggcatttgttctattgattcagatagaagtctggatagggagattgtgctttctctactaggtcattatcttgaagactttttaacggaaaagtccctgaagaatagttcaaaaagtgaaaattatcactattctagtatagatgaattcattgtgagatctcaattggacgcgtacgacccaaatctacctggaacgggtgtatttgatctgaagacaagagcagtttctgccataagatacgatttatcacatgtagagagtaataacaaccaaactggatatgagatagataaagtttatggggaatttgagtctttggaaagagaatattttgaactaatcaggtctgcccttctaaagtattctttgcaagctagaattggcaaaatggacggtattttcgttgcataccacaatatttctaagatgtttggattccaatatctacctttggacgaattagattatataatccattcttcgtataacagcaaattcgacagtttgttaaaggagaagaatgatatcacaaaagggatatatggtgaggaggactacattctacactatgacagggacgataggaaaattgcttgcttggtggctaatagggaatttaagatgtctatgaatctgttcagtaatattttgaaacacgttgagcagttacttaactcaagtaatacgaaatgggaaaaatgcaaaataatgcttaaaaccgaagttgaagaaaaacgatccaaaagtggccgcttctttaacgaaccggtgctaaatattgtagccctgccgttgtcacctgagtacgaggataaatctttattggtaaaggatacttcgaacgaacaattaacagaggagctactaaacctccgctcatataacgaaaatcttttggaggaacacctgaattccttagttggatttaaagtaaatgtcaagcatttctatcaccatcatcctaatactacacatctacctgattttgctttaaaaaagaacgatattctcgacaccgaatcccgtaaatatattactgacatgatgaaacgagactggtacaaagatataccatctacacagactccaaactttttccacgcttccgatgtttccacttgggaggtgaactctacttttacagatatcaatgacaaacaaattttacgaaaactgtactttaaatatttggatgttaaattaaacgcattgaaaaatcaagtaatcacacgtcaggaacctgatatgtctaaaaaggatgaaattatgaatcgaatcaaatcactacaagcccgcaatgatcaccgcgataatggaagtaacaaaagatattctaattttggccctacccgactgcaaactaaactgcgcgcatatgctaaaaaaggtgcccttcgaagaaaactattagaaaggagtaacaagttccatatctag

SEQ ID NO: 78559 - DNA, 321 bp, Saccharomyces pastorianus
atgtccacccttttgaagtctgctaaatctatcgttccattgatggaccgtgtccttgtccaaagaatcaaggcacaagcaaagacagcatccgggttgtatttacctgaaaagaacgtggagaagttaaaccaagctgaagttgttgccgtaggcccgggctttactgatgctaatggtaataaggttgttcctcaagttaaagttggtgaccaagttttgattccacagtttggtggttctaccattaaattgggtaacgacgatgaagttattcttttcagggacgctgaaatcctggctaagattgccaaggactaa

SEQ ID NO: 78560 - DNA, 273 bp, Saccharomyces pastorianus
atgggtgctgcatacaaagtatttgggaagacggttcaacctcacgtattggctatatctacgtttatcgctactgctgcagtggcatcttactttaccacgaaaccaaaaaccaaaaatgaaggcaagaatagttctgccttgagccaacaaaaaagcggtgaaagttcaaactcagatgctatgggaaaggacgatgatgtcgtaaagagtattgaaggatttttaaatgatttagagaaagatacgaggcaggatacgaaagccaactga

SEQ ID NO: 78561 - DNA, 642 bp, Saccharomyces pastorianus
atgaagtacattattgagcatatggaggaagggtttagtgaatgggtcattttagagtatagccaaatcctgagagaagtaggagctgaaaacttgattttatcatcgttaccagagagtaccacggaaaaggacatccctcaaaggctactaaaacttggtttaagatggactacaaaggatttgaagggcattaacgaagatttcaaggatttggaactgttaaaagatggcagagtctgtctattggaccctagggctacaatcgatttacagccggaggatgctacgaaattcgactatttcgtatttggtggcatattgggtgatcatcctccaagagatcgtaccaaagaactaaagactgcctatccgaatcttttaattagcagaagactaggtgataaacaaatgactacggatactgccataagaacaacacagttgattatcaaagacaggattgcatttgaagacatcaagttcattgactaccctgaatttaggttcaataaaaatgaggccacggaaatgccatttagatacgttttagataaagaaggtaaacctattttgcctgaagggatgttggatttgatcaagaaggattctgctcaaagtttggacgatctgttgatgtag

SEQ ID NO: 78562 - DNA, 1701 bp, Saccharomyces pastorianus
atgatgagtcccgcccaagataaactgcagcaccagcatcataatcctaattcttcttcatcgtcatcctctaagatgacgaacgtttatcaggttaccacgccaaaatctcctcaggatttggaaaacaacatggatgagcccttcaaaatggacaccgccactagtaatccggacaagggtagcgaaaatacccagcggttgaagtacgaatgtgccaaaggggaaatacagaatgttttgaacctacatataatgctaaaccacaagcatgttaggcacttacgaagaaatgttcaaaaggttaacgcaaaactagctctcttggaaaccctgcataaggatactggtctattgaacaaaatcgaacggacgtatcaactcaaaataaaacaacatcagcagcatagcgtgctcggcggccacttccatgacagtacggctacggaaaatacgaacgcatcaaattataacctgtcatacccggttctatcggattataacatcaactgtcagcctttgtcttcgagcagcaacacaaatctgtcaacaacacgcataccacaccaccattatcatactagaagcaagagtaacgggcttttgctagaaccttctgccctccgtccggcaaattcgaatataattgattacaggctaacaggttctaaatctttatcggaagccataaccaagcccactcccgtctcgcttcctcactctaattcggatggcatttcttcacctcgttcctcttcaatctcccccttagacgagcagccggggttccagatactcccttttaaaccaagtcagatgcatcttaaccacagacgtaattacagtagcacttgtttgacgagcaatagcggtatcatcggtaagactgaaaataatgagcccatttttagaagatatgacggcattttggttataattacgtgctccaaatgtgaccgttccggtttcacttccgcgcaaggtatcgtgaaccatactcgactaaaacattctaaactatattcaagccaaccattggcagttttaaacaaccaaaaactacttcctaatgataagcaggatccggaaattttatctaagttcaagaaactaaatttggacccaaacaaagactatctaccctctgacattgcaatcccaaaaccacaatcaccaatcaaccactccgagaaccatacgcgggctccaaagactgtcaagaacactcctcatttagaaaaactataccaaaataaagaagacttcaaaaaactgattgacatggttaatgaaactccggatgatttgaatgaatatttgaagcaacgtgaaattcaattaagatatcaaaaggagcaagaagaggaatcttccaaatctgatgacgaagcttcttacgtcccatcaccgtctctctcagcaacggctacaacaacaacgactacggacccaccctctccacaagtgctatcctcctccttacaaagaaaattgctgcgtaagagaaaactgagcttgaatatctctactcccatggaagatttacctttaagagaaaggttgagagcaaatcccactgacaagaaaccaagaaaagcggcccttttgactaatgaacttgagggtcctgatcctgcagcaaaatcatcatcttattacaatctaaggtcgaaatcaagactgcgtggttctcatacatag

SEQ ID NO: 78563 - DNA, 1026 bp, Saccharomyces pastorianus
atgcagatagtacaaattgagcaggccccaaaagactacataagcgacatcaaaataatctcttccaggtcactgcttttgattacgtcttgggatggttctttaacagtctacaaattcgacattcaagcaaagaatgttgaccttttacaatcgctacgatataaacatccgttattgtgctgcaatttcatcgataataccgatctgcaaatatacgtgggaactgtacagggtgaaatcctaaaagttgatttgataggtagtcccagcttccaagctttgacgaacaatgaagccaatttgggtatttgccgaatatgcaaatatggagacgataaactcattgccgcgtcatgggatggcctgatagaggttatcgaccctcgcaattatggtgatggagttattcctgttaaaaatttgaactctaataacacaaaggtgaagaataagatatttactatggatacaaactcctctcgattgatcgttggtatgaacaatagtcaggttaaatggtttcgcatgccactctgtgaggatgataacggaacaattgaagaatcaggactgaagtaccaaataagagatgtcgctcttttaccgaaagaacaagaaggttatgcatgtagcagcattgacgggcgagttgctgtggagttcttcgatgatcagggcgatgattacaactcaagcaaaagatttgcatttagatgccaccgtttgaatctaaaagatacaaacttagcgtatccagtaaattctattgaattttccccccgtcataagttcctatacacggctggctctgatggcataatttcatgctggaacctacaaacccgcaagaaaataaaaaatttcgccaaatttaacgaagacagcgtggttaagattgcctgttctgacaatattctatgtctggcaacttctgatgatacttttaagacaaacgccgcaattgaccgaactattgaactaaacgcaagttcaatatacataatatttgactatgagaactga

SEQ ID NO: 78564 - DNA, 1770 bp, Saccharomyces pastorianus
atgtcattgacagccgatgaatacaaacaacaaggtaacgctgcatttaccgctaaggattacgataaagccatagagctcttcactaaagctattgaagtttctgaaactccaaaccatgttttatattctaacaggtccgcctgttatacttctttaaagaaatttagtgacgcattgaatgatgctaatgaatgtgtcaaaatcaatccatcttggtctaagggttataatagactcggtgccgcccacttaggtcttggcgatctcgacgaagctgaaagcaactacaaaaaagccttggagttagatgccagtaacaaggccgccaaagaaggattggatcaggttcatcgtacccaacaggcaagacaggcacagcctgatttaggattgacacagttgtttgctgacccaaatttaattgaaaatttgaagaagaacgcaaaaactagcgaaatgatgaaggaccctcaattagtggctaaactgattgggtacaagcaaaatccgcaagccattggccaagatctgtttactgatccaagattaatgaccatcatggctacattgatgggggttgatttaaacatggatgatataaaccaatcaaactccatgccaaaggaaccggaaaccagtaaaagcactgaacaaaagaaagatgctgaaccacaaagcgattctactacgagcaaggaaaattcctctaaagcaccacagagagaagaaagtaaggaatccgagccaatggaagttgatgaagatgactctaaaattgaggccgacaaggaaaagaccgaaggtaacaagttttacaaggcacgtcaattcgatgaagctatagagcactacaacaaggcgtgggaactgcataaagatattacctatttaaacaaccgtgctgctgctgaatacgaaaaaggcgaatacgagacagctatttctaccttgaatgatgctgttgagcaaggtagagaaatgagagcggattacaaggtcatttccaaatcatttgcgcgtattggtaatgcctatcacaaattgggtgacttgaagaaaactatagaatactaccaaaaatcattgactgaacatcgtactgctgacattttgaccaagttaaggaatgctgaaaaagaattgaagaaagctgaggcggaggcgtatgttaaccctgaaaaggcggaggaagcccgtcttgaaggtaaggaatattttaccaagagtgattggccgaatgctgttaaggcttacactgaaatgatcaaaagggcacctgaagatgctagaggatattctaatagagctgctgcactagcgaagttaatgtctttccctgaagctatcgcagattgtaacaaagccattgaaaaagatccaaatttcgtgagagcttatatcaggaaggccaccgcacaaattgctgttaaagaatatgcttccgctttggaaacactagatgcggccagaaccaaggatactgaagtgaataatggttctagtgcaagggaaattgatcaactgtattacaaggcaagccaacaaagattccaacctggtaccagtaacgaaaccccagaagaaacctatcaaagggccatgaaagatcctgaagtggctgcaatcatgcaagatcctgttatgcaaagtattttgcagcaggcccaacagaatcccgctgctttacaagaacacatgaaaaatccagaagtattcaaaaagattcagacgttgatcgctgctggtatcatccggactggtcgttaa

SEQ ID NO: 78565 - DNA, 336 bp, Saccharomyces pastorianus
atgatgcagacatcaactagttctcgagtgaggaggtatccttatcaaatcactctctccctagtgttggaagggtttcactcgccttctgctcctggttacaatttttgcctagtactccttcctaccctcatcctcatagatttagtgccaataaaattttctttgcatgtcatcattgggataagtgacgcaactccggttccgattttttttttttcagcgccgtggtatttccgctcgggaaatcccctcccgcattgcatcaaagcttatcgatgtaaagttaatttccctttttttcggttgggctggagcaattggttgcattactaa

SEQ ID NO: 78566 - DNA, 1860 bp, Saccharomyces pastorianus
atgatcataagattgcatttttactacctcctcactttagtttaccatttaggacttgtaggtgcgtatgaaaaagcagcaagaaagagaattcaacctcccgatttgatacctggtcctccgggacataaacttggtgatgaaagaccaccgcattacgaccaccggccaccttataaaaaacacatcgacaacattccagcttacaatctgactgatttgatagatgataaaatactaaataaatatgaaaactcatgcacggtaaatgtattgacaggtggcttcatctctctagcaagtaattcgtggcacttacgtgcttataattacactttaaattacccatcctttttgatccgatgcgataatggcagtgcaaatcctaatttctctcatgtcttacaagactttgtttatgacatcaacaacaaattcaacgttcaagatgacagtagtaaatacatcggaaaagacccatttcccttaggaatgataatgatcacctttgcttctgggtgtatctgtgtggcaacatggatgctatttttggttgtcttattactgccatccgataatcataatagaagaaataaagttgtacatgtttacgtccttttctctgcgattataagaactgtatttctaaacgagactatagccgtcatatttgacagccaatatcacgatgactaccaggatgcgagccaatttgaatcgttcatcgtagaaactgcaccatataaaatatgtgaattagttgcaaatattttgagtgatataaactggatttatattgttcactacttacagtccaattatggaaaaccaacttggaattggatcccatttaaaatgaaaaaggggacacatatcataattaccgtgggttgcttcctctcactagccgataacattttattcgcaaaccttctttggagaaagaaccttgtagttttgaaggtattttacaagctaatcgaattactgatttacacaattttcatctccattatttgttacttcacatggcataattttgcttacatacttttaccgaaaactgctgaaattaatacggacggtaagtgtaaaacgaaactgagaattctttgggaaaattatcacgaaactataccattattggcgtataatattcttatatttattttattctatttcaccacaatttttttcgctgctttcaccaaacatgttagaggttggacatttaactttgttcatcttttgaaagttttaataacagtgaacgtttggggcttaattggagtattggaaaagagggagctgcacataagcaaaaaaacagtccttggacgaaaaattaacaatagggacaaatttttcgccaatccaacagtcaattattacggagaagatttaggcaagcatttaagcgccataacgttaaacagggatttaaacactactaaaagtaacactacttcccacgattcatcaagtttagtaggatccccttcacccacctggaaatctccaatcgaaagaataagggacagaagaagaagacataagataatgaaaagtgagaataaatttgggcaaaatcccagttttggaagtaaatcgaatggcaaacctaatactaaaacgacattatccaaatatcgacagctattaaggaagcctaggcgaaaaaccaattcatatgaaccaaaaaatggcattggacagaataaagaaggctcaactgttagaccaggagccgacaaacatattagagattccaattatctagctacagacatcagtgacaacgaaagtatggaaaccgaacttcgaaccaaccacatttataattacgaaaatagtgattaa

SEQ ID NO: 78567 - DNA, 210 bp, Saccharomyces pastorianus
atgactgtaaaaatatgtgactgtgaaggcgaatgttgtaaggactcttgtcattgtgggagcacctgccttccaagctgttctggcggtgaaaagtgcaaatgtgatcacagcaccggaagccctcaatgtaagagttgtggtgaaaaatgcaaatgcgaaaccacgtgcacttgtgaaaagagtaaatgcaattgtgaaaaatgttag

SEQ ID NO: 78568 - DNA, 1305 bp, Saccharomyces pastorianus
atgccaaattttcaaaaacctttttctggttcttcggatggcaattctgtaatgaacgacctaggtaataaagtcgccatcaaggttttcgattgtagaagtgctcaagatggcagcgaagagcagaatgtaaatgtaaccacgaaccaaatgtatttaatgtttcaaagtaacaattacaacgtgccgccaccaaattacaataccgaggatttgggttctcaaggacctccgacgcatgcttattacgctccatttcagcatcccatccatcttcaacatcccgtgcctcctgtatataagaacaacacatattctgccacagaccagtatagtgactcctcgtttcctaatacttcaggccacactccagtaattgatagcaattactataatgatgctctggcttctatacctacaacaacgacgggtagtactacaatgactacagacagtggcaatactattgacagcgaagaatacattgataacatggaagtctttagtagcgaggaaaatgaaaacattgataatgtaaagcaaaccgatcttaaatctgaaaaggactcgagtcttctttcagcagcttcaatagtgaaaaaggaacaattgtctggctttgaaaattttctgcctttatcgaagacagagtctcccttagttactgcagacgagattaaatcatctttgaatttggagaatattgacaatggtgacagtttgagcttcaagttaaaaacttcacctatacggaaacattttcatgttaaacccaaaagaataacaagggtgaggacaggaagggtatcacacaatataattgaaaagaaataccgttccaatattaatgataaaattgaacaattaaggagaactgtcccaacgctacgagtagcgtataaaaaatgtaacgatcttcccattacatctagagacctagcagacttagatggcctagagccagcaacaaaattgaataaggcgtccattttaacgaaatctattgaatatatttgtcatttagaaagaaagtgcctacagctaagcttggctaatcaacatttatcaaatgacacacgggattctttcgtccatcttaccgagccatctcaaccgttgagtgacaacagtagtagtgaacaagtacaaaagcaaaccagaagctgccaacgccaacggcagcggcagccacgacaacaacaaccattgcataacattcaatataatattccacatcaaaacggcctcatgagcggcaccaacaattcacatgatatggattttaacaacgcaggagacttttaa

SEQ ID NO: 78569 - DNA, 201 bp, Saccharomyces pastorianus
atgcggcgtgcattgttcatagcggggcaaacatacttgtggcttaatttgacacatctacttttaatcttttcttggtctaatacaatggctttttcccaaagtagaaggcttcttactccaaccgtaccctgtcctactttactgggcattgattttttaattcttgtcttgaggcatttcgacgagattttcatttga

SEQ ID NO: 78570 - DNA, 2370 bp, Saccharomyces pastorianus
atgccactgtgtgagaaagggaatgatccaatcgatagctctactattgatagcctctgcgctgcatttgacaagactttgaaatccacccctgatgtccaaaaatacaatgatgctataaatacaattttccagctaaggcaaaaatctgaatctgggaaaatgccggctgatttaacgaatagtgaagcccttaaagatcgtcagaaaatcgaagaaatattgaccaggtcttaccaagaccattctgagtcccgcgtacatttatctaaacttatacagaatgatattcccttcgcactcaatttatttgaaatattatcaagatcatccatccacgttttcgttggttgcttttccaataaagacgcaacaattgcattgttaaatgagctgcaaattaggatacactatggcgaggacacccacgtcacgtatttactgagcatagttctacaactattgaataagttcaagtacaatttcaaggaggtgcgatttttagtgaaggaacttattttgcgcataagcgaagatgaagtaaaatcgatgatgcttataatttttgctgaattacaatcaagcttccaaaaagactttgataaagcagtggtcgatttcatgagtagcttaattgtggaggcagaaatagacgttggaaatgatccattgtccatcatagtcaaaaccctatcagaattatatccttcattgacaacactttgttctgaaatatttttgaccaaaggactaagtaagctttttaagaagagagtattcgaagagcaggatttacagtttacaaaagaactgctgcggttattatcttccgcgtgtattgatgagaccatgagaacgtatattacagaaaattaccttcaactattggaaagatcactaaacgtggaagatgtacaaatatattctgcattggtgttagttaagacatggtctttcacaaaattaacgtgtataaacttgaagcaactgtccgaaatctttataaacgctatttcaagacgtatcatgccaaaaattgaaaatgtcaatgaaagtgcggttaagctcgaggaggttcctaaagttgaaatatccgttgaagcgctggcatatttaagtctaaaggcctcggttaagattatgattaggagtaacgagagctttactgaaattctattaactatgattaaaagccagaaaatgacgcactgtttatatggtctcttagttatcatggcaaatttgtccactttaccagaggaatccaatggtagttcacagtctatcaatgacttaaaaaattacgcagatttgaagggcccaggcgcagacaaggtaggcgcagagaaagaatcaaaggaagatattcttttgtttaacgaaaagtacatattaaggaccgagctgatttcctttttgaagagggaaatgcacaatttgagccccaattgtaaacaacaagtggttagggttatatataacataacccgctcgaaaaacttcattcctcaatgcatttcacaaggtggtacaactatcatcttagaatatttggccaataagcaggacataggggagccaatacggattctagggtgtcgggcattaacaagaatgctaatattcactaatccgggcttgatatttaaaaaatactctgcattaaacgctatccccttcttgttcgaattgttgccaaggtctacgccagtggatgacaatccgttacataacgacgaacaaataaagctgacagacaattacgaggcactattagctctgacgaacttggcatcatcggagacctctgatggtgaagaagtttgcaagcatatcgtatctacaaaagtatattggtccacgattgagaatctgatgctagacgaaaacgttcctttgcaaagatcaacattagagctcataagtaatatgatgagtcatccattaacgattgctgctaagttctttaacttggaaaatcctcagagtttgagaaattttaatatattggtgaaacttcttcagttatccgacgttgagtctcaacgagcagtggctgctatctttgctaacattgccaccacgattccattgatagctaaggaactgttaaccaagaaagaactaatcgaaaatgctattcaggtatttgcggatcaaattgatgacattgagttaagacaaaggttacttatgcttttttttggattattcgaagtgataccggataatggcactaacgaggtgtatccgttgctgcaagaaaatcaaaaattaaaggatgctttaaatatgtctttaaagagaggcgattcaggaccagagttttcagcggcaattcccgttatccttgctaaaattaaagtctaa

SEQ ID NO: 78571 - DNA, 1215 bp, Saccharomyces pastorianus
atgaagagtgaaaattcacttaacccaagtgaaaaatacaacttcgaagagtgcaacgtgttgaaagaacccttcaaaaatagaaaagaggaaacgaaaaaaagaaaaagtagcatgctgtggaaaaattatgttctatccagttcccgaataacacgtaggcttcataagtcacctagaaagagcagcttctctaagaacttttttatcacaggctgcctactgacagttggagcagtaagcagttatttaacctacaggtacacaagtgagagggaaaacaaacatgagttatctccatcttattttgtcaagtacaagatttcacacaagcgagatattgattcatcacattttttattggaagtaactccgttgtttaagcagaaagttaacatatggtcattgatgactgcggaaaatctgtggtccgtcgagatcaaacaaccggaagtcatggtggtccgcaattatacgcctctaccgcttaaatttaacccagcttcaaaagagattgaaatcttaaaagatggtgacaatgcagatggaaaattatctttctatattaagaagtatgagaatggagaagttgcaagatggttacaccatcttcccaagggacatataattgaaataagaggcccgtttatcgattatgagtttcctcatttgcctaatgagctaaaaagatctcgcgattgtttatacatggataatcgcaacgaaaggggcaataacgttagagaaaattcccaatttatttaccagccttatgacataatgatgttcaccgctggtaccggaatagttactgcgttgcaactacttttgactgaatcaccatttagaggtactataaagttatttcatacggataagaacattaaacaactgggacccttgtatcctatccttttaagacttcaagcttcaaacagggtccagttaaaaatttttgaaacagaccgacaaactaaacaagacgtattgaaaagtatccagaaatcaatcacgaagccctacccatacaaaggtctgctccccttttccaacgttagcaacaagaatgttatgcctgtgttggcattggtatgcggccccgaaagttatattaatagcatatctggaagaaaatacgatcttaatcagggaccagtaggagggttactttccaaagaaggctggaactccgataatgtgtataaactttcataa

SEQ ID NO: 78572 - DNA, 777 bp, Saccharomyces pastorianus
atgggcagtagatcggagaatgtgggaacagtgactagagaaggctccagagtggaacaagatgatgtcctcatggatgatgactctgactcatcggaatacgtggatatgtggatcgatttatttcttgggagaaaaggccatgaatatttctgtgatgtcgatcctgagtacatcactgatcgttttaatctgatgaacttgcaaaagacagtttcaaaattttcctacgtggtacaatatattgtggatgatttggatgatagtatcctagagaacatgacacatgcccgtttagaacaattagaatcagattcccggaagctgtatggtctcatccatgcacgctacattataactatcaaaggattgcaaaaaatgtacgctaagtacaaagaggcggactttggaagatgtccccgtgtgtattgtaatttacaacagttgttaccggttggtttgcatgacattcctggtatagattgtgtcaagttatattgtccatcttgtgaggatctttatataccaaaatcatcgagacatagttccattgatggtgcatactttggaacaagttttccaggtatgtttttgcaagcatttccagatatggtacccaaacacccaactaaaagatatgttccaaaaatatttggatttgaattacataaacaagctcaactgacaaggtggcaagaactacaacgactcaagttagttgagaaacttgaatccaaagatgttgatttgacgaaaagtggtggttttaaaacctaa

SEQ ID NO: 78573 - DNA, 432 bp, Saccharomyces pastorianus
atgatcaccgctttaatgtatttttcttccaaattgggaaaagcatccttcaattcttgcaatattggattctctttagatggctcctcctcagacttccttctggcaggtaaggggggattctcctcctcctcttcttttgcatcctcagcgggtgtcaccacttcgtcctcatcaattcctgaggacttgttcaccttttcttcaaccttaggtgtaccatccttggcagaagtgtcattatcctttttcccatcggaatttaggtccacatccgtcgtctttgaaatatcctcattaattgattccggaacattactcttttcaaggagagaagaatccttgataccttccttttcttccatgattttgatttggcaatatcgttttgctgggggtggctacttaactagtctcaagctgtttatttga

SEQ ID NO: 78574 - DNA, 1236 bp, Saccharomyces pastorianus
atggaagaaaaggaaggtatcaaggattcttctctccttgaaaagagtaatgttccggaatcaattaatgaggatatttcaaagacgacggatgtggacctaaattccgatgggaaaaaggataatgacacttctgccaaggatggtacacctaaggttgaagaaaaggtgaacaagtcctcaggaattgatgaggacgaagtggtgacacccgctgaggatgcaaaagaagaggaggaggagaatccccccttacctgccagaaggaagtctgaggaggagccatctaaagagaatccaatattgcaagaattgaaggatgcttttcccaatttggaagaaaaatacattaaagcggtgatcattgcgtcccagggtgttttgagcccagctttcaatgccttactattcctatcagatcccgaatctggtaaagatatcgagttaccgacacaacctgtaagaaagaacccagaggcgccggcaagaagacggcaaactcaattagaacaagacgaattattggcaaggcaattagatgagcaattcaacagctcacattcccgtcgtcgtaatcgtgatcgcgcaactagaagcatgcatgaacagcgcagaagacgtcataatccgaacgaaagggagcaacatcacgaagacagtgaggaagaagattcgtggtcgcaatttgtagaaaaggacctgccagagcttacggacagagctggtcggtcattacaggacacagcaaacaaagttagtaactggataagtgatgcttaccggagaaactttgcgtcaggtaatgagcaaaacgacaaccaacatggtcaccaagatcagcaagaatgggagccagagattgtggatttgtcacaaggcgggaaaaattcaagaccccagcaacctgagagaagaagattcaattcgtttggcgttcaagtcggtgatgactctttagaaagccacggaatcacactacacaacgaagatggatttgaagatgatgaagatgtgccacctcagttaccaacgagaacaaaatctggtgagtcggctggaaaagtagtggcagagacaatctacattgatactccagatacagaaacgaagaagaaatggcagccgctaccaccggaacccctggatactacaccaactaaagtaaacgctgtttctagaaataagaaaaatccggatgaggatgaattcttaatcaatagtgacgacgagatgtaa

SEQ ID NO: 78575 - DNA, 1461 bp, Saccharomyces pastorianus
atggacgatataatcacgcaagtttctccagataatgcagagtccgctccgattctacaagaacagcaacagcaacagaactcacagtacgaaggtaacgaggaggattatggtgattcattgattcatttgaatattcaagaaaaccattattttattacgagggaccggttgatgtctctacctgaatccctattactgtgtttatttccctcaggtgtttttttggaccgttgtggtcaggtcattactaatttgaccagagacgatgaggtctacattgttcatttccctcctgattgttttgagtacatcatggagatatatacaaaagcgcatgatgatttgtataatcatcctgtggagaaattttttgacaggccatcaagtagctttgtttcgaatgcaaaggggttttttggactgagtagcaataattcaatttcgagcaacaatgagcaggatattttacatcaaaagcccgctattattgttttgagagaagacttggattattattgtgtacctcaggaggaatttcagtttgattctactaatgaagaaaataatgaggatttattgcgacattttatggctcaagtgaaaatggctgctggcagttatttaacttcaaaaacatcgattttccaaggtttgtattcttcgaatagactaaagcaacaacagcaacaacagaaaattgaaaaggagtccaattcttcttcaaatactaaatctacttcgaaaaaattgggacctgctgaacaacatttaatggatatgttgtgctcctccggattcactaaggaaacttgttggggtaacagaactcaagaaactggcaaaacggttataagttcactgtctctttgccgattggctaacgagacaactgaaggatttaggcaaaaatttaacgaggctaaggctaagtgggaggcagagcacaaaccttctcaagacaacttcatcaccccaatgcaatctaacatatcgattaactatttatctgcaagtaaatctaacagtaccatttctacagcaaggaatttaacaagcggaagtacagcacctgctacagcacgtgataagagaaaatcaaggctgtcgaaactagcagataacgttcgttcgcactcttcctcgagacatagttcgcagaccagaagtaaacctccggagttgcccaaattgtatgatctagtgccaaaacctaatatcaacgctaagctactattattttggagaaaacctgctcgtaaatgttggtggggtgaagaagacatagagctagaagtggaagttttcggctcttggaaagatgaatcaaagaaaatcattgaattgatcttgccaacaaacgttgatcctgaagcagaactacataaaatcattgtacccgtccgattacatattcgtagagtttggactttagagttgagcgttattggggtgcagtga

SEQ ID NO: 78576 - DNA, 474 bp, Saccharomyces pastorianus
atgatagaggcgttggaaatagttctattgctcgttatacaatcacttcaatatatctgtcgcacatgcatagcttttttgctaataccattcttaggcctgtatgcattcgatctcttcctatacgtttatcggatgatactttatctgtcacaaatgttcaactacaagagaaaactaggacgttctaaaacaaataataggccgcatagtcccaggctacataagatatacagtagtggggattgcatggataccttaattggccaagtaagggatttgagagtatttttgttatccacgatccacagccactctaaaagattcttttctacgagatttcagacaaaatcaggcattaactctgctattgacgcgaatgatgttgaaacaacatctgacgtatctagttttacaaatttacatttaacaaggtcatcggaagaaggttattatatcgcaggatcgatataa

SEQ ID NO: 78577 - DNA, 186 bp, Saccharomyces pastorianus
atggacggtatgtttgctatgccaggcgcagctgcaggtgcggcctccccacaacaaccaaaatcaagattccaagctttcaaggaatctccactatacacaattgcactaaacggtgccttcttcgttgcaggtgttgcgtttattcaatctccactcatggacatgttggccccacaattataa

SEQ ID NO: 78578 - DNA, 1449 bp, Saccharomyces pastorianus
atgagtgatacaaagagagatccggccgatttactagcttctttaaagattgataatgagaaagaggatacaagtgaagtttcaacaaaagagactgttaagtcccaaccagaaaagactgctgattcgatcaagcctgcagaaaaattagttccaaaagttgaggaaaaaaaaacaaaacaggaggatagtaatttaatcagctcagaatatgaagttaaggtcaaacttgctgatatccaggctgacccaaattctccattgtacagtgctaaatcttttgatgaattaggattagcaccagaactactaaaggggatatatgctatgaaatttcaaaaaccatccaaaattcaagaaagggcgctgccattattattacataatccgcctaggaacatgattgctcagtctcaatcaggtacaggtaaaactgccgccttttctttaacgatgctaacaagagtaaacccagaagacgcatctccacaggcaatttgcttagccccctccagagaactggccagacaaacattagaagtcgttcaggaaatgggtaagttcacaaaaataaccagtcagttaattgttcccgattcttttgagaaaaacaagcaaattaatgctcaagtgattgttggtacgccgggcactgttcttgacctaatgcgtagaaaattgatgcagctacagaaaattaaaatttttgttttggatgaagccgataacatgttggatcagcagggtctaggtgaccagtgtattcgtgttaagagatttttacccaaggatactcaacttgttttgtttagtgctacttttgccgatgcagttaggcagtacgcaaagaagatcgttccaaatgctaatacgttagaattacaaacaaatgaagttaatgttgatgccatcaaacaactatacatggactgcaaaaacgaagcagataagtttgatgttttaactgagctatatggtttaatgacaattggatcttccattatttttgttgcaaccaaaaaaaccgcaaacgttttatatgggaaattgaaaagtgaaggtcatgaagtttctatcttgcatggtgatttacagacacaagaaagagacagattaatagacgacttcagagagggtagatccaaagttttgattactactaatgtcctggcccgtggtattgatattcctactgtctcaatggttgtcaactatgatcttccaacgcttgctaacggacaagcagatccagctacttacattcacagaatcggtagaaccggtagattcggcagaaaaggtgttgccatttcctttgtacatgacaaaaattctttcaatattttatctgcaattcagaaatacttcggtgatatagaaatgactcgtgttccaacggatgattgggatgaagtcgaaaaaatagttaagaaagtgttaaaggattag

SEQ ID NO: 78579 - DNA, 1335 bp, Saccharomyces pastorianus
atgtttgtttcaccacccccagcaacagcgaggaaccaagtattagggaaaagaaaatcgaaaagacatgacgaaaatccaaagaatgttcaacccaacgctgacacagaaatgacaaatagcgttccttctattggattcaacagcaatcttccacataataaccaagaaataaacacaccaaatcactataatttgagttccaattcaggaaatgttaggagcaacaacaattttgttactacaccaccagaatatgcagacagggcaagaatagaaatcataaaaaggttattgcctactgcaggaactaaacctatggaagtgaacagtaatactgcagaaaatgcaaatatccaacacataaataccccggacagtcaaagttttgtttcagaccattcatcttcatacgaatcgagtatattttcacagccatctactgttcttacggacatcaccacaggcagctcgttaattgatacaaaaacacctaagttcgtcacagaagtaacacttgaagacgctttacccaaaacattctatgatatgtattctcccgaagttctgatgtctgatccagcaaatatactttataacggacgtcctaagtttacaaagcgcgaattgctggactgggatctaaacgatatacgatccttgttaattgtggaacaattaaggccagaatggggttcccagttaccgacggtagtgacctccggtataaacttaccgcaattcagactacaattacttcctctaagttccagtgatgagtttataatagcgacattggttaactcagacttatacatagaagcaaatctagaccgcaattttaagttgacaagcgcaaaatatacagttgcatcagcaagaaaaagacatgaagaaatgactgggtcaaaggaacccattatgcgtctatcaaagcctgaatggagaaatataattgagaactatttattaaatgttgccgtcgaggcccaatgcagatatgactttaaacaaaagcgttccgaatacaagagatggaaattactaaattcaaatttgaaaaggcctgtcatgccgcctccaagcctcataccgcatggttttaaaatacatgactgcactaactctggtagtcttttaaaaaaggctttaatgaaaaatttgcaactaaaaaactataaaaatgatgctaagacattaggtgctggtacacagaaaaatgtcgttaataaggtttctctaacttcagaggagagggctgccatctggtttcaatgccaaacacaggtttatcaaaggttggggttagattggaagcctgatggaatgtcctag

SEQ ID NO: 78580 - DNA, 453 bp, Saccharomyces pastorianus
atgtctgatataaacgaaatcgaaattccatccagaaaggatgaaattagacaagttactcccaaagatcccatgcatgagatcgaggataaaagcacataccacgctaagataaagaaatcagattccgggaccgtcctgggtgctataccgttgaattcaaggtcttctagtaactctagcgtgacatcgacgggtcagagcagtaggcgggtgactaagaaaacgaccaagaagaaaaagaagaatgcttgttatttcgatacctgttcaagtgcggcttcgaaattcatcggtgactgtaatttttgcaaaggtcacttttgctcgaaacacagattaatggaaaaccatgcttgtaatggcttaacgagctgcaaagaacagctacatcaaagaaacgctgataagctagaagctgaacaaactaaggctccaaagatacaaatttaa

SEQ ID NO: 78581 - DNA, 276 bp, Saccharomyces pastorianus
atgaaattagtcctatttaagatcgctgtagccctcctttatcttctttcttttttccttcatcgtcgtcgtcgtcgtcgtcgtcgtcatcatcatcatcatcgtcgtcgtcgtcgtcgtcatcatcatcatcgtcgtcgtcgtcgtcgtcgtcgtcgtcattatcttcatctttaccaccagtatcgttcttcttattatcatcctcctcatcgttatcttcatcctcttcttcttcctttcccgcagaaacatcgggataaccacctagtttga

SEQ ID NO: 78582 - DNA, 435 bp, Saccharomyces pastorianus
atgtgtacagacgttgctttcttttcgctggactgtctggccacctggttaggtggagtttgctccacatctgatctgagactacccaactttggatcgctgaatgtaacagttggtatcctttttaaccctggctctggtgtattacttacaactgccccagaagttccgctagcattcatgattgacttagtttgtgaaccagtgggactagttgatttccttactacaggagtgtccagactagaaacggaagaaaatggtcccgtagaatttgtgtcaggcattgccgatgaacctatattggcctgctcagctccagagagagtattcgaagcaacccctttcctattgtttttcaggctagatttgtttgtcattgcgtctctgcactataattatggccagtattcctctttctggtctcttctttga

SEQ ID NO: 78583 - DNA, 1380 bp, Saccharomyces pastorianus
atgaccgaaaaccaaaccgcacatgtaagggcgttgatattggatgccaccccattaattacgcagtcatacacacattaccagaattatgcacagtctttttatactactcccacagtttttcaagaaattaaggatgctcaagcaaggaaaaaccttgaaatttggcagagcctcggaactttgaaattagtacatccaagtgaaaactcgatagccaaagtaagtacgttcgccaaattgaccggtgactactccgtactgagtgccaatgatttgcatattcttgctttgacatacgagttagaaattaaactaaataatggcgattggagactgaggaaaaaaccaggtgatgcattggatgcgtccaaggctgacgttggtacggacggcaaacagaagctcacagaagataataaaaaggaggaggactctgaaagtgttccaaaaaaaaagaacaagagaagaggtggaaaaaagcaaaaggcaaaaagagaagcaagagaagcaagagaagctgaaaatgcaaaccttgagctagagagtaaagctgaggaacatgttgaggaggctggatccaaagagcagatatgtaatgatgaaaatataaaggaatcttccgatttaaatgaagtattcgaggatgctgatgatgatggcgattggattacccccgagaacttaacagaagcaattattaaggatagtggtgaagataccactggttcattgggtgtagaagcgtccgaagaggatcgccatgtcgcattgaatcgaccagagaatcaggtggcattggcgactggcgattttgccgtccaaaatgtagcgttgcagatgaatctaaatctaatgaatttcatgtcaggtctgaaaatcaagcgaatccgtaattatatgctaagatgccacgcctgtttcaaaatatttcctctaccaaaagacggcaagccaaagcacttctgtgcctcatgcggtggacagggtaccttattaagatgcgcagtttccgttgactcacgcacggggaacgttacaccgcacttgaagtcgaacttccaatggaacaatagaggaaacagatattctgtagccagccccttatctaagaactcccaaaaaaggtacggcaaaaagggacatgtacattctaaaccacaggaaaatgtgattctcagagaagatcaaaaggagtacgaaaaggtgataaagcaagaagaatggacaagaagacacaacgagaagattctaaacaattggattggtggcggttctgcggataactatatttctccatttgcaattactgggttgaagcagcataacgtccgcattggtaaaggaaggtacgtcaacagttccaaaaggagaagttag

SEQ ID NO: 78584 - DNA, 1188 bp, Saccharomyces pastorianus
atgcctgttgaaaaagatttaaaaactgcctacaaagctttgtatgatgagaaggaaccactgaaggccctccatctttatgatgaaattctcaaaggctcacccacaaatttaacggctctcatttttaaggcagcatgtcttgaaaagctatactttgggttttctgattggcacagcgatgcaactatggaaaacgcaaaggaacttcttgacaaggctctaatgacagctgagggtaggggcgatagatcgaagattggtcttgttaactttcgttattttgttcatttcttcaatatcaaagattatgaactggcccaatcttattttaaaaaagccaagaatcttggttacgttgatgacactttgcctttatgggaagatcgtctggagacaaaattgaataaaaaaaataaaaagcagaaggattcaactaataagcatacaattaaaccagtggaaagtattgaaaacagaggagataataattcttctcatagtcccatttcacctctcaaaattgaaatcgctcctcaagaatcccctaaatttaaaatcgattggtatcaatccagcacctctgtcactatatcattatttactgttaatcttcctgagtctaaggaacaagtcaatatatatatttctccaaacgatagaagaactttatcgatatcgtaccaagtaccgaaatctggatctgaatttcaatacaacgctaagctttcgcatgaggtggatccaaaagcagtgtcattaaaaattttcccaaaaaagctggaaattaccttgagcaaaattgatagcacgcaatggaagaagttggaagaagatattttaacggaatcctcaaggttatcagatgagggtaaaaattctgattctgcaacccgcttattatcagcagaaacggcatcaaaagagagattgtcttatccatcgtcctctaaaaaaaaaatagattggtctaaacttgacattgatgaagaagctgatgaagaagcgggatcggctgatagtttctttcaaaagctttacgctggagcggatccagataccaaaagggctatgatgaaatcctttatagaaagtaatggtactgcattgagtacagactgggaagacgtatctaagggaacggttaaaacttcaccaccagaaggcatggaacctaaacattggtaa

SEQ ID NO: 78585 - DNA, 2658 bp, Saccharomyces pastorianus
atggagacagcaacttcttcccctttgcccattaaatcgaggagaaacagcgaaaattctgggtctactacagttataccgcatatgaacccttctttagcaacaccgttgactgtgtcgaccatggtaaatcaatcaaattctaaagaatttatgaagttgaccccagttcgtattagagattttggttctcctttgaaaaacgtgtccactaattaccattttttagactcagaaaatggtaaaggtaacacaatggataatatgtatagagaaaatttcattcttatttcaaaggatctagagaaattactggagaatctcaatgtcatatatcaaaatattgggtattctaatacggaaattatcaccaaggagaaaatcatattcaccactatatctaattccataaaacaattttttgagcaagctgacgaagaattgaaaagactgtccgcagagaacggaattgaacaggatattctaaataacattctagagagaataaatgacccaagtggcataaagactattcctgacttatacattagaaatgctattctactgcaagaaagtaaaactgtgccacagtcaccgaaaaagccactttccttactaagcaaaaaagcagcattagatacagcaaaaaaatttgtcctaggaagttttttacccaggctccgcgactatttaaaatccttaatcactctaaaacacctcatacaatctgtaaaagaaaaccttcctggattgacagaagcagataacgaggctatcgccgagtttccagaattaagcacattaaccgcatatttgtcacaaatagaaaatggtaaaggcgatattggtttgtccatgaaatttattatagataatagaaaagatattttaaagggatcggcatttaaaactattaacgaagaatctgtgaaacacatgaatgaagtcataaaaatttacgaggaagaatacgagaggaggtttaaaagcgtactcacaaaaaaggttagtatttcatcaatatgtgaacaacttggaactcccctagcaacgttaatcggtgaagattttgaacaagatctaagatcatatggagaagaggaaaactccacatcagaaataccaaatttccacccggtagacagagaaagaatgtctaaaattgatactacattggaaaaactgcaagctatccataaggaaagagcagacaaaaagaggctcctgatggaacaatgccaaaaactttggacaaggctaaaaatttctcaagaatacataaacacttttgtgcgtaacaattcaagcttatcaaccgagtccttaggtagaatctctaaagaagtaatgcgacttgaagcaatgaaaaaaaaactaataaaaaaacttatatcagattcctgggacaaaattcaggaattgtggcgtacgttacagtattcagaagaaagtcggtctaaattcatcattgtatttgaagaactaaggaacagtgcaacaactttacaggaagatgagcttcttctagaaacttgcgaaaatgagctaaaaagactagaagaaaaactgaccctttataagccaattttaaaattaatatcagattttgaatctttacaagaagatcaagaatttttggaaaaaagttcaaaagactcttcacggcttttgtctagaaattctcataagatattactaactgaagaaaaaatgaggaaaaggataacaagacactttcctcgagtcatcaatgatttaagaattaaattagaagaggccgatggtctatttgatcaaccttttttgttcaaaggtaagccactttcagaagcaattgacattcagcaacaggaaatcgaagcaaaatatccaagatgtagagttagaatgcagggatctaaaaagggaaaatgtggtgcgaacaaagagaataaagtcataaaaaacactttcaaggccacagaaagttccatcagggtaccgattggtttgaatttaaatgatgccaatattacttataaaacgccttcaaagaaaacaatacaaggcttaacaaagaatgatctatcccaagagaactcgcttgctcgtcatatgcaaggaacaacgaagttatctagtccgaacagaagagcaacaagattactagcacccacagtaatatctaggaattccaaagggaatatagagagacctaccttaaacagaaacagatcatccgatctttcatcatcgcctaggataaatcatacgcatggcgaacatgcagtaaaaccacgccaattgtttcctatcccgctgaacaaagtcgacactaagggtagtcatatccctcaattaactaaagaaaaggctttagaacttcttaaaaggtcgactggcaccacgggtaaggagaatgtacgaagcccggaacgcaaaagctcattagaagattacgcacaaaaattgagcagtccttataaagaacctgagcacagcatatataaactttccatgtcgccagaaggtaaatttcaattaaacattcaacaaaaagatattgaaagcggatttgatgataccagtatgatggaagatgaaaatgataaggattttattacatggaaaaatgagcaagtttcgaaattgaatggattctcctttacagatatttga

SEQ ID NO: 78586 - DNA, 774 bp, Saccharomyces pastorianus
atgtcacggaaattatgcacactaaattttactcttagcggaaagcagggaagtttggtcattagggatatccaactttggagcaatcgacctacagcaagtaaatcaacttcagagttgaggggacaattcattcagtatgtagatctcgcaaaactgcctttgtgggtccgctccacaaatatgaatacatatagatgttatagtaccagtgcaaccgcacaggcttacttcaaatcaaaactaaggaacgcgaatcgtggcattgtcattgaattgtctgacaaggttgatcagcgatcgcaggagccagcatacttgattatatttcgagagaacacagagttaaactgctttcaagtggatctaacaatgaagcatgagtttgatggccaggtcaccaaattgaagcaagagattggaaagacaagggcctccgtatcaaaggaaggtagtattgatataataatacaacaatctcaacaaaggaagatcggaacgaaaacgaaagtgtatcgcaacgtgcatattaatgacaaacggcttcaattcaatgaaactttgtccaagctaattttgggtggcctccgacttcgaggtatttctaattctattacagactatcaaaagttatacaagataacgtttgatgcagctgaatttacgcacagggatgaattaaaacgcatttcgatgggatctggtgaagaggtttcgtttgaatcattgcaggaaactgtggaaactcttctgaagctctttaccaaatcatga

SEQ ID NO: 78587 - DNA, 1020 bp, Saccharomyces pastorianus
atgccattacctccgtcaacattgaaccagaaatctaatagagtctactctgtagctagggtgtacaagaatgcttgcgaggagagaccacaagaatactgggactacgaacaaggggtgaccatcgattggggaaagatttccaattacgaaattatcaacaaaattggaagagggaaatattccgaagtgttcagcggtagatgtattgtaaacaaccagaagtgtgttattaaagttttaaaaccagttaaaatgaaaaaaatttatagagagttgaaaattctgaccaatctaacaggcggccccaatgttgttggcctttatgatatagtacaagacgctgactccaaaatacctgctttgatctttgaggaaatcaaaaatgttgatttcagaactttatatcctacattcaaacttcctgacatccagtattatttcacgcaattattgattgcgttagactactgtcactccatgggcataatgcacagagacgtaaagcctcagaatgtcatgattgatcctacggaacgtaaactaaggctgatcgattggggcctggcggagttctaccatccaggtgtagattacaacgttcgtgtcgcttcgcgttaccacaagggaccagaacttttagtaaacttgaaccaatatgactactccctagacttatggtcagtaggatgcatgctagcagctattgtcttcaaaaaagaaccttttttcaaagggtcgtctaatccagatcaactggtaaagattgccacagtactaggaaccaaggaactgttaggctatttgggtaagtacgggttgcacttaccatctgaatacgacaacattatgagagactttacaaaaaaatcgtggacacactttataacctctgagaccaaattagctgttcctgaagtggttgatttaatcgacaatttattaaggtatgaccatcaagaaagattaacagcaaaggaggctatggatcataagtttttcaaaacgaagtttgaataa

SEQ ID NO: 78588 - DNA, 807 bp, Saccharomyces pastorianus
atgactagtttagatgacagtgtgctgacaaaaaaaaatatagcactattagacaacgccaccaactatattcgccccgccatagattattttcatttcaaatttaaatatgatagcttggacgtgtccactacctggcgcttgttgctgaaaatgcgcaagcataaattattgcggttacccagttgctcttctgaaaatgagtttgactatagcatatatatggctaggttgtatcattgtatatggaggaggtggtccataaagcacttcaatttagatgaatacaaaattgatccactaagcataaactggaataaagaaatagacgttactgttctttacggacctgatctggttggaatacatgaaagagcgcaacctactccaacggactttcctatggggaatataaaggaacaagggaagcaattattggatgtaagaaaggagggaagtggttcttcattgctgaaaaaaggcagcgtattttactcaaagggtaaatggctctctcagcgttcaatatcattcgatgacactgttcgtaggcgagatattgacaaacgtgggagatttcgtgaatcatgtgttctaataaatgatgtagaacaatttcaaaactattccattgtctgggacgagagtagacatcgctaccgtcggcaggcacttccagacacgtacgattacgagcatctctatcccaatggcgacgaaactcctcggaacacgcctcacgacagtataataattcatcaaaacttgcatagcattacggaaggctcttatatctatataaagtga

SEQ ID NO: 78589 - DNA, 1164 bp, Saccharomyces pastorianus
atgtctcacagaaagtacgaagcaccacgtcacggtcatttaggtttcttgccaagaaagagagctgcctccatcagagctagagttaaggcttttccaaaggatgacagatccaagccagttgctctaacttccttcttgggttacaaggctggtatgaccaccattgtcagagatttggacagaccaggttctaagttccacaagcgtgaagttgtcgaagctgtcaccgttgttgacactccaccagttgtcgttgttggtgttgtcggttacgtcgaaaccccaagaggtttgagatctttgaccaccgtctgggctgaacatttgtctgacgaagtcaagagaagattctacaagaactggtacaagtctaagaagaaggctttcaccaaatactctgccaagtacgctcaagatggtgctggtattgaaagagaattggctagaatcaagaagtacgcttccgtcgtcagagttttggtccacactcaaattagaaagactccattggctcaaaagaaggctcacttggctgaaatccaattgaacggtggttccatctctgaaaaggttgactgggctcgtgaacatttcgaaaagactgttgctgtcgacagcgtttttgaacaaaacgaaatgattgacgctattgctgtcaccaagggtcacggtttcgaaggtgttacccacagatggggtactaagaaattgccaagaaagactcacagaggtctaagaaaggttgcttgtattggtgcttggcatccagcccacgttatgtggagtgttgccagagctggtcaaagaggttaccattccagaacctccattaaccacaagatttacagagtcggtaagggtgatgatgaagctaacggtgctaccagcttcgacagaaccaagaagactattaccccaatgggtggtttcgtccactacggtgaaattaagaacgactttatcatggttaaaggttgtatcccaggtaacagaaagagaattgttactttgagaaagtctttgtacaccaacacttctagaaaggctttggaagaagtcagcttgaagtggattgacactgcttctaagttcggtaagggtagattccaaaccccagctgaaaagcatgctttcatgggtactttgaagaaggacttgtaa

SEQ ID NO: 78590 - DNA, 930 bp, Saccharomyces pastorianus
atgttttcaaatctatctaaacgttgggctcaaaggaccctctcgaaaagtttctactctaccgcaacaggtgctgctagtaaatctggcaagcttactcaaaagctcgttacagcgggtgttgctgccgccggtatcaccgcatcgactttactctatgcagactccttaactgccgaagctatgaccgcagctgaacacggattgcacgccccagcatatgcttggtcccacaatgggccttttgaaacatttgatcatgcatccattagaagaggttaccaggtttaccgtgaagtttgtgccgcctgccattctcttgacagagttgcttggagaactttggttggtgtttctcataccaacgaagaggttcgtaatatggccgaagaatttgaatacgatgacgaacctgatgagcaaggtaaccctaaaaagagaccaggtaagttgtccgattacatccctggcccatacccaaacgaacaggctgcaagagctgctaatcaaggtgccttgccacctgatctatctttgatcgtgaaagctagacacggtggttgtgactacattttctctttgttgaccggttatcctgatgaacctcctgctggtgtggctttaccatcaggttctaattataacccttacttcccaggtggttccattgcaatggcaagagtcttgtttgatgacatggttgagtacgaagatggtacccccgcaacgacatctcaaatggcaaaggacgttaccacctttttaaactggtgtgccgaacccgaacatgacgaaagaaagagattgggtttgaaaacggtgataatcttatcatctttgtatttgctatctatctgggtgaagaagttcaaatgggccggtatcaaaaccagaaaattcgttttcaatccaccaaaaccaagaaagtag

SEQ ID NO: 78591 - DNA, 1890 bp, Saccharomyces pastorianus
atggataaaagcatgatcaaaaaaagaggcaggcctcccatcaccaaagattatcccaatcccctacaaagccccatggcgcattcttcaatgcaggttcagaagcaggggcctcacagttttgccaaacctttgatgaaagtggggcaatctagtccatccccgaataaaagaagactcagcatcgatcatcatcataatttggcggcaactacgagaaagggcagatacaggggcgttcttctttctactcccaccaagaaatcgagcactaatggctctacgccgatctctaccccgtcttcgaatgacagctataataacacggtattttctgaaacaaggaaaacctttcttcagagttcgccgcctatcatgacgtcttctccagctttccaaaagaaaaatgactacatgtttccttcacaggaccaattcaaactttctttaaccattaccgaaagtgggaaggccgttattgcaggatctttgcctttctctccatcgtcaaaatcgtctcatttaatgaacaataataataaaaagatcatgcaaaatgaaaaaattcacaaaggaagcaagaaaaatgcacccaagtttgagaagaaacgtattctttctctcttaaaacagatgaagaatgagaaatactgtgatactgatacgctccccgaagcacctccagcgaaaccaagcagatctgacatcatcgacacagaattgccgactatcatagaaacttcagcttctccaataggcagtgctagaaacaataatatattgctttcgcaaccaccacaatcacccccttcaagcgcgcaacttaagcccccatccactccaaagagttctctacaattcaggacgggatttactcccaatgttgcactaaattccgtatcattaagtgatactatatccaaatctacaaatgctgtgggtgccagcaataataacaatcagaacggtaattccattagcaatatcgcggatgctaatactttacttaccttgactaatagcccaggagttttcttatcacctcgaaacaaaatgttgcccaagtcgactactgcatctaacgaacaacagcaggaattcgtgtttaagttttcaagtggtgacccgttattgcttactgacgacgcagatgggaattggccagaaatgctgttcaatgtatctaatacgcccagacgtcaaaaatgttttaatacacctccttcatggataaactttggttcacctggattattcagcccaccaagaagctctaatgtcatggtaaatggcaccactgtagccaccgcatcggatagcggcaacgtccatagacaattacaagctcaattggaggcgcaagtgcaagtgcaatcgcaatccaattctcctactcaaaggcaacaacaacagcgtcaatttcaaatacccccacctcacataaacatgaactcttccccgccacaaatcaatatcgcttccccaccccatcaatctatgtctcgggtgtcatctatttacttcaacaaagaaaaaaccacaacaggggtagcaaatatgctaggtaacaccaaaagcgaaaacttacagccgccggcgaatttatttaccgctgcccatggaccttcaactcctagaaatcaagaatttcaattacccactttgattgaatgcactccattaatccagcaaaccatgaatggctcattgggaaccaagtacataccaggtacttccatttcgaacagtgcaactcctaatttacacgggttccctgttggaaccgggaaagctccctctagctttgacgattcactaaaacaaaacccgtacagcaacaaacaggatgatgctagaactgccttgaaaagattaatcgatgatcagtga

SEQ ID NO: 78592 - DNA, 345 bp, Saccharomyces pastorianus
atgctttttgaagtatttggtgaagtgttagcatcgtatatcgtatcgtcaaaaactaagggagagttggcgtttccagtgaacaatgcgccaccggattctcttgttgcaataaattgtgtagtgctattcttgagatcagcaatcggatcctgttcaggggctaaagaattaataagatcgtcagctttggaattgtcatgctcctctagttgcggattaccagccaccgacaaaccagggtctttccattctggcgcactatccaagtctatcttgtccgcaaatgaagctgtggtctctaaaagctcattgtcttttctttcttcatttgtagatatttga

SEQ ID NO: 78593 - DNA, 1914 bp, Saccharomyces pastorianus
atgggtgtgagatccgctgcaaaggaaatgcacgaacgggaccataattcggacagttccagtttagtaacttccctgatgaaatcttggaggatatcgtcggcttcttcctccaagaagccatcgttatacaaaatgaatactactgaatctactagtttaccctcgggttatgcttcctcggcagatagagatcggagaaccagtgacggtaattttgaagctatggcaaagcaacaagcaagcactagacgtacctcgaattcctattcacctctacgatatgtaagccccactctaagcactgcaagtaacgaaagtccccggcctgctttactcttacgtcagcatcaccagcgtcatcaccaccatcaacaaccccgccatagcagtagtggtagtgtaggcaacaattgcagtaacagtacagagcctaacaaaaagggtgatcgatatttcaaagacttagatgaggattggagtgctgttattgacgattataatatgcctattcctatacttactaacggtggatttggtacacctgtagctccaacgagaactttgtcgcgaaaatccacttcttcttccatcaattcgatttcgaatatggggacctccgcagtacggaattctttctcctcttttacataccctcaattaccacagctgcaaaaagagaaaacaaatgattccaagaaaactcagttggaaatcgaaaacgaacgggatgttcaagaattaaactccatcatccagcgcatttctaaatttgacaatattttgaaagataagacaatcataaatcaacaggatctgcgccagatcagttggaatggtatcccaaaaatacacaggcctgttgtttggaaattattaataggttatttgcctgtgaacaccaagagacaggagggtttcttacaaaggaagaggaaagaatatagggatagtctgaaacataccttttctgaccagcactcaagagatatcccaacttggcatcagatagagatagatataccgagaacaaatccccacattcccctctaccagttcaaatccgtacagaacagtttacaacgaatactatatctttgggcaatcaggcatcctgctagcggatatgtgcaaggtattaatgatttagttacaccatttttcgagacttttcttaccgaatatctgccgccttcacaaatagatgatgtagagataaaggacccctctacttatatggtagatgaacagattacagatttagaagcggacacgttttggtgtcttaccaaattgctcgaacaaattaccgataactatattcacggacaaccaggcatattaagacaagtgaagaatttgagtcagctagtgaaacgaattgatgctgatctatataaccattttcaaaatgaacatgtggagtttatacagtttgcattcagatggatgaattgccttttgatgagagaatttcaaatgggtacagtaataaggatgtgggacacatatttatctgaaacttcacaagaggtcacttcttcttattctatgtcgtccaatgacattaaacctcctgttactccaacagaacctcgagtggcaagttttgttacaccaacaaaagatttccaatctcccaccacagctctttctaatatgacaccaaacaatgctgttgaagacagtggaaaaatgagacagtcttcgttgaatgagtttcatgtgtttgtttgtgctgcattcctcatcaagtggagtgaccagctaatggaaatggatttccaagaaactataactttcttacagaaccctcctacaaaggactggactgaaacggatattgaaatgcttctgagcgaagcctttatttggcaatctctttacaaagatgctacgtcgcactggctgtaa

SEQ ID NO: 78594 - DNA, 1797 bp, Saccharomyces pastorianus
atgagcttcagtagtatagtctcaaagtttttgagatatttagaaattcctgccaaaaataggactgccgtgaattttctgaggaaccctgatttgcaacctatcaagtctgcaaatcaaacatgggggttctggtctaatttggcgtactggggcgctgtgtcctttacagcaggtacatggatgagtggttctgctgcactaagtgtcggcctaagttacccagagaccattgtttcgtttcttctcggtaatgtcttgaccattattttcactatggccaactcttaccccggttatgattggaaaatcggtttcaccttggcccaaagattcgtttttggcatttacggttcagccttcggtatcatcattagaattttgatgagtattgtcaattatggttccaacgcttggttgggtggtctatctatcaacatgatattagattcctggtcccaccactatctgcacctgcccaatactttgtccccaagtgttgccatgaccaccaagcagttggtcggcttcattattttccacgtcctcaccgcgctctgctatttcatgaaaccctaccatatgaactaccttttaatttggtcatgtgtagctacttgctttgccatgctgggtatagtgatttacttgactaagaatgcccatggtgtcggtgaattgtttacctccacaaaatctaccgttactggttctaaaagagcatgggcttgggtttacatgatttcatactggttcggttccatttctccaggttccaccaaccaaagtgactattcaagattcggttcctccaatttggctatctggaccggtagcgtctgtgcattactaatcccagcaaccttggtcccaatcttcggtgtcattagtgcctccacctgcgacaaattatacggtaaacaattttggatgcccatggatatattcgattattggttgacaaacaactattctgcaggcgctcgcgcaggtgccttcttctgtggtctttgctttaccatgtctcaaatgtcctccaccatctccaactgtgggtttgccactggtatggatatggccggtttgttgcccaaatacgtcgatatcaagagaggtgctcttttttgcgcatgtatctcctgggcttgtttgccatggaacttctacaactcttcttctactttcttaactgtcatgagttctttcggtgttgtcatgactcctattattgctgtcatgatctgtgataactttctgatcaggaagaggcaatattccattactaatgcctttattctaaagggtgaatactattttaccaagggtgtcaactggagagctatcgttgcctgggtgtgtggtatggctcccggtctacctggtatcgcttgggaagtcaacaataactatttccacgactcaggtattgttaaattcttttatggtgattctttcttctcctttttgatttcttttttcgtttactgggggctatgtgtcttcttcccattcaaaattactgttagacatgatgacaaagattactatggtgcatttaccgacgaagaagcgagaaagaagggcatgattccatacagtgaaatttctgaggaagaaatccgtgcttacacgttaggcgaatgctacacaactggacacgaatacaaacctgagagttctgataacgaatcacctgaattgatcaaaactagctcagaaaacactaacgtatttgaaatcgttcaccaaaaggatgatgaaaagcactcctttagtaccactcaacaagttgtctga

SEQ ID NO: 78595 - DNA, 315 bp, Saccharomyces pastorianus
atgctgacgaaagttgtgttcctctttttttggagcaggtctgactcaactaaaaagctagctgcatgcaaccacgctacattggcacactatatcctgacgctcgcgctatactctgacgcctgcgctatatattctgacgcctactccataactattatagtagtggccactgttgttcgtaacccggcgcggtgttcgctccgagcacgaaaattctgtcgtttattctcttccttcttccagttccattacttaaaggagctgttttatttcattcgaaagcccgatgacaaattctcctctttcatataa

SEQ ID NO: 78596 - DNA, 249 bp, Saccharomyces pastorianus
atgacaaattctcctctttcatataaattaataaggcggtcagcaggaaactcctattgccaaccgtcttgcgaaccgaccggtcgctgcgcgcgatcatgcgtccacgcgcttctgtggcgacggacgactacagcaagacattactctggtcatttacgcctggcgcccagaatgtacaagcgcagacggccagatcatatgatgaaacggaatagtcccagctataccggtgatcacaagacgtag

SEQ ID NO: 78597 - DNA, 162 bp, Saccharomyces pastorianus
atgattctcgctttgggcgacttcctgactaacaggaagacaaagcatgcgagaggccctgggttcaattcccagctcgccccttttatttttgattatttatttcctattggtcgggtaacagattttttttatttttttcaaggcccttttgttttgtaa

SEQ ID NO: 78598 - DNA, 1773 bp, Saccharomyces pastorianus
atgccgaagagaaaaattgctcctaacaaggaaagcagcaggcgtacggtctcccacgatgatttaaccccacaaatacaagaatttcaaaatctaatggatctcgaatcgcaaaaagtggaaaacatcagacagtcgtattcgaggcaaaactccctgctggccaaggataactccatattgaaaattaaagttaatagcttggaaaaaaaaataagccagctggtacaagaaaacgtgactctacgatctaaaacctctataagcgaagctatctacagggaacggttaagtaatcaactacaagtcattgaaaacggtattattcaaagatttgacgaaattttttatatgtttgagaacgtacgtaaaaacgaaaatttgcccagttcgagcttaagaacaatgttgaagagaacgagttccaggtcaagatcatgctcattgtcatcacccacatactcaaaaagttacactaggttatcaaatcacgagaataacctgtcgcatgaatcaagttttaacaaggacgatggtccagaccttgaacctaaggctaaaaaaaggaagagttctaggcggcaatctatgtttgtatccacgagtttagaacctgaagacgaaaccggtgaaaacgaagccatgatggaaaattcctctgtagaggtaccggcagaatcacacgagactgcgcaagtggaggaaacaatggatgccttaaaccctgaagaggaaaatagcgattctgtcagtaattttaccaattcaattatagaatactccataccagaggagaatccgacagaacccgagcattcatcttctaaactagaaatattcaatgacagtacgaatatgctaagtacagtgccgtcaaatcctttaccgttacctttaccaggcccatccgcaactttacctagtaccactagcgatgcttcaacggtctatccttcatcaagttcttctactaattctcatccaaagaccaaaattaagcattccatgaagccgcctaggatagaactgaagaaaaaggttattgacgaagtcatgcccgtaagtaacatgagcagcaacagcgaaatatcatttacgagaactagaagaactcgtggtaaagctgtagattacactttaccttctttaagagccaaaatgagaaggccttcagaaaaacttgtggatgctactactgtgattgatatacatgatctacaggtttccaagagaaatcgggaaacttcacataaaaggaaaagtttatcccaagattcaatacccgacgaaccgcaattgagagaagtcgtcgtctcaaaagattatggaactccaaaagggaaaaaaacggaagatgaaatacacgaggataccgcttatctaatggccacttccaacaacaacagcaacaacaaaaacgaaaaaaaactaactagcaacaatagccctaaaaaatcgtcacctttacttgacattacaaataaatcggagaataaaaaaaagtcaacaagaactaaaaaattgttcaaaaatgcaattgtcaataatttatctgatgaaaattctactacgcgaccctccaagtcgtcaaagggaaccagtaataataacaacaattacaacaatttcgacaataacaattcaaacattaataatgttaataataaatctgttagctttagactaaatgaagatgatttagcagtatttgatttatttggaaatggtaaggcagtgaaacatcaaccaaaaacatatcgcaccaaaaaatga

SEQ ID NO: 78599 - DNA, 915 bp, Saccharomyces pastorianus
atgactatggacggaaaaaacaaagaagaagagcaatatcttgatctatgcaaaagaatcattgatgaaggtgaatttaggccagatagaacaggcactggtacgttgagtctttttgcaccaccccagctgcgttttagtttacgtgatgataccttcccactactaacgaccaagaaggtctttactagaggtatcatacttgaactattgtggtttttggccggtgatacagacgctaacctattgtctgagcaaggtgttaagatttgggacggtaatggatctcgtgaatatttagataagatggggttcaaagataggaaagtaggagatctggggcccgtttatggatttcaatggaggcattttggtgctaaatacaagacgtgcgatgacgactatactggacaaggtattgatcaattgaaacaggttattcataaactaaagacaaatccctacgatagaagaatcattatgagtgcctggaacccagctgattttgacaaaatggctttgccgccatgccatattttttcacagttctatgtcagtttccccaaagaaggagaaggatccggtaagccccgcctttcatgcttattgtaccaacgttcttgtgatatggggttgggagtaccatttaacattgcatcatatgctttgttgactagaatgattgctaaagttgtcgacatggagccaggtgagttcattcatactttgggggatgcacatgtttataaagaccacattgatgccttgaaagaacaaatcaccagaaatccaagaccattcccgaaactaaagattaaaagggacgttaaagacattgatgatttcaagttgacagactttgaaattgaagattataatcctcatccaagaattcaaatgaaaatgagtgtataa

SEQ ID NO: 78600 - DNA, 234 bp, Saccharomyces pastorianus
atgatacctctagtaaagaccttcttggtcgttagtagtgggaaggtatcatcacgtaaactaaaacgcagctggggtggtgcaaaaagactcaacgtaccagtgcctgttctatctggcctaaattcaccttcatcaatgattcttttgcatagatcaagatattgctcttcttctttgttttttccgtccatagtcatcctgtaccgttctgttatgaagctctctccttga

SEQ ID NO: 78601 - DNA, 1041 bp, Saccharomyces pastorianus
atgatgtctgatttaacaccaatattccgtaagtatgttgctgttatcgatgatgctagaaatgagcaaaatagtatagatgatcatgttgaaaggaaacaagaggacttcgggaattctaatggaacgtgtgaaatgtttagggattcgttcattaaggaatgtgcaagactattgaagttcctagtcgaattaaacaaggtaataaaacagattgaaaaaaactatttagatgactttaatatgagtgatgcggaaaaggacgagtttgacatggaatgcaggctgcaaattcaacaatatttcaaaaagtttgaattcctagagaattacgaaatggaaaggcatagtttgtcgctgaaaagatttcagtcaaagtctcacagatggtcaaaaatactttccaataaaaacgacaacactaagcatgtgatacatccgcaagacattgaaaatggagttcatgaatttagattaggtgtcctacggtgtttgaatttgtggataaaatatgtttcatccaaattcactaccatacaacaggaaagattgatattagaaaataaaatgaatttcaattcaacgcctatgcctactttatccaacaatgcggatgatttctctgcagatgcaatagacatctcagtgtcacaatctgctcccgtagaaactgtacaagacgaagtaaaacattatgaagagacgatatccaaattaacccgggagcaactacaagtgttggagacagaacattcggaactgctaaatcaaaaaaatgagcaattgaaaaaagtggagactataaacaaaacaattttagacattgtcaatatacagaacgaattgtccaatcatttaacggtgcaatctcaaaatataaatctaatgctgaacaatcaagatgacattgaattgaatattaagaagggaaataaagaattacgtaaagcgaaacgagctgctggaagaactgctaaaatgaccacttatggtgccattatcatgggtgtttttatattgttcctagattatgtaggttaa

SEQ ID NO: 78602 - DNA, 2244 bp, Saccharomyces pastorianus
atgtcgttattagagcaattagcaagaaaaagaatagaaaaatctaaaggccttttaagtgcggaccagtctcatagtacatcgaaaagtgcatccttactagaaagactacataagaatagagaaactaaagataacaatgctgagacaaaaaggaaggatctgaagacgctacttgcaaaagacaaggtaaaaagaagcgactttaccccgaaccagcatagtgtttcattgagtttaaagttgtctgccttgaagaagtcaaatagtgatttggagaaacaaggaaaatcagtgacattagaaagcaaagaaaacgaactccctaccaaaaggaaatcgcctgatgataaactcaacttagaagagtcatggaaggctattaaagaaataaaccattactgtttcttgaaaaacgatccatgcataaatcaaaccgacgattttgcgttcacaaactttatcataaaagataaaaaaaactcgttgagtacatcaataccgctatcgtcgcagaattcatcatttccgcccttaaaaaagcataacaatgagctccttggtatttttgtgccttgtaacctgccgaaaacaactcgtaaagtagccattgagaatttcaatagaccaagtcctgatgatataatacaatcggcccaacttaatgctttcaatgaaaaattagaaaacttaaatatcaaatctgtgcccaaggccgaaaaaaaggaaccaattaaccttcaaacaccacctactgagtcgattgatattcattcattcattgccacccatcctctgaatttgacatgtttgttcctcggtgatacaaacgcaggcaaatccactttgcttggtcatcttttatatgatctaaacgaaatttctatgtcatcaatgagggaactacaaaaaaaaagcagtaatttggatccttcatcttcaaatagttttaaggtcattctagacaatatcaaaacagaaagagaaaatggattttccatgtttaagaaagttattcaggtagaaaatgatttactaccgccatcatcaaccttgacgcttatagacactcctggtagtatcaaatacttcaataaagaaactctgaactcaattttgacctttgatcctgaagtttatgtattggttattgattgcaattatgactcgtgggaaaaatcattagatggtccaaataatcagatttatgaaattttaaaagtgatctcttatttgaacaagaattccgcatgcaaaaagcacttgataattcttttgaataaggcagatctaattagttgggataagcaccgactagaaatgattcagtctgagctaaattatgtgttgaaggaaaactttcagtggacagacgcagaattccaatttatcccgtgttcgggtttattaggttcgaatttgaataaaactgaaaacatcacaaaatctaagtataagtcagaatttgactctataaattatgttcccgaatggtatgaaggtccgacatttttttcgcaactatatctattggtagagcataatatgaacaaaatagaaacaactttggaagagccatttgtaggcacaatactgcaatcttctgttcttcaaccaatagcggagataaattacgtgtcactcaaagtcttgatcaacagcggatatattcaatcaggccagacaattgaaattcatacacaatatgaagattttcattactatggtatagtttcaagaatgaagaattcaaaacaaatactggagactaacacaaaaaataatatatcagtcggtttgaaccctgacattttagaggttcttgttaagattcataataccgaagacttcacgaaaaagcaatttcacattcgtaagggtgatataataattcactctagaaagacgaatacactatcaccgaatttaccaaacacactaaagttgttagccttgcgtttaataaaattatcaatacaaacgcacgcgctaagtgatcccgttgacttgggttctgaattgcttctttaccataatttgacgcacaacgcggtgaaattggtgaagattcttggaactaacgacatctcaattaatccaaatcagtcacttattgtcgaagtcgaaattatagaaccagactttgctcttaatgtgattgattccaaatacattaccaacaatattgttttaacatcaatagatcataaggttatcgcagttggcagaattgcatgccagtaa

SEQ ID NO: 78603 - DNA, 699 bp, Saccharomyces pastorianus
atggcagattatgatagtgcgaaatattggtccaagcagggagctcgtcgtgggttacagaaaacccgttactactgccaaatatgccaaaggcaatgtaaagatgcaaacggatttcaatcacataacaaatcgccatctcatttaaggaagattagtcaagtgacagctgaggacgctaggcgctacaatatccagtttgaaaagggatttctacagttattgaagcagcggcacggagaaaaatggattgatgctaacaaagtatacaacgagtatgttcaagatcgcgatcatgtacatatgaatgccaccatgcatcgttctttgacgcagtttgtccggtacctaggccgcgcgggcaaggtagacgtggatatggatattgatgatacatctgagaacgttgaaggtcctttgcttatcaggatccatccctcatctttatcatcaccttctgaagatggaatgctgcgaagtcaacaagaggagcaagaagtcatagccgccgagcttttgaaaagacaactcaatcgtgctaagcgacaaactgaaaaggtatatcatccagagatgaaatcggaaattagcggggatagcactctgaaacgtgttcaagtcaccttccacgggaatggtcgggtaaataaaaagaaaaagaaggttcctccacggaaagaaggtatcaagttccgttga

SEQ ID NO: 78604 - DNA, 645 bp, Saccharomyces pastorianus
atgagtaatggacacgtcaagtttgatgccgatgaaagtccagccagcgcaagtgctgtcacagatagacaagatgatgtgctggtaatatcaaaaaaggacaaggaagtgcattcaagtagtgatgaggaaagtgatgatgatgatgctccacaagaagaagggcttcactctgggaaaagtgaggtagaatcacagatcactcaaagggaggaggctataaggctggaacaatcacaattgcggtccaagagaaggaagcaaaatgaattatacgccaagcaaaagaaatcagtgaatgagacagaggtcactgatgaagtaattgcggagcttcctgaggagttgctaaaaaatatagatcagaaggacgaaggtagtacgcagtactcatcttcaagacatgtaactttcgataaattggatgagtcagatgaaaatgaagaggcattggctaaagctataaagactaagaaaaggaagacattaaaaaatttaaggaaagattcggtgaaaagaggaaaatttagagttcaattgttatccaccacacaagattctaaaacattaccaccaaagaaagaatcatccatcatacgttcaaaagaccgttggctaaatagaaaggctttgaataaagggtaa

SEQ ID NO: 78605 - DNA, 2241 bp, Saccharomyces pastorianus
atgtcgtataaatttattaccaagaacaaaaaatacaccccgatgtcttccccagggaattcaggcgtggctatagattctaccgttctgaaagcaattgaattaggaacgaggctttttaaatctggagaatacctgcaagcgaaaaggatattcacaaatgctttgagagtatgtgattcttattctcaggagcagattatgcgcattaggaacgcgtatcaattagatactgcgagaccggataacaaacgattatatcatcctagatacataaagatattggataacatctgtgcgtgctacgaaaaattgaatgatttgaaatcttgtatggacgtatcacaaaggttacttaagttagaaccaggtaatatcaaatgctatatacgatgtacaaggacgttgataaaattaaaagactggaaaagggcatataaaacatgttctcgtggactgcaattatgcaataacgatagcaatcatctaagacaacaaaaacaattcattaaaaataacatggttcaaaaacaggacggcaagagaagttatatagatccatcagaggagaccaaaatagcaaaaaaaaaaaagaataataattttctagaatcgttaccaaagaagaagattaaaggtagtaccaagaaaactgatttagttggcaatttgccgatagaaatactacctatcatattccaaaggtttaccactaatgagcttgttacgttgtcgctagtttgtaacaaatggagggacaaaattttgtatcatttagactgcttccaagaattcaacttggcaccaataaattttaaaaattttgtaaagtttatggattttttacaacagaatttcaccaggacgtatagaaaatatattctttcacaagtaaaagtcagttctaaaattacttcggaagagttacgaataactcaattattattcagtaaaatgccgaaatgtataaacatcgaacggcttatactgtcaatgccaacactaactacaacacaaatctttaagttaatggttagaggaggcacagatttttttgcaaggctgctggaattatctctcatgataacttataggcctgataaacaacatgaattagagatactgcagacttgtcctctgttgaaaaaaatagaattaatttttgtcaattcactaatacccattttcgacggaaataatagcgttgggagggatggaagtttcaatgtgatggcccgtcatactaatatgcagatacccactgcggataatgatgaacagggaatagcagaagaaaaggtgatttatagtgagctagagaagataacattgatatgtgataagaagaaaattaagaattttccactttgtcgtgctctattgagaggccagtttcctctattgcagaaactgacgataactggtgtaacatttcctatgaataatcaagacataataaattttcaatggctattaaacttcccagacctaaaagaactatggatagaagataacgacaactgtgaactcagtaagtttttgcaattgttaaaattttcgaatgtctggaaaaacttggaaaagttaacctttagagagaacaagctatatccaattattaatttggatgaagatcagcctgttacgaatgacaacgaggtgccatccatgctattttacaaggaaaatctccaaaacctggaaaagttggatctaatggggacgtcgataagtggttctgcgttgactagattatgcgagcaggaatatttggatggtcggaaattaagaagtttaaacattgggaattgccccaacatccagttcccaaataatcacgctcatgcagcaaggatgatactcgatgtgaatgcagttttgaagagactctccaagttggaagaaataaatttatcgcatctcagctccttgaatgatagtacgatgaagtcattcattattaatgtaccatttttggaaaatttaaagaggcttgacatttcgcacaattttgaaattacaggaatatcaatatatgaatttctaaaaaaatttcagatggatcatgacaacgaagcgggaggtcaaccactggcatatttaaatattgacggatgttcccaagtgtctcatatcacagttaatatgatccgagcgcagaacttagttactcaagtggattgtgtttatgaaagagatgtatggagaaaatttggaattaattcatattcatactcatag

SEQ ID NO: 78606 - DNA, 2250 bp, Saccharomyces pastorianus
atgtctaataccttgccagtaacagaatttcttttatccaaatactacgaactttccaacactcctgccacagactcatcatcgctcttcaaatggttataccacaagactctctcccgtaaacagctactcatatccgatttgttttcccagaaaaaacacgccatctcctacgatcaatggaatgacatagcgtcgcgattagacgacttaacgggactttccgaatggaaaacaatcgacgagtcctcgttgtataactataagctgctgcaagacttgaccatccgtatgcgccatttgagaaccactcacgactaccaccgcctgctttatctgattagaactaagtgggtccgtaatcttggcaacatgaataacgttaatctttacaggcactcgcatacaggcacaaaacaaattatacatgactacctagaagagtctcaagcagtgctcaccgcgctgatccatcagtcaaatatgaacgatcactatctcctcggtatcttgcaacagacgagaagaaacatagggcgcacggctctcgtgcttagcggtgggagcactttcggccttttccacattggtgttcttgccgccctttttgaatcggacctgatgcctaaggtgatcagcggtagcagtgctggcgccattgttgccagcatattttgcgtccacacgacccaggaaattccctccttgttgaccaatgtacttaatatggagtttaacatcttcaatgacgacaattccaaatctcccaacgaaaacttactaatcaagatatcgaggttctgccaaaacggtacctggttcaataatcaacctttgattaacacaatgctttcgtttttaggaaacttgacctttagggaagcctacaacaagactggaaaaatcctgaatatcacagtctcgcctgcttccatatacgaacagccgaaactactaaacaatttaaccgctccaaacgttctcatctggtctgccgtatgcgcatcttgttctctacctggagttttcccctccacgccgctattcgagaaagatcctcacactggaaagattaaagagtggggggcaacaaatttacatttatcaaacatgaaattcatggacggatctgtagataatgacatgcccatttctcgtctttctgaaatgttcaatgtcgaccatattatcgcctgccaggtaaatatacatgtctttcccctgttaaagttttcaaacacttgcgttgggggtgaaattgaaaaggaaattaccgcccgtttcagaaaccaagtaacaaagatcttcaaatttttttccgacgaaactattcattttttagacatcctaaaggagcttgagttccatccctatttgatgaccaaattgaaacacctttttttacaacaatactccggcaatgtcacaattttacccgatctatcaatggttggtcaattccacgaagtattgaagaacccgtctcaacttttcctattgcaccaaaccactttaggtgcaagagctacctggccgaaaatttccatgattcaaaataattgtggccaagaattcgctctggataaggccatcacattcctaaaggagaaaataataatctcttcgtcaataaaaaaccctttacaattctaccaacctcgattcagtgagcaaatcaaatctctttccataatggatgctgacttgccgggagttgacttggaagaatcctcctccaattcactatcaattatcaagtctcccaacaaaacagcggcaccgggaagatttcctcttcagccattgccttctccatcttctaccttcaacaagaggaaaatggatatgttatcgccttctccatcgccttctacatctccacaacgttcaaaatcttcattcacgcagcagggtacaaggcagaaggcaaattctttatcgtttgccatcggtgcatctagtttacggctaaagaaatcaccattgaaggttccatcacgacctcaattcaaaaaaagatcttcttattataatcaaaatatgtcggcagagatgaggaaaaatagaaaaaaatctggaacaatttcctcttatgatgttcaaacaaactcggaagattttcccataccggctattgaaaacggttcatttgataacactttattcaatccaagcaggttccccatggacgctatgtcggctgccacaaacgacaatttcatgaacaattcagacatttttcaaaattga

SEQ ID NO: 78607 - DNA, 372 bp, Saccharomyces pastorianus
atgctcgttgtttacatgtgtatctgggttctgcacctgctcttgttcttgttcttgttcttgttcttgttcttgttcttgttcttgttcatcgctagtcctgcttctcttcggcgttctcaaactcatattgttcaatgtctctactatttttcgttgctattaatatctggttgtgctttcttccatcaggttctttgccttgttttgcctttgttttgttttgttttgttttgttttgtttttttttatttttttcgttctgctcttgaagttttcgcttcccttttcccccttccctttagcaccagaagtcatgaaacaattagtaaatcaagaattatcattaaggcagcgcgaggaattatgtaa

SEQ ID NO: 78608 - DNA, 909 bp, Saccharomyces pastorianus
atgagtttgagaacgccgaagagaagcaggactagcgatgaacaagaacaagaacaagaacaagaacaagaacaagaacaagaacaagagcaggtgcagaacccagatacacatgtaaacaacgagcatcagcagcgacctgggccaaccactctattgagcacgccagtacgtctcaaaaatggctttggaacaccatcaccgccgtcaccaccaggcataacgaaaagcatcactaaatcgagaagaaggccgtcgacaacgagtcttcagggtatattcatgtcgcccgtcaataagcgtcgtgtcggcataaccgcacatggacgtgtatatgaccataacgacgacggacacgaaagtgagagtgaggacgacgaaaatgaagaaaatgaaaatcaaaagaagtacgacgggcacgttagtatgcctttgttgccaccgacaacgcccaagtcaagacggtcggaggtgtttctgtcgccgtcgccgcgtttgaggtcacctccgacggctacgcgtcggtctacgggcgagcggcccatccgcgaaatatcacatactttgcgcaccaggcttaattacgcgttagtcaagctgcaaaatggatggacggacaagacacttcccgaactggagacggagcttgctccagcagtgcagacgccgccacgccgctatcacaacagatttccagatagtgcagacgcgggtacttccgcgcatacagcgtttcttcaggcgctcggaggccacccaccacgggaggaggccacggctgtcgaaacactgatgctattgtcgtcgcctaccaagaagcaacagcaccgacccgtgccggcgacatctgctggagaacccacggacgaaacggagcccgagtcggataccgaagtggagacgtcttaa

SEQ ID NO: 78609 - DNA, 1164 bp, Saccharomyces pastorianus
atggaacagaacaggttcaagaaagaaacgaaaacttgtagcgctagctggccgcgcgcaccgcagtcgacgctgtgtgcgacagatcgcctcgagctcacatacgatgtgtacactagcgcagagcggcaacgccgctctcgcactgccactaggcttaaccttgtgtttttgcacggcagcggcatgagtaaggtggtatgggagtactatttgccgcgtctggtagccgccgatgcggagggcaattatgccatcgacaaggttttgttgatcgaccaggttaaccacggtgattctgcggtacgcaaccgcggcaaactcggcaccaatttcaactggatcgacggggcccgcgatgtgctcaagattgccacatgcgagttgggcagtattgacagccacccggcactaaacgtagtcatcggccactcgatgggcgggttccaggctcttgcgtgtgacgtcctgcagcccaatctgtttcatttgctcatcttgatcgagcctgtagtaatcacacggaaagccatcggcgccgggaggccagggcttccgcccgattctccgcagatcccggaaaatctttataactccctacgtttaaagacgtgcgaccatttcgctaacgagtccgaatatgtaaaatatatgaggaacggttccttttttaccaatgcgcacagccaaatcctgcaaaacatcatcgattttgagaggataaaagcctctggagacgatgaagatggtggacccgttcgcacgaagatggagcaggctcaaaatctcctctgctacatgaacatgcagacttttgcgcctttcctgatcagcaatgtgaagtttgtgaggaagcggaccatccacattgtgggcgcgcgctccaactggtgtcctccgcaaaatcagctgtttttgcagaaaactctacagaactaccatctcgatgtcattcccggcggctcccacttggtcaacgttgaggctccggacctggtgattgagaggattaatcaccacatccacgagtttgtccttacctccccgctgcagtcctcacacattccgcaattgacccttgaagaaagagcggtgatgtttgaccgggctttcgactcgttcaagaatgaagctttggttaaaatgactaaacaaaaactgtaa

SEQ ID NO: 78610 - DNA, 1053 bp, Saccharomyces pastorianus
atgaattggctgtttttggtctcgctggttttcttctgcggcgtgtcaacccatcctgccctggcaatgtccagcaacagactactaaagctggctaataaatctcccaagaaaattatacctctgaaggactcaagttttgaaaacatcttggcaccacctcacgaaaatgcctatatagttgctctgtttactgccacagcgcccgaaattggctgttctctgtgtctcgagttagaatccgaatacgacaccatagtggcctcctggtttgatgatcatccggatgcaaaatcgtccaattccgatacatctattttcttcacaaaggtcaatttggaggacccttctaagaccattcctaaagcgttccagtttttccaactaaacaatgttcctagattgttcatcttcaaaccaaactctccctctattctggaccacagcgtgatcagtatttccactgatactggctcagaaagaatgaagcaaatcatacaagccattaagcagttctcgcaagtaaacgacttctctttacacttacctatggactggactccaattattacctcaacaataattaccttcatcaccgtcttactcttcaaaaagcagtccaaactcatgttctccatcatatcttccaggatcatctgggcaaccttgtcaacttttttcatcatttgcatgatcagtgcctatatgttcaaccaaatcaggaatacccaattggcaggcgttggtcctaagggcgaggttatgtatttcttgcccaatgaattccaacaccaattcgccattgaaactcaagccatggttcttatttacggaacattggccgcgttggttgtcgtattggtcaagggtatacaattcttgcggtctcatttgtatccagagaccaagaaagcgtacttcattgatgctattttggcctccttttgtgccttattcatttatgtcttctttgctgctttgacaaccgtgttcacgataaagagtcctgcttacccttttcctttactaaggttatcggcaccattcaaatag

SEQ ID NO: 78611 - DNA, 2028 bp, Saccharomyces pastorianus
atggtatcagccaacggcgatttgcacttgccaatttctaacgaacagtgcatgccggaaaacaatggatctcttggatttgaggcccccactccgagacaggttctcagggttacgttaaatttgaaatacttaattgataaggtcgtacctattgtttacgatcccaatgatattgtttgtgaccattctgagattttatctccaaaagttgtgaagctggcttatgaagcatgtggcgggaaccctaaagacaaggccaacaaaagaaaatatcaatctgtcattattttttcacttcttaaagtttgtgagtggtattccatattggccactatggaagtgcacaatgccaaactttacgaaaccagaaatttagcctcacaacagttatgtaaattgttaattgaaagggaggagacaagagacctgcagtttcttttcatgcagttactgctgcgtcggtacgtaatcaacgagaacgatgaagatcaagaaccgttgaatgccttggaacttgccacagatatgcactgtactacagtgataggatcgagtggattccagcgttgtctaaagtggatatggagagggtggatagtccaaaatggcttggatcccacaacctttatcaaggacgattcactggcggaagtgtcgttgatctctcattttaaccccgtaagattaaaggcgcctgtataccaaaattatttgcagatgatcttttcatttttgtttctagggctttataccttggtggttaatggtaaggactctgagagagtccaatctttcgatttgttagaaagcatattttatgttttcaatactggtttcatcttggatgagctcactaagctttattatattggttatgcgcacctatcgttttggaatttatttaatgataccacatatttgataatcacgtttgctatggggttccgtgcaatgagcgtaacgccccttaatgcaaaatactcttcagaagattgggataaaatatcatatagagtcttatcctgtgcagcaccatttgtgtggtcgagactcctactataccttgaatcgcaaaggtttattgggattatgttggttatcctaaaacatatgatgaaagaatccattgtatttttcttccttctattcttaataatgataggattcactcaaggtttcttaggtttggattccgcagatggtaagagagatatcactggacccatcctgggtaatttaacaatcaccgttttgggtcttggtagttttgatgttttcgaagaattcgctcccccttatgcggcaatactgtattatggttactattttattgtttcggttatccttttgaatatattaattgctttgtattcgactgcgtaccaaaaagttattgacaatgcagatgacgagtacatggctttgatgtcacaaaagacgttgagatacattagagcacctgatgaagatgtctatgtttctccattgaacttaattgaagtgttcatgacacctatctttcgtattcttccaccgaagcgtgctaaagatttgagctatactgtaatgacaatagtgtacagcccatttttgttgcttatttctgttaaagaaactcgggaggctagaaggataaaatataacaggatgaaaaggctaaacgatgatgccaatgaatatgacactccatgggatttgacagatggctacttggatgatgatgacggtttgttttctgataaccgaaattctggcatgagagccacccagttaaagaattcacgttcgctaaaactgcaaaaaacagcagagcaggaagatgtccattttaaagtccctaagaagtggtataaaaacgttaaaaaatgcagtccctccttcgaacagtatgataacgatgacactgaagatgatgttggtgaagataaagatgaagtcaaagagctcactaagaaagtggaaaacttgacagctgtaattaccgatctactcgaaaaattagacataaaggataagaaagagtaa

SEQ ID NO: 78612 - DNA, 1206 bp, Saccharomyces pastorianus
atgataatgaaaaaatttttgttccccagcgatgagttagtgaaaatcgacaatatatctttttttgatcaatgtgttttactatttctagaaagcaagggaagccactctagtagtaaacctctgggctttacacatataaaatcgcaggaaagttatatttcgaagatgccaccaaaaaagggaaaacaggcccaagcggctggtaagaagaaggataatgtcgacaagacgttcggtatgaagaacaagaaccgttctaccaaagtccaaaaatacatcaaacaagtgcaatcacaatccgaccccaagaaagaagagatgaggttaaagaaactcgaagaaaaaaagcgcagagaagccgaagaagctgaacgaagagcactattcaaccctgtagcagaccaaagggttcgtgcaggtgtagatcccaagtccatggtttgtgctctgttcaaactggggaattgtaacaaaggtgccaaatgtaagttctcacatgacttgaacgtcggtagaagaatggaaaagaaagatttataccaagatacaagaagtgaaaaggaaaatgacacaatggataactgggatgaagaaaagctgagaaaagttatcctgtcgaagcacggtaacccaaagaccaccaccgacaaagtatgcaaatacttcatcgaggccgtggaaaacggtaaatacggttggttttggatctgtcctaacggaggtgacaaatgtatgtacagacactccctaccagagggctttgtgctgaaaaccaacgagcaaaagaggctcgagagggagtcgctcgagaaacagccaaaaattacgctggaggagtttatcgaaacagaaagagggaaactagacaaatccaagctaacaccaataacaatcgccaacttcgcccaatggaagaaggaccacgtcatcgcaaagattaacgctgaaaagaagttatctagtaagaggaaacctactggtagagaaatcattcttaagatgagcgccgaaaacaagtcatttgagacggacaacgccgacatgccagacgacgtcacccagggatccgcatgggatcttactgaattcacagatgccttgaagaaggctgaccaccaagacgacggcggcatcaaggactacggtgacggtagcaaccccaccttcgacatcaaaaaagccaactccgccacgctcgcatag

SEQ ID NO: 78613 - DNA, 528 bp, Saccharomyces pastorianus
atggatttgaaaagggattggttacgatggaaaattacaataggtagtgggcctggcagtattgtgctggatttcccatcatttttggtagggtgcgtattcacaacaatgatggggccaatattacagaagcttataggtaaacttttggtaggtttaataacggtatgcaaattcttagttattattggaagcattgtcttcgttatcggagttgcatcaaagaaatacacatatgacgatttcaaagtaagtataaaaagatcaggagagccaggggaatcacatgatatgaggactgaaccaaaaagaactgcgaaaacggcaactgttccaatggagaaagacgagggcgtaggttcttataattattttgaaatacctataacgaaagaaacatctacaattccttatattaattgtgatagcacgagctcacttagaaagccacctaacggtccatcaagcgtaggcttatctaactccaacagatacgaaaattttataaacatggcacgacataaataa

SEQ ID NO: 78614 - DNA, 984 bp, Saccharomyces pastorianus
atgtcttcagacacttcattatcagaatcttcattattgaaggaagagagtgggagcttgaccaagtctcgtccacctataaaatcaaaccctgtacgcgaaaatatcaaatcatttgtggccggtggagttggcggggtatgtgcggtgtttacgggtcatcccttcgatttgattaaagtgagatgtcaaaatggacaagcgaattccacggtacatgccattacaaatattataaaagaagcaaaaactcaagtaaagggcacattatttaccaattccgtaaaggggttctataaaggtgttatcccgcccttattaggtgttactcccatattcgctgtttctttctggggttacgatgtgggtaagaaactggttacttttaataacaagcaaggaggcagtaacgagttaactatgggacaaatggctgcagcaggatttatcagcgctattcctaccactttagtgactgcgccaacggaaagagtaaaggttgtcctgcaaacatcttctaagggctctttcattcaggcggctaaaaccattgttaaagaaggtggcatagcttctttatttaaaggttcattagccactttagcaagagatgggcctggctcagctctatattttgcatcatatgaaatttcaaaaaattacttgaatagaaggcaacctcgtcaagatgcgggcaaagatgaaccggtcaatatcttgaacgtgtgtcttgctggtggtattgctggtatgtcgatgtggctagctgttttccccatagacactataaagacaaaattgcaggcttcctccacgaggcagaatatgctttccgccacaaaggaaatttatctacaaagaggtggtatcaagggatttttccctggtttaggtcctgctttactaagatctttcccagccaatgcggccacatttttaggcgtggagatgactcattcactgttcaagaagtatggcatatga

SEQ ID NO: 78615 - DNA, 351 bp, Saccharomyces pastorianus
atgcaagcacgccggcaaacccttcctcaatttataaaatgtaaacaaacgaaatgtaaaatcaaactagcaacaataaactcggcaaaagctctgtttttagaaatgcctggaaagctattacacaattgtaaccacaaactcatcaataggacgaattgtcccacacaaataatgaatcccgctaaaaacgcattgaatggaaaattatcacggatcaagataatgaatgtacactggattacccctaataataccaaaaagaaacagaatgtatcaattagcttcagtttaggatatttttcaatttgggcaaaatatgccctcttagaagtcttgaaagtttcttga

SEQ ID NO: 78616 - DNA, 402 bp, Saccharomyces pastorianus
atgactaatatggcaaaaacactaaaggcaaacacaccaaaagtaaccagcacgtcatctgcagtcttaacagattttcaagaaactttcaagacttctaagagggcatattttgcccaaattgaaaaatatcctaaactgaagctaattgatacattctgtttctttttggtattattaggggtaatccagtgtacattcattatcttgatccgtgataattttccattcaatgcgtttttagcgggattcattatttgtgtgggacaattcgtcctattgatgagtttgtggttacaattgtgtaatagctttccaggcatttctaaaaacagagcttttgccgagtttattgttgctagtttgattttacatttcgtttgtttacattttataaattga

SEQ ID NO: 78617 - DNA, 849 bp, Saccharomyces pastorianus
atgaatatttgcaagttgaaagaaatagtaccactatttccgagatcgtcctttacagatggtgtcgtaagtacaggaaaaagtttccgaagctgggacacctgcatggacaataaagcatgtaaagttattgcgattgttggtattgttttggcctgtattcttgtgatttggttgattgggggcttactgacatgtttcaggcaaggggtaacaggaataggtcagttcatttgttggtgttgtcgttgttctaatgacagaaatggaaacaatacaatgccggtaaatgagggttttagtagagttaatatgggcgtggctcctccttctactgtgatttatcaacctattcaacaacctgaaagtgcgtattatagaaacgatgcgaagaatgatacattttacgacgaagtcaaaacccccagtaatgaggtgtatgaattagaggaagatttcgatttggaaaaacaaaaagagaaaacaaggaaaaaacaacagaaggaaaggaataaagaaggacgcagccctagtagggtggcccctctagtgtatgaagaagaaaatttcgaaggtagcagccctcagccgcaatatgatgctagaaattcgtttatccaaaatgcggccaatactggtagcaacaacgctcatgttacttcacaatctccaatttttgacatcagcgattatggcgagaactactattacgataataataacatcaataataacctccagggaaacagttacaatactccctcctctaatcatagaagtccatatccaaccgaaaattatcaatcatatcagggatataaaccaaaccaaagcgatagatattactaa

SEQ ID NO: 78618 - DNA, 327 bp, Saccharomyces pastorianus
atgaagaagaaaatttcgaaggtagcagccctcagccgcaatatgatgctagaaattcgtttatccaaaatgcggccaatactggtagcaacaacgctcatgttacttcacaatctccaatttttgacatcagcgattatggcgagaactactattacgataataataacatcaataataacctccagggaaacagttacaatactccctcctctaatcatagaagtccatatccaaccgaaaattatcaatcatatcagggatataaaccaaaccaaagcgatagatattactaatgaggtaaatatatattctcccttcttttga

SEQ ID NO: 78619 - DNA, 852 bp, Saccharomyces pastorianus
atgtcctttttcgacatcgaagcacaatcttcaaagggtaactcccagcaagaaccacaattctcaacaaatcaaaaaacgaaggaattaagcaatttaattgagacattcgctgaacaatcccgcgtgctggaaaaggaatgcaccaaaattggttccaaacgggactccaaagaactaagatacaaaattgaaacagagttaataccgaactgcaccagtgtaagggataaaattgagagcaacatcctcattcaccaaaatggaaagttgtctgctgatttcaagaacctgaaaacgaagtatcaatctctacaacaatcatacaatcaaaggaagagtctgttccctctaaaagcgcctatttcaccaggaacatctaaggaaagaaaagagatccatccgcgaactgaagccgtgcgacaagatccagagtctagttatatttctataaaagtaaacgagcagagtcctttactgcataacgaaggacaacaccaattacagctgcaagaagaacaagaacaacagcagcaaggattgtcccaagaagaactagattttcaaacaatcattcaccaggaaagatcccaacagataggacacattcatacggcggtacaagaagtcaatgctattttccatcagcttggttcattagtgaaagaacagggagaacaagtaaccaccatagacgagaatatctcgcatttacatgataacatgcagaatgcaaacaaacaattatccagagcagaccagcatcagagggaccgtaacaaatgcggtaaggtcaccctaatcattataatagttgtgtgcatggtggtattgcttgctgtattaagttag

SEQ ID NO: 78620 - DNA, 210 bp, Saccharomyces pastorianus
atgaataatattattgacagtagcaaataccgccttaatagatgcatccccagtgtcttcggagacaccaacaccccacatattactggtagcatgattattgttgtcctttatgtaggaaagatttatgaaagatgccgcttgggttgcggaaccagaacccaaggaatgttcagagtagttttgaacgctcaacttaacattcagtaa

SEQ ID NO: 78621 - DNA, 885 bp, Saccharomyces pastorianus
atgaaggctactttactgttgaaggcccagctctcacctgtcagctatacgacgaagaaatctttccaaaggcaactcaatcgcactccatacactgcttttcaatacttcttccaacttgaagtccaaaagttacataacgtctcgaagtatgaggatattataaattacgtaagagggaatagcaattttaaaagatttgcaaggaatgaatgggataccatgtcattgactaagaaaagactttactatgcatccttttgccagtcaatggatattgacattttgaatgtcagtaaaattgaacttgccaaaagattagaaattcccataccagcaatgagtgaatatttgttatttagaaataagttcaaggtaaaatttgactctcattgcagctccttggagcgtaaagatcgtaaaagtgttccacgaccctctattactaggaaggttgcaactacagaaatatgttcaaaaagccgtagcaacacacccctcggtaaaatcaacccccggaaacgattagtggcattgaaaaggatttcccgttcagagaacactgcaaaaaatcattcccatgaggctcaaaattacctttatgattatatgaaaaggtttcaacaaatgtgcaaagaatgccggtatgcttggaacgaaaaggttgactatgaccagaaactagaaattagaaaaaaattacaggtatggagggcaaaatttgaggaagtgatggataacgagatacaaatattacaaaaaaacatggatatcatgtcaaagtttggtctcagaagtgagtcctatcttacagcagcggatcacaatacaaatacacaaccaaataatattcttcccatgacgtacctactaaaaaagaaatga

SEQ ID NO: 78622 - DNA, 1704 bp, Saccharomyces pastorianus
atgggacagtcttcttcaatcagttccagtaacgaagagggttcttcccactcaaaaaaattcacaaatagcaaagatattttggcatatttcaataacaaagcacagcaacaggtcactattccagaattagtcagttttaagggaaatttgcaaattgaagatctaaacactccaatttctcacaaagctttatgcaactcactttattttccgcagaatcatgccatgattgttgggatagtgactaacatgttgagggttttgagcaacttcccattaatgaaatcatcttacgaaccaattacgggatatgggttattaaaatgcattttgttgttaaacagggcacgatgtgccaaattcttgaaaaccaagtcctatgatcaactaaaactgctgtttatctctttatcacttcagaaaactgacaaagaagaactctccgaagaaagtgaaaacgacggaaacaaggagttgactataaaacaaataataactgggtttgatgatgttgatacagaaatgctgtgcattcctgctgattttatgcttcagtttttaacttggcttttaattttaacagttgattgtccaaccaccaattctaaattggataatacagagactcatgatcaatggggcaatttcaaagtctcagcactcaatctccttagaactatgaatccagacgtggtgggcgatatagaatcacattccataacgtttcaacaattttcaactgcaataagaactgtaatgcccaatctattaaaaccattagagaatttaatggagcattttttttatttgcagcacgatttagttgatcatgacacaaacttatcgtctattcaggattctaaagttatgactccagcactgttggcacagttatcgacgggactaccaaaggaattatttattcataagctacaaagtttatacatcggcaggaaaagtggcttctcaatgaggtctttgcaagcaaaggtgttcaaatggatggcgccttcgattttagttgttagcggaatgaggataacaaattctgaagaatacgcagctgagaagaatccaagataccgccattttcttgaagaatttcctaaattgaaagagtcagatcaaatgatggatgcatcgcatttgaataaaaggaaaactactttcgctgtgtacatagacgatccgtggaaagtaacaaataaagattattttggcgatctgaatacgagaataatagaaatatcacccaggcaggatatttataaagtcaaccaaaaaggcacgatctatttcaatacaattggtggcggaattggaatcggggataaacaaccattaataaaaccagcatccaagagatacataccagggaacgtgtcgcttacttttgacagcacattagaatttgctgtgtttagaaatactggttacggaggttcattagaccctggtttattgtcgatggaaagaaaggaggaaaattccccttatgaattgcattttttgattcaagatgttgaggtatggggctgtggtggtgagaaagaactagaagagcaaatcaaacagttggaatgggaagaagcagaatctaaaagaagacagcaaattaacctgagaagcttgggagaagaccgtgccttactggaaatggcaggtttagttggccaacatcaaggtggcggttcaatgtga

SEQ ID NO: 78623 - DNA, 1455 bp, Saccharomyces pastorianus
atgtccttggaagataaatttgattcattgtctgtgtcgcaaggtgcctcggaccatattaataatcagctcttagagaagtatagtcacaaaataaaaactgatgaattatcattcagcagagcgaaaacatcaaaggataaagcaaatagggcgactgtggaaaatgtcttagatccgagaactatgagatttttgaagtctatggtcaccagaggtgtgattgcagatttgaacggttgcttaagtactgggaaagaagctaatgtttaccacgcttttgcaggtaccggtaaggcacccgtaatagatgaggaaacaggccagtatgaagttttagagacagacggatcccgtgcagaatatgccattaagatttataagacctctatcctagtcttcaaagatcgtgaaagatatgttgatggtgaatttagatttagaaattccagatctcaacataatccaaggaaaatgattaaaatttgggctgaaaaggaatttaggaacctgaaaagaatttatcaaagtggcgtcattccagctcctaagccaatagaagttaagaacaacgtcttagttatggaatttttaagccgaggtaatggatttgcctcacctaaattaaaagattatccatacaagaatcgtgatgaaattttccattattatcacacaatggtggcatatatgagattgctgtaccaagtttgtcgcctggttcatgccgatttgtcagagtataacaccatagttcatgatgataaactatatatgatcgatgtttcccaaagtgtggaacctgaacatccaatgagtttagattttttaaggatggatatcaaaaacgttaacctttatttcgagaagatgggtataagtattttccctgaaagggttatttttcaatttgtcatatcagaaactttggaaaaatttaaaggtgattataacaatattagcgccttggttgcatacattgctagtaatctaccaataaaatctacagaacaagatgaggcagaagatgaaatattcagatcgctgcatttagttagatcattgggtggattagaggaaagagattttgataggtatagtgatggtaagtttgacttactgaaaagcttgattgcccatgataatgaacgcaattttgctgcttctgagcaatttgaatttgataacgctgaccacgaatgtagttctggcacagaggaattctcagatgatgaagaagacggctcaagcggatctgaagaagatgacgaggaggagggcgagtactatgacgatgatgaaccaaaagttttaaaggggaagaaacatgaggacaaggatttaaaaaaattgcgcaagcaggaagctaaagatgcaaaaagagaaaaaaggaaaacaaaagtcaagaagcacatcaagaaaaaattggtgaaaaaaacgaaatcaaagaaataa

SEQ ID NO: 78624 - DNA, 939 bp, Saccharomyces pastorianus
atgcctgctactttacatgattctacgaaaatcctttctctaaatactggagcccaaatccctcaaataggtttaggtacgtggcagtcgaaagagaacgatgcttataaggctgttttaaccgctttgaaagatggctaccgacacattgatactgctgctatttaccgtaatgaagaccaagtcggtcaagccatcaaggattcaggtgttcctcgggaagaaatctttgttactacaaagttatggtgtacacaacaccacgaacctgaagtagcgctggatcaatcactaaagaggttaggattggactacgtagacttatatttgatgcattggcctgccagattagatccagcctacatcaaaaatgaagacatcttgagtgtgccaacaaagaaggatggttctcgtgcagtggatatcaccaattggaatttcatcaaaacctgggaattaatgcaggaactaccgaagactggtaaaactaaggccgttggagtctccaacttttctataaataacctgaaagatctattagcatctcaaggtaataagcttacgccagctgctaaccaagtcgaaatacatccattactacctcaagacgaattgattaatttttgtaaaagtaaaggcattgtggttgaagcgtattctccgttaggtagtaccgatgctccactattgaaggaaccgattatccttgaaattgcaaagaaaaataacgttcaacccggacacgttgttattagctggcacgtccaaagaggttatgttgtcttgccaaaatctgtgaatcccgatcgaatcaaaacgaacaggaaaatatttactttgtctactgaggactttgaagctatcaataacatatcgaaggaaaagggcgaaaaaagggttgtacatccaaattggtctcctttcgaagtattcaagtaa

SEQ ID NO: 78625 - DNA, 306 bp, Saccharomyces pastorianus
atgtttaatttatctacatattacaatcatacgaaaaacacgcaaaaacaattacttgaatacttcgaaaggagaccaatttggatgtacaacccttttttcgcccttttccttcgatatgttattgatagcttcaaagtcctcagtagacaaagtaaatattttcctgttcgttttgattcgatcgggattcacagattttggcaagacaacataacctctttggacgtgccagctaataacaacgtgtccgggttgaacgttatttttctttgcaatttcaaggataatcggttccttcaatag

SEQ ID NO: 78626 - DNA, 3819 bp, Saccharomyces pastorianus
atgccgaacgaagataatgaacttcaaaaagcaattgagaaccatcataatcaactactaaaccaggataaagaaaatgctgacagaaatgggtctgttatagaagacctcccattatacgggacaagtataaaccagcagtctatccctggagatgttgacgatggaaaacacttactgtatccagatattgccaccaacctaccactgaagacttctgacagacttttggacgatatactttgcgatactatttttctcaattctacagacccgaaggtcatgcaaaagggcctgcaatcgaggggtattttaaaagagtctatgctttcttactcaactttcagaagtagtattcgccctaactgcttgggttcattaactgatcaagtggtttttcaaacaaaatccgagtatgattccatttcatgcccaaaatataataaaatacatgtatttcaggcggtcatctttaatccatcactgggagaacagcaaatttcaacttttgatgatattgttaaaattcctatttatcatcttaaggttagcgtaaaagtccgccaagaactggagcggttgaagaagcatgtcggtgttactcaattccactcactagatcatttgcacgaatacgatcgagtagacctttcgacttttgattcttccgatcctaatttgttggattacggtatttacgtttctgatgatactaacaaactgatcttgattgaaatttttaaacccgagtttaattcacctgaagagcatgagagttttactgccgacgcaattaagaagagatacaatgctatgtgtgtaaaaaatgaatcactagataaaagcgagacgccatctcaagttgactgtttttacacacttttcaaaatttttaaagggcctttgacgaggaaaagtaaggcggaacctacaaagacaattgattctggaaatttggcccttaacactcacctgaatcctgaatggttaacgtccaagtatggatttcaagcaagctcggaaatcgatgaggaaactaatgagatatttactgaatacgtccctccagatatggtggactatgtaaacgatttggagacaagaaaaattcgagaatcgtttgtgaggaagtgtttacaactgatattttggggtcaactatctacctcattactggcacctaattctcccttgaaaaatacgaaaagcgtaaagggaatgtcttcattacaaacttctttctcaacactaccttggttccatttattgggagaatccagagcaaggattctattaaattccaatgagcaaactcattcgcctttggacgcagaacctcattttattaatctttccgtttcgcattattataccgatagagatataatcagaaactacgaatctttgtcttctttggatcctgaaaatattgggctgtattttgacgccctgacatacattgcaaataggaagggggcatatcaattgattgcttactgtggaaaacaggacattataggccaagaagctctagaaaatgctttgttaatgtttaaaattaaccctaaagagtgtaacatctccgaattaaatgaggcgactttgctatctatttacaaatttgaaacatcaaataagagccaagtaacctctaatcacctaacaaatttgaaaaatgctctaagattgttggccaaatataccaaatctgacaaactaaaattttacgtcgatcatgagccctacagagctttatcccaggcatacgacaccctttcaattgacgagtctgttgatgaagacattataaaaactgcatattcggtcaagattaacgactctcccggattaaagttggattgtgatagagcactttacaccattgctatcagtaaaagaagccttgatttgttcaattttttaacagaggaatgcccacagttttccaactattatggtccagagaagcttgattaccaagaggcattgaagcttcttcaagtgaatgaaaatgcctctgacgaaaccattttgaaaatctttaaacaaaagtggtgtgatgaaaacgtttatgagcctgaccaatttcttattttgagggcagcattgaccaaaatcagtatagaaagaaattcaactttaatcaccaacttcttactaactggtacgatagatccaaattccttgccgccagaaaattggccaactggcattaataatatcgggaacacctgttacctaaattctttattacaatattacttttccattgcgccactaagaagatatgtattggaatatcaaaaaacggtagaaaatttcaatgaccacctctctaatagtgggcatattagaagaattggtggaagagaaattagtagaggcgaagtggaaagatctattcaattcatataccaacttcgcaaccttttctatgcgatggttcatacaagagaaagatgtgtaacaccctcaaaagagctagcatatttggcatttgctccaagtaatgttgaagtagaatttgaagtggaaggcaataaagtagttgatcaaacaggagttctttcggattcaaagaaggaaacaacggatgacgcatttactacaaaaataaaggatacaagcctgattgatttagaaatggaagatggccttaatggcgatgttggtacagatgcgaacagaaaaaaaaatgaatcgaatgatgctgaagtaagtgagaacgaagatacaacaggattaacttcacctacgcgtgtggcaaaaatcagttctgatcaattagaaaatgctttggaaatgggtaggcaacaagatgttactgaatgcataggaaacgtgttatttcagatagaaagcggttcagagcctatccgatatgatgaagacaacgagcaatatgacttggttaagcaactattttatggtactactaaacaaagtattgttcctttgtccgcaacaaataaagtccgtacgaaagttgaaagattcctatcgttactgataaatattggcgatcatcctaaagatatttatgatgcgtttgattcttattttaaagacgaatatctgacaatggaagagtatggtgatgttatacgtaccgttgctgttacaacttttcctactattttgcaggtacaaatccaaagagtttattacgatcgtgaaagattaatgccgtttaaatccattgagcccttaccattcaaagaagttatttacatggacagatacgcggatacagagaaccctttattgttggcaaaaaagaaagaaacagaagaaatgaagcaaaagttgaaggtaatgaaaaatagacaaagagagcttttgagtcgtgatgattcagggcttacaaggaaggatgcatttttggagagtatcaagctattggaatcggataccataaagaaaactcctttaaaaattgaggctgctaatgatgtgataaagacgctgagaaacaacgttcaaaatatcgataatgaattgatgaaattatacaatgatatcaacagtttggaagagaaaataagccatcaatttgacgatttcaaggaatatggttactcactgttttcggtttttattcatcgcggcgaggccagttatggtcactattggatatatatcaaggacagaaatcgcaatggaatttggaggaagtacaatgatgaaaccatcagtgaggtccaggaagaggaggtcttcaatttcaatgagggtaacactgcaactccatatttcctagtatatgtcaaacaaggacaagaaggtgatattgagccattgaaaagaattctaaagtag

SEQ ID NO: 78627 - DNA, 819 bp, Saccharomyces pastorianus
atgtttccttatttttacagacgagagttttattcttgtgaaaacgtcgttatcttctcctccaaaccaattcaaggaatcaagatatcacgtatacgggagagatacatagaaattatgttatcccgtgtttctgttttcaaacctgccagcagaggcttttccgtcttatcatctttaaagataacagaacatacatcagcaaaacacaccgaaaaacctgagcatgctcccaagtgtcagaatttatcagatgctcaggctgcatttttggaccgtgttattcgtgtagatcaagctggcgaattaggtgcagactacatctacgctggccagtacttcgtgttggctcataggtaccctcacttgaagcctgtgctaaaacacatgtgggaccaggagatacatcatcataatacttttaacaatttgcaattgaaaaggagagtcaggccttccttattaacgcctttgtggaaggcaggagcctttgcaatgggggctggtaccgcattgatttctccagaagcagctatggcttgtactgaagctgtcgagacagtaatcggagggcactacaatggccaattgcgaaacttggccaatcaattcaatttagaaagaacagatggaacaaagggtccaagtgaggaaatcaaatccttaacttctactatccaacagttcagggatgacgagctagagcatctagacaccgctatcaagcatgattcgtatatggcagttccatatacagttatcactgaaggtattaaaacgatttgcagagtagctatatggagtgccgaaagaatttaa

SEQ ID NO: 78628 - DNA, 717 bp, Saccharomyces pastorianus
atggattacgagaagtttctgttatttggggattccattactgaatttgcttttaatactaggcccactgaagatggcaaagatcagtatgctcttggagccgcattagtcaacgaatatacgagaaaaatggatattcttcaaagagggttcaaagggtacacttctagatgggcgttgaaaatacttcctgagattttaaagcatgaatccaatattgtcatggccacaatatttttgggtgctaacgatgcatgctcagcaggtccccaaagtgtccccctccccgaatttatcgataatattcgtcaaatggtatctttgatgaagtcttaccatatccgtcctattataataggaccggggctagtagatagagagaagtgggaaaaagaaaaatctgaagaaatagctctcggatacttccgtaccaacgagaactttgccatttattccgatgccttagcaaaactagccaatgaggaaaatgttcccttcgtggctttgaataaggcgtttcaacaggaaggtggtgatgcttggcaacaactgctaacagatggactgcacttttccggaaaagggtacaaaatttttcatgacgaattattgaaggtcattgagacattctacccccaatatcatcccaaaaacatgcagtacaaactgaaagattggagagatgtgctagatgatggatctaacataatgtcttga

SEQ ID NO: 78629 - DNA, 3024 bp, Saccharomyces pastorianus
atggcatcaactgctcccaatgaacaatttccatcctgcgtacgatgcaaagaatttattaccacggggcatgcatatgagttgggttgtgatagatggcacacacattgtttcgcttgttacaaatgtgagaaaccattaagctgcgaatctgattttttagtccttggaacaggtgctttgatctgctttgattgttccgattcttgtaaaaattgcggtaaaaagattgatgatttggccataatactgtcctcttcaaatgaggcctattgttcagattgttttaaatgctgtaaatgtggtgaaaatattgctgacctacggtacgcgaaaaccaaacgaggtttattctgtttaagctgtcacgaaaagctattagccaaacgaaaatactacgaagagaagaaaaggcgactcaaaaagaatttaccaagtttacccacacctgtgattgataatggccatactgatgaggtctcagcttctgcagtcctcccagaaaaaacatttagcagacctgcatcactagttaatgagattccttcaggttctgaaccttccaaggacatagaaaccaattcgagtgatattgttccgcattttatcactgggtataacgatagcgatgacaactctggaagttcaaaattcggttcaaatgtgtccatagatgttataggaccggaagaaaatagcacggagcatgtaaatgatgatgttaaagaggaagcagaagcaccttcagcgaatatgtcactcaatgttgctacggatccaaccctaagttgtaaagaacctcctagccattcgaggaatttgttaaataaaacaccgttgagaaattcttcgggtcagtatctcgcaaaatctccaagctcctatagacagggaataattgttaacgatagtttggaagagagcgatcaaattgatcctccaaataacagttcacgaaatgcaagtgaattgttgacctcggtattgcatagtccagtttctgttaatatgaaaaatccgaagggttcaaatacggatattttcaacaccggtgaaatatcccaaatggatccttcgctatcaaggaaagtattgaataatattgtcgaagaaacaaacgcacttcaaaggccagttgttgaagttgtcaaggaagacagaagtgttcctgacctagcaggtgttcaacaagagcaagcagagaaatattcctattcaaacaatagtggaaaaggcagaaaaatttcaagatcattgtcacgaaggtccaaagatttgatgattaatctaaaatccagggccacaggcaaacaggatagtaacgttaaactttcacctgcttctaaagtgacatctagacgctcacaagatttaatgagggataatgattcacatactggccttgacacaccaaattctaacagcacttctttagatattttggtgaataatcaaaaaagcctaaactataaaagatttaccgataatggcactcttagggtcactagtggaaaggaacccgcccttgaagaacagaagaatcacagttttaaatctccgtcaccaattgatcatttgttagaatcgccagctacaccaagtaatgtatccatgtatcgaactccgcctttagatagctcattgacatttgataggcgaaatgggtcttcatacagtaaccaaaattatagcatacctagttggcagaaaactccaaagacccaattggagaatagcgacaattttgaggaacagaaggaaacactttacgaaaatagcgaatctagaaacgatccctcgcttgataaagaaattgtcacggcagagcactatctgaaacaattaaaaataaatttgaaagaacttgaatctcaaagggaagaattaatgaaagagatcactgaaatgaagtctatgaaagaggctctacgccgacatattgaatcctataatagcgagaaaaataaactatatcttgactccaatgaattatcaaataatccaccgatgataaatgaaatcagcttaggtgagtcgccacccgtgaaacatgttgcaactgcaagttctgtagcgcgaagttctgttaaaccaaaattttggaagtttttttcatctgcaaagccacagaccgagcaatctatacaaggtgtcagtacaaataatacaaattccatcgttaaaagtgccccagttttgctttctgctccctcatctggtagtaattccggccgtttagaaatttcaccacctgtgctacaaaatcctaatgaatttagtgacgttagattagtacctatcgagaacgatgcaaatatgggacaaagtaaagatggagaagaatatttggatggaagcaatttgtatggttcaagtctcgttgctaggtgcaattatgaaaacaatgaaataccgatgatactatctgtctgcatagattttattgaatcagacgaagaaaatatgagatcggagggcatttatagaaaatcaggttcccagctagtcatagaagaaatagaaaagcaattttctgcatggaaagtacaacaaaataccgaaacgccaaatattttaacggaacaagatctcaacgctgttactggtgtgttgaagcgatacttaagaaagctccccaaccctatctttacctttcaaatatacgaaccgttgatgaggttagttaaatctagaaaaatgatggaaaacttgccatttgttggaggaaagttgtccttagaagcaaaaaattcggacacttatatgtcgagcaagagcgctttaaaaaacatattggaagaccttccaagggaacattatagggtgttaagagtactgagtgaacatatagaaaaggttacacggtacagtcactggaatcgaatgacgctttataatttggctttagtttttgctccaggtttgattcgtgatttcagtggagaaaaggatattattgatatgaaagaaagaaactatattgtcgcatttatatttgggaactacaaagatatcctgacgtag

SEQ ID NO: 78630 - DNA, 1716 bp, Saccharomyces pastorianus
atggattctagaacagttggtatattgggagggggacaattgggacgtatgattgttgaggcagctaacaggctcaacattaagacggtaatactagatgctgaaaattctcctgccaaacaaataagcaactccaatgaccacgttaatggctccttttccaatcctcttgatatcgaaaaactagctgaaaaatgtgatgtgctaacgattgagattgagcatgttgatgttcctacactaaagaatcttcaagtaaaacatcccaaattaaaaatttacccttctccagaaacaatcggattgatacaagacaaatatattcaaaaagagcatttaatcaaaaatggtatagcagttacccaaagtgtccctgtggaacaagccagtgagacgtccctattgaatgttggaagagatttgggttttccattcgtcttgaagtcgaggactttggcatacgatggaagaggtaacttcgttgtaaagaataaggaaatgattccggaagctttggaagtactgaaggatcgtcctctgtacgccgaaaaatgggcaccatttactaaagaattagcagtcatgattgttagatctgtcaacggtttagtgttttcttacccaattgtagagactatccacaaggacaatatttgtgacttatgttatgcgcctgctagagttccggactccgttcaacttaaggcgaagttgttggcagaaaatgcaatcaaatcttttcccggttgtggtatatttggtgtggaaatgttctatttagaaacaggggaattgcttattaacgaaattgccccaaggcctcacaactctggacattataccattgatgcttgcgtcacttctcaatttgaagctcatttgagatcaatattggatttgccaatgccaaagaatttcacatctttctccaccattacaacgaacgccattatgctaaatgttcttggagacaaacatacaaaagataaagagctagaaacttgcgaaagagcattggcgactccaggttcctcagtgtacttatatggaaaagagtctagacctaacagaaaagtaggtcacataaatattattgcctccagtatggcggaatgtgaacaaaggctgaactacattacaggtagaactgatattccaatcaaaatctctgtcgctcaaaagttggacttggaagcaatggtcaaaccattggttggaatcatcatgggatcagactctgacttgccggtaatgtctgccgcatgtgcggttttaaaagattttggcgttccatttgaagtgacaatagtctctgctcatagaactccacataggatgtcagcatatgctatttccgcaagcaagggtggaattaaaacaattatcgctggagctggtggggctgctcacttgccaggtatggtggctgcaatgacaccacttcctgtcatcggtgtgcccgtaaaaggttcttgtctagatggagtagattctttacattcaattgtgcaaatgcctagaggtgttccagtagctaccgtcgctattaataatagtacgaacgctgcgctgttggctgtcagactgcttggcgcttatgattcaagttatacaacaaaaatggaacagtttttattaaagcaagaagaagaagttcttgtcaaagcacaaaagttagaaactgtcggttacgaagcttatctagaaaacaagtaa

SEQ ID NO: 78631 - DNA, 879 bp, Saccharomyces pastorianus
atggaggacagtaaaaagaaaggattaatagaaggcactatactcgatataataaacggttccattgcaggcgcctgtggtaaggtgatcgagtttcctttcgatactgtgaaagtcaggttgcaaacacaagcatccaacgtgttcccaacaacatggtcttgtataaaatttacttaccaaaatgaaggaatagcacgagggttttttcaaggcattgcttcacctttagttggagcatgtctggagaacgcgacattatttgtgtcttataaccaatgttctaaatctttagaaaaacatacaaacgtttccccgttggggcaaatcctgatctctggtggagtagcgggttcatgtgctagtttagttttgacacccgtggagctggtgaagtgtaatttgcagtttgcgaacttacaagttgcatcagcaaaaacgaaacatacaaaggtgttgcctacaataaaagcaattataactgagagaggattggcaggattgtggcaagggcaatcgggcacttttattcgagaaagcttcggtggtgttgcctggtttgcaacctacgaaatagttaagaagtcgttgaaagataggcactcccttgatgacccaaaaagagatgaaagtaagatatgggaactacttattagtggaggaagcgctggattggcattcaacgccagtatttttcctgcggatactgtgaaatcagtaatgcaaactgaacatataagcctcaccaatgcggtgaagaagatatttggcaaatttggactaaagggtttttatcgaggactgggtataaccctttttagggcagtaccagcaaacgctgcagttttttacatctttgagactctttctgcactttaa

SEQ ID NO: 78632 - DNA, 657 bp, Saccharomyces pastorianus
atgacaaagctacaaggactacagggattaaaacacatcaaagcggttgtatttgatatggatggcacattatgcctaccccagccttggatgtttccagcaatgagaaacgccataggattggaggacaaatcgattgatatccttcatttcattgatacattgcccacagaaaaagaaaaaaaagaagcgcatgatagaatagaattagttgaggcaaaagccatgaaggagatgcaaccgcagcctggtctggttgacataatgaggtatttgacgaaaaatggtattagcaagaacatatgtactagaaatgtcggagccccggtagagacttttgttaaaagatttattccatccgagctttcgaggtttgactatattgtgacaagggagtttaggcctacaaaaccgcaaccggacccattattgcacatcgcctcgaagctaaatataaggcccttggaaatgatcatggtaggagattcatttgacgacatgaaatccggtagatctgctggatgtttcacggtattactcaagaatcatgtgaatggacatttactgctcgaacataaagaactagtagacgtttcagtagaggatctttccgaaataattgaattgattcaaaatatgaataaagaaagtttctaa

SEQ ID NO: 78633 - DNA, 1230 bp, Saccharomyces pastorianus
atgtttaacatgaatctactttctacaccttcttctgaagagggttctccacagaataggtcatcttcaatgtcttctgtcgagggcaagaaggatagggacacctttactaatttgcaaaacgaatttgatggtaaagtatttggcgtctcactcgaggaatcactgaaagttgctcaagaggaagtaattatccaaaaaagtacaaatgaaattggttccataccggtggtaatagcaaaaagtgggaaatacctaaaagagaatgcattagacacaacaggaattttccgtattgcgggaagcaataaacgtgttagagagctacaagctgttttctctaaaccgcccgattatggtcgtaaatttgaaggatggtgtgatttcaatgttcatgacattgcaactttattaaaaagatacttgaactcattaagtgagcctttggttcccctagcattatacgacatttttagaaatccaatactagaaaacccaaaaataaatgagcacaaggaacaaatcattaaggactacgaagatatttatatgctcttaccacaacaaaatcgccatttaatactttatttagccgcgctcttgaatttatttgcaagaaatgaaaagaagaatttaatgtcagcaagcaatttagcggccatcgtacaaccctcacttttgtctcatcccaaggatgaaatgtgcccgaaagagtatgaggcttccagaactgtcatcgaattcctcatactacacgcttcagatataataccgaatacggaaaaagcgaataaggacaccatgccgcatgcaggaacagtagcagagtttaacaacattaccgttcctgaaatggctattgactccgatgaagaagattttgtgcacccttcaatagatgaccatatgcttccaaggtcacgtgcactttctgactccaacaattttaccatacatcatcatcatcatcatcatcatgcactgtttcctagcccaatagattttgataacaatgggctttctgtaccgagatcctttaaaggtagaacattgagtgcagagtccctttctcccagacttagtaaattacttgggaacgttggaaacagcagcaatactggcatcaaagaccctacagaaagagttcctagaggtgaacataaaaccaaacacaaacaacgacagtcatggttgagaagactcactagcccttctagaacgcagccttag

SEQ ID NO: 78634 - DNA, 342 bp, Saccharomyces pastorianus
atggtcgttaatccgttgacaaagatagggctaacatcacaagattcccattctatggggacgtttgctgcactaaagattttctttacagacttggaaatttcaggtccgataccatcaccttcaatgaacgagaccgtgtatttgccggtagaagggttaggtttcccggtatatcttccgattgaaggttgctttacagtagccaaaaacctcctcgaggtgtttctaaaaaaagtatttctcaacattattaaaaaatattataattgttgttcgttcccgatctgtatcctattatctaccaaggtaattcaggttcagaaaaagtgtatccaataa

SEQ ID NO: 78635 - DNA, 1110 bp, Saccharomyces pastorianus
atgttgagaaatactttttttagaaacacctcgaggaggtttttggctactgtaaagcaaccttcaatcggaagatataccgggaaacctaacccttctaccggcaaatacacggtctcgttcattgaaggtgatggtatcggacctgaaatttccaagtctgtaaagaaaatctttagtgcagcaaacgtccccatagaatgggaatcttgtgatgttagccctatctttgtcaacggattaacgaccattcctgaccctgccgtacaatctatcacaaaaaacctggttgcactaaaaggtccactagctacacctattggtaaaggccacagatctttgaatctgacattgagaaaaacatttgggttatttgccaacgttcgtcccgcaaagtctattgaaggttttaagaccacttacgaaaacgttgatttagttcttatcagagagaataccgaaggtgaatattctggtatcgaacacatagtttgccctggcgttgttcaatctattaaactgatcacaagagatgcctctgagcgagtcattagatacgcttttgaatatgcaagagccatcggcagaccaagagttattgtggtacataaatctactatccagagattagctgatggtttattcgttaatgttgccaaagaactatccaaagagtatcctgaccttactttagaaactgaacttattgataacagtgtgttaaaggtggtcaccaacccatctgcttacacagacgctgtttctgtttgtccaaatctatacggtgatatcttgtccgacttgaactctggtttgagcgccggttctttaggtttaactccatctgccaatattggtcataaaatctcgatctttgaagctgtccatggctctgcccctgatattgccggtcaagataaagcaaatccaactgccctacttttatcttcagtaatgatgttaaaccacatgggtctaacgaatcatgctgaccaaattcaaaatgcagtattgtctactatcgcatctggtccagaaaacagaacaggtgacttggctggtactgctactacttcatcattcactgaagcagtcatcaagagattataa

SEQ ID NO: 78636 - DNA, 2016 bp, Saccharomyces pastorianus
atgatggataatcaggctgtgaagtcactgctagaaatgggtattccacacgaagtagctgtggacgccctccaaagaactggcggtaatttggaggcagcagttaacttcatcttttcgaacgagctgccggagcaagcggaaatgggtgaggagaatggtggcagtcagcctaggatttttgagaacaaaatagtggctggaaccaagccctgtaatgttccgaacaacggggaccaagacattgaaatgccggatgtgagtggtgtcgatgttgattatgatgacgatgaagacatcacggatgaacgcagcggttctaatagcaccagcggatgcagggttactgctcaggactacgatcgttattctatatcggagacatccattcctcccccctcttatagtatagtacaacacaacgagttcaagtcgaacgtgggcgatcctacggttgtgttgccgctacccttgaatagtctaattgagagctattttgggctgtttgcgttgctcgcggccgtgtatttcccacacgtgttcttgaaaccggactttaaggatttgaactatagggcagactggttcaagggctcgtcgtttacggagcccaaatacagacttgcatattgcgaggcagaggatggttccactacgtcggagatcgtgctggccagcgggcctaatgaagggttgcaaccgcatctgctctggcagctgcaaaaactcatctccgtggttaacacgcgaaagtgtgaaagagcctttgtttcggccaaggtgtttacgtcgtccttggaaccgcaattgaggtccaagctggccgattccgagcatctttatgaggtgctcccagcgtttatcaaatcattggcagtggatttggaaatgtgtcctgggatcagagaccgggaaacaagaagtctctttatatcttctgctttgcatactccgaacaagaatgaacctccaatggagacgtttttgtccttgtttcattttcttcctgaggagtacgattctaatctatataaaatgttcaacgttttattgtaccccgaagaagaggaagaagaagaagacgtgattcgtggtggcgagcaagaagaggcgagatatgtggaaccggagaataccttgaaggaggtggcacccgtattaacaatcctgttcaatgaactagaaacaaatacagaatcagtgtctctacccaatggcgtggatataccgcttgagttttacccacagctttacaccaaacagtgcaaagaccaactaataagacatattatttctaaacgaaagcaagcgcggaccagatccagatgcttgcttcaagagatcaacgagttaaagagttaccaaggcaaaaacatatccactattctagagtcgacgctggcgtatctacaaacaattcctgacgatgctaataatgaagcagcaaagcagatcgcatcgttgaaagatacattaaattctgcgagagccgctaaaatggaggaatataaggacttggcgtccaaactgcatggagaatggaacctttcacatccagagacacacataatcaacactgcaaagcaattgggactgatcgaaaatccctacatcctcacaatggcagcactatcgccatattcatactttatcagaagcagaaacggtgcatggtcatggatacaaagtaatacgttgggaacagaattcaaggtgaaaaaatgttcgtcgccttctgtcgttcaagaagccatcaagcatggcacgaagtacgcaagtgaaactccgctgatgttcatatactgtgaagagggtaaaattcccacggaagaagtagtcgcggaagcgttgaaaagcaatagcgggtgcttaaaatttgctgaggatgaccaaaattcattaaaaacattgcgttcgcaatttttcgatggtatgggagatcctgaacaagccaccaacaatattaacaatggtaacgataatgacaatgacgatgacatcgattctgataattag

SEQ ID NO: 78637 - DNA, 393 bp, Saccharomyces pastorianus
atgttcaactgtcttacaaagctcgtaatattagtatgcttgaaatatgtagccaaagccttactaaaccgttccacgggcttaatcatgaaggataagcccgaaggggtccaccatatcaagtcgtgtagcgattcgtcctccagaatctggtatagcttatggatgaatatcgcattttgtggcggcctgggccccaccagcatcttcgacccatgtttcttaacatcctcggcaccgtcgccgccttcagcaccagcattagctattccagctgctgctccaccactacctacatcggttccagccggggccggtgtagaagctggagctggggctgagaccgtttcctcttcactcatgattttttcttctttttttctatataactga

SEQ ID NO: 78638 - DNA, 2646 bp, Saccharomyces pastorianus
atgtcgcaagaagaagcagaatccagtattatttatgaggaacccattgatattccgttagaggatgatgacgatgaggatgaactggaagaagaaaatagcgtacctttaagcagccaggcggatcaagaaaatgcggagaatgagtcagacgatagtgtcgataacttagttggatctgagacacccagaagtgtaacaggtctttctgttgacccaagagacgttgcagacgaagaagatgaagatgaagaaggggaagacgaagatgaagacgaagacgacaatgatgttgacaatgaggacgaaaatgataatgataatgccaacgaaaatgaaaataaattagagagctctagagataagagggcaccacctgctgtgcagactagtaaacgttataagaaatatccgaagctagatcccgcaaaagcacctcccgggaagaaagtcccgctacatcttttggagaagaggagactaggacgtattaaagctgctgaagaatttgccaagacgttgaaaaaaattggcattgagaaagtggagacaactactttacctgccactggcctgttccaacctttaatgttaatcaaccaaaaaaactactcatcagattatctgaaaaaagacgatcaaatatttgcacttagagatagaaaatttttgagaaataacaatactagccaaatatctagtaccaacacaccagatgttatagatttaaagagtttaccccactcagaagcgagtgcagcaccacttaatgacgagatagatctaaatgatccaacagctactatcgtgatacatcctggatcaaattctataaagataggatttcccaaagatgaccatcctgtcgtagttccaaattgtgtagcggtacctaaaaaatggttggatcttgaaaatagtgaacatgttgaaaacgtttgccttcaaagagaacagccagaagagtttaacaacataaagtcggagatggaaaagaattttagagaacgtatgaggtattataaaagaaaggtaccaggtaatgctcacgaacaagtagtatctttcaatgaaaattccaaacctgagattatttcagagaaaaatgatccatctcctatagaatggatatttgatgactcaaaattatactatggttcagatgcattgaggtgcgtggacgaaaaatttgttattagaaagcctttcagaggtggctcttttaatgtcaagtcaccatattataaatcgttggcagaattaatctcagacgttaccaagcttttggagcatgcacttaactcagagactttaaacgttaagcctaccaaatttaatcagtacaaggtcgtgttggtgataccagacatattcaagaaaagtcatgtagagacgttcattagagttctactcaccgagttacaatttcaagcagtcgctattatacaagaatcattagcgacttgctatggtgccgggatcagtacctccacatgcgtagtaaatataggtgctgctgaaaccaggatcgcctgtgttgatgaaggaacagttttggaacatagtgcaattacgttagattatggtggagatgatattacaaggctcttcgctctatttttgctacaaagtgatttccccctacaggattggaagatcgattctaaacatggatggcttcttgctgaacggctgaagaaaaatttcaccactttccaagatgctgatgttgccgttcagttgtacaattttatgaaccgctcacccaatcagccgactgaaaagtacgaattcaagctgttcgacgaagttatgttagcaccattggccttattttttccacaaattttcaagttgatacgaacttcctctcacaagaattccagcctagaatttcagttgcctgaatctcgtgacctctttacaaacgaattgaatgactggaactccttgtcacaattcgaaagcaaagagggaaatttgtattgtgatttgaatgacgatctcaagatcttaaacagaatattagatgcccataacataattgatcaactccaggataagcctgaaaactatggaaatactctaaaggaaaattttgcacctttagaaaaggctatcgttcaaagtatcgcaaatgcatccataacagctgatgtaacaagaatgaactcattttattcgaatattcttatcgttggtggcagttccaaaatacctgctttagattttattttaactgatagaatcaacatttggaggccctctttgttgagttcggcatcgttcccgcaattttacaaaaaactgactaaagaaatcaaagaattagaaggtcattatgtaaatgcccctgacaagactgaagatgaaaacaagcaaattttgcaagcccaaatcaaggaaaagattgtagaagagctggaagagcaacatcaaaatattgagcaccaaaatggtaacgaacacatttttccagtgagcattatcccaccaccacgtgatatgaatcccgctctaataatttggaaaggtgcgagcgttttggcgcaaattaaacttgtcgaagaactgtttattacgaacagcgattgggatgttcacgggagtagaatcttacaatataaatgtattttcacgtactag

SEQ ID NO: 78639 - DNA, 990 bp, Saccharomyces pastorianus
atgttaagatctaccgtttcaaaagcttctctcaaaatttgtcgtcactttcacagagaatctattccttacgataaaacgatcaaaaatttgctgcttcccaaggacaccaaggtgatctttcaggggttcacaggtaaacaaggtacttttcatgccagcatctctcaagaatatggtacaaatgttgtgggtggtacgaacccaaaaaaggcgggtcaaacacatttaggccaacctgtctttgcctctgtgaaggacgcgattaaggagactggagccactgccagtgccatctttgttcctccaccgatcgcagctgctgccattaaagaatctattgaagctgaaattccgttagctgtatgtatcactgaaggtattcctcaacatgacatgttatacattgcagaaatgttgcagacacaagataaaacaagattagttgggcccaactgccctggtatcattaacccagcaacaaaggtaagaattggtatccagcccccaaaaatttttcaagctggtaagatcggtattatttccagatcgggaactttgacatacgaagctgttcagcaaactacaaaaactgaccttggtcaatcactggttattggtatgggtggtgatgcttttcccggtactgattttattgacgccttgaaattatttctagaagatgaaactacagaaggtattattatgttaggtgaaataggtggtaaggccgaaatcgaagctgctcaatttctcaaagaatacaactttagcaggagtaagccgatgccggttgcatctttcatcgcaggaactgttgctggtcaaatgaaaggtgttagaatgggtcactccggtgcaattgtagaaggatctggaactgatgcagaatccaaaaagaaagctttgagagatgttggtgttgccgtcgttgaatctccaggttacttaggtcaagctttattggatcaatttgccaaatttaaatga

SEQ ID NO: 78640 - DNA, 825 bp, Saccharomyces pastorianus
atggttgcgcctactgctttgaaaaaggctactgtgacacctgtaagtggacaagatgggggcagtagtagaattataggaataaataataccgaaagcatcgatgaggacgatgatgacgacgttctgttagatgattccgacaataacacagcaaaagaagaggtagagggcgaagaaggtagccggaaaatgcacgaatctaagaccgtagtggttgatgaccaggggaaacctcgcttcacttcagctagcaaaacgcagggtaacaaaataaaatttgaatcgagaaagatcatggttccaccacacagaatgacacccttgaggaacagttggacaaaaatttatcctcctttggtcgagcacttgaagctgcaagtcagaatgaatttaaagaccaaatccgtagaactaagaacgaatcctaaatttaccacagaccctggtgcgttgcaaaaaggggccgattttatcaaagcctttaccttagggtttgatcttgacgattctatcgcactattgaggctagatgatttatatattgagacttttgaagtcaaagatgtcaagactctaacaggtgaccatttgtcgagagccatcggtcgtattgccggtaaagacggtaaaacgaaatttgcgattgaaaacgctacaagaacaagaattgtcttagctgactctaaaatccacattttgggcgggttcacccacatcagaatggcaagagaatctgtggttagtttaattttgggttcccctccaggtaaagtttatgggaacttacgtaccgttgcatctagattaaaagaacgctactaa

SEQ ID NO: 78641 - DNA, 306 bp, Saccharomyces pastorianus
atgatctttctcgattcaaattttattttgttaccctgcgttttgctagctgaagtgaagcgaggtttcccctggtcatcaaccactacggtcttagattcgtgcattttccggctaccttcttcgccctctacctcttcttttgctgtgttattgtcggaatcatctaacagaacgtcgtcatcatcgtcctcatcgatgctttcggtattatttattcctataattctactactgcccccatcttgtccacttacaggtgtcacagtagcctttttcaaagcagtaggcgcaaccataatgtag

SEQ ID NO: 78642 - DNA, 1551 bp, Saccharomyces pastorianus
atgatgaggtatcaatggtggctttatttagtatatgccatcggcctaatgctatgcctaggcccgtcgtatattcatccagatgaacatttccaatgcatcgagattttggctatgcagttcatgaaggtcaaaggtaccatcccatgggaatttaaatcaaaatttgctgctaggagttacggtcccctattattggtttacgggcctttgttcactattttaaaatcttttcccgaaattcaggacaacccagcgttaattctgtattcgatgagactacaaaactatgtgatgtacctattgtgctatcattttttaattcctaaattaataagggatgagagaaaggccgtacacttcatcaaaaaaagtctacttttaacttcttacgtaacctggacgtaccaaacacacacgttttccaattccatagaaacgctggctttgatctcaactttaactgtaatggaagatatggtaaacgaaaaaaatattcaaagaaggaatttcaaaaattcggtcatattgggacttatatttagttttggtgtttttaatagagttacttttcctgcatttattttcttaccatgtttgatattattctggaagttttaccgggtccattggaaatccttttctttacttttactttcattttcattttcctcgtgtctatttgttcttattgatacaaatatttataacaacggaaagggatttgttattacgcccttgaataacctgaaatacaacctcaatgtccaaaatttgcaagtacatggattacatccaagatacacccatctgctggtcaatttacctcaaatacttggtccagtattgctgctagcgattttttccggttacaaactcgataaattatctagttacgcaatcatatctggcctgctttttctttcattctttcaacatcaagaattaagattccttgtaccgctagttccactactcgtgacaaacttaaactggacacctctgagttccacgttagtaaacaagaaaattttcaagggaacttggcttctttttaacataatcatggcgttcatcatgggaatttcgcatcaagcaggaattatccaatttttgggagattacttccactttcgtaccgaacaaatgggcgttcacatatggtggaaaacatactcaccacccacctggatgtatatgagcaataacctaaccgtttcttctcttatcaatacacaggatggtattgagtcgatagatgaagtggcattcagtgtaggtaaccatcatgtaatagaccttaaaggctgtgatttaccacttttaacagaaacaattaggcggctgcgtttaaacgggtccataactccactaactttagtaactcccaattccatgacatcagaattgaaaaagttgaagagagatggcactattaacttaatacccaaaagaaattacttgttccatatggatttggatcatcttgatttcaatgatttcacgacttttaagccagggctaacagtgtactccatcgaactactataa

SEQ ID NO: 78643 - DNA, 771 bp, Saccharomyces pastorianus
atgtttaatttaattttatggcccttatttttgcttacctcagttgccattcctttgcacctgacattagaagtggtctatctgacgtcttccgttgacttctcaaaggcaagtgctgctaaaaccgctacttctttgggtcagtccccagttgtcatcaccatttataaatcactgttaaaatattggagtctttacgagttcatacattttatttacctctatactcctattgatgcctttctgaatttcttaccatttacctctttacttatgtcgtttggaagtatttgcttgacaagagagctggtatatgacttcattgcctttatggaatctcaaaacaagcttaccggattccttaataagataacagaaccgaattttaacagttatctactgttttcttcaatttataacatttggtttgcagatgacaccaatgacaaattcttattcggtaaattaactcagattttaatatctgtaacaaaaaggtacgaatttccaagaacattctacttagcaaaagtttctgatttcctacaaaatctcattctaacgagattgagaccctttgtaacggagcaaccccaaggcgacaaaaatcgccatcaaaacggtgaccgtgaatctacaaagaatggagctgcttatcagaagtcttcacaacaatcatcgtctttcgaacaaaattttaccagcactgagttcccgaatgattatgattttatggaggatattctagatgagacaactgaattggattag

SEQ ID NO: 78644 - DNA, 1353 bp, Saccharomyces pastorianus
atgtcctcaaggtatagagtggaatatcatttgaagagccaccgcaaggatgagtttatagattgggtaaaggggctactggcctcaccttttgttctacatgccgtctctcatgaaggtgactacaatgacgacttagcaacaactcaacgtgtaaggtcgcagtatgctgatatctttaaagacattgaagggctgattaaagataaaatagaatttgactcaagaaacatgagccaagacgaaattgaagatggcgcctcttctcaatctctgaatatattaggacaatcgcgtttaaatcttttggttccatcaattggaacattctttacggaacttccattggaacaagcttttctatgggaagactcacaacgggccatttcggcgcgtagaatggtagcacccagttttaatgatatcaggcatatcctgaatactgcacagatatttcactttaagaaacaggagaacttacataatggtaaggttttgagattagtgacttttgatggagatgtgacgctgtatgaagatggtggctccctggtttacactaatcctgtaattccttatattctcaagctgttgcggtgcggtatcaatgtgggaatagtcactgcggccggatatgatgaagctggaacctatgagaacaggttaaaaggattaattgttgcattacatgattcaactgatataccagtttctcaaaagcagaatttaacaataatgggtggtgagtcgagttaccttttccgttactatgaagacccggaggaagataactttggctttagacaaattgacaaagaggaatggctattgcctagaatgaaggcttggtccctcgaggacgtggaaaagactttggactttgccgagagaactcttaacaggttaagaaaaagactaaacctaccttcagagatttctattatccgtaaagtcagggcagtgggtatcgtcccaggcgaacggtacgatgaagcttctaaaagacaagttcctgttaagcttgatagggaacaactggaggaaatagttttaacccttcaaaacactttagagtcttttgccccatctagaagaattcaatttagttgttttgatggtggtagtgatgtctggtgtgatattggggggaaagatcttggtgttcgttcattgcaacaattttataaccctgaatctcctatccaaccctctgaaaccttacacgtaggcgatcagtttgcaccggtgggatcagcaaatgattttaaggcaaggctagctggatgtaccctctggatagcatcccctcaagaaacagtgaattatcttcatagattattagaaactgattaa

SEQ ID NO: 78645 - DNA, 786 bp, Saccharomyces pastorianus
atggcaggtttatcgttcgacaattatcaaagaaataatttcttagcggaaaactcgcacacacaacctaaggcaacttccacgggtaccaccattgtgggcgtaaaattcaataacggagtggtgattgcagcagatacaagatcaacacaaggtccaattgtcgcagataagaattgcgcaaaattgcatagaatttcccccaaaatatggtgtgctggtgccggtaccgccgccgatactgaggcagttacgcagttgatcgggtctaacattgaattacattccttatatacctcgagagaaccaagagtggtctcagctttacaaatgctaaagcagcacctatttaagtaccaaggtcatattggtgcttatttgattgttgcaggtgtagaccctacgggatctcatttgttctccattcatgcgcatggttctactgacgtgggctactacctttctctaggatctggttctctagcggcaatggctgtgttggaatcacactggaagcaagaccttacgaaggaggaagccataaagttggcctctgatgcaatccaggctggtatctggaatgatttggggtctggttctaatgtggatgtgtgtgtcatggaaataggtaaagatgcagaatacttgaggaattacttgactccaaatgttagagaatcaaagcagaaaagctacaaattccccaggggtacaactgctgtgctgaaggagagtattgtcaatatttgtgacatacaagaagaacaagtcgatataacagcttga

SEQ ID NO: 78646 - DNA, 285 bp, Saccharomyces pastorianus
atgtcgaacaaagttaaaaccaaggccatggtgccaccaataaattgcatatttaacttcttacaacagcaaacaccagtaacgatatggttattcgagcaaatcggcataaggatcaagggtaaaatagttggatttgatgagttcatgaatgttgtcatcgatgaagccgtggaaattcctgtgaatagtgccgatggtaaagaagatgtggagaagggcacgcccttggggaagatcctgttgaaaggcgataatatcacattgataacatcagcggactga

SEQ ID NO: 78647 - DNA, 81 bp, Saccharomyces pastorianus
atgctccaaatgcgggccaccttggcattccttggtcagactttgacatataataccagctgccaaagacgccagaaataa

SEQ ID NO: 78648 - DNA, 261 bp, Saccharomyces pastorianus
atgaacgtgaagactaaaaacacaatacctgcagaccagtacctcaaagacatgtacatgatggcagtcccaagagaagccactaggttgatgaccataccgcaatatataaactgcttcggaaaaattcgacaaagtgtgaggcccaaaacggagaataccagggcaataatgcacacgaaaactagcaggatggcagcattggtgttcagcgtaccagtattcacaccatcgtatattccggaacccgtactgctatag

SEQ ID NO: 78649 - DNA, 147 bp, Saccharomyces pastorianus
atgtcttacacacgagtagatcatcccattggaaaaatggcttgtcatctgaggcagattttggcaagcccactgtttttcgcaaattatgtactacatgcagccattcactacccttcgagcgacatacgcggcgacatcctgtag

SEQ ID NO: 78650 - DNA, 567 bp, Saccharomyces pastorianus
atgggcaaaaccgcggataatcatggtccagtacgttctgagacagcacgtgaaggaagagaaaaccaggtttactcacccgttacaggtgcaagattagttgctggctgcatatgtttaacacccgacaagaagcaagttctcatgattacttcttctgcacacaagaaaagatggattgtccccaaaggtggcgttgagaaagacgagcctaattacgagacgactgcccaacgagaaacttgggaggaagctggttgcataggtaaaattgtcgccaatttgggtacagttgaagacatgagaccccctaaggactggaacaaagacattaagcaattcgagaactctcgaaaagattcagaagtagcaaaacacccgccaagaaccgaatttcatttttatgaattagagattgaaaatctccttgataaatttccggaatgtcacaaaagacatagaaagttatactcttatacagaagctaaacaaaacttgatagacgccaagaggcctgaattgttggaggcccttaataggtctgctatcattaaagacgacaaatag

SEQ ID NO: 78651 - DNA, 939 bp, Saccharomyces pastorianus
atggttcctgctgaatctaatgctgtacaagcgaaactcgctaaaaccttacaaagattcgaaaataagatcaaagctggagattattacgaagcgcatcaaacgttgagaactattgctaatagatatgttagaagtaaatcatacgagcatgccatagaactaattagtcaaggggccctttcatttttaaaggcgaagcagggcggttcaggcacggatttgatcttctatcttttagaagtttatgatttagcggaagttaaagttgatgacatctcagttgctagattggttagattaatagccgaattggatcctagcgagcccaatctaaaggacgttattactggtatgaacaattggtctatcaaatttagtgaatacaaatttggagatccttacttgcacaacaccattggtagcaaactattagagggagatttcgtttatgaagctgaaagatattttatgttaggtacacatgattcaatgatcaaatatgtcgatttactatgggactggttatgccaagttgatgatatcgaagatagcacggtggctgagttcttcagcagattggttttcaactatttattcatctccaacatatcatttgcacatgaatcaaaagacatttttttggaaagatttattgagaaatttcaccccaagtacgagaaaattgataaaaatggttatgaaatagttttttttgaagattattctgacctaaattttttgcaattgttgctaattacctgtcagactaaggataagagctatttcttaaatttaaagaaccattatttagatttttctcaagcttacaaaagtgagttagaatttttgggccaggaatatttcaatattgttgctcctaaacaaacgaatttcctacaagacatgatgtcgggattcctgggcggatcgaagtga

SEQ ID NO: 78652 - DNA, 1377 bp, Saccharomyces pastorianus
atgaccgatgagaaacgagcttttccaaaaggtaacaaccatataagatcagaaactttcaatggttcggtatctcacaaaatctccgaatcgattaaaaatatcgctagcttaagaccacacggtaaatatacggtacaagacatcgacaacatcatagcatccacatcttcacatgaaaatagaggccaatcaggcgatagtaatggctgtataaatcacgacgaagaaggcgatattccgatgtgtgacttgaatgatgaaagcgacgttgaaatgatttctgaatatctttctaaccagagggagatggaagcacaatctgtcgctcattctatgccaaaaatcaatgacgatttaccgctgttaaatccacctactttgaaaactgcctttgtagtcgacaccaactttattatttcgcatttaaacactttagaaaaattgagatcactgtccagcacttatcatcatttgattattgtaccaaccaccgtaatccaagaactggacggactaaaaaagagccctgatattgctagggacaatgacgatacaactaatcaggaacaagataggacaataggcacattggccagatgggggaacgactggatttataagaatctagccaatttagattccggtttaataggtcaaaaattgaaacaaagcttgaatccaggcagtttaaaggatgactcgatattggactgttgcttgtacttcaaagagattttaaattgttttgttattttgctttcgaatgataagaatctttgtacaaaggcattaactgaagatatattaactgtttcatttaggaagaacatggatgcgaaaataattgcaatgagagcatatgaagaaaaccaactgagatttgctaatctgcgtgactctacagtaaataatttcgatcagaatgtcacatcatatgctcatattcctggaatagaaatgccccctttgcaattcgataaagtctcacaaaatgtgtttgagcaagtaaaagaaactattttctttgctattgaccacactttaagaaaggaatatggtgaagatattggattcatagattacaacccagataaattaactaccatagaaaacgcttcgaattacatttatttgttttgggtgtctgtattttcggaacttttcacttgttcaaagataaagaagaatgagtggaagagcttaccaacagttttgaaatcaaaaccgacaaatctgaatgacttaaaaacatttgaacaattttgggagactgtattgcattttttattcagcaaatttacaaatgaggagaaacaatctttagagaaacagattcatgaatggaaaacatctatcaatgctatatcaacctga

SEQ ID NO: 78653 - DNA, 204 bp, Saccharomyces pastorianus
atggataacaaaaccccagtcactttagccaaggtcatcaaagttttaggaagaaccggttctcgtggtggtgtcacccaagtccgtgtcgaattcttggaagacacttccagaactattgtcagaaacgtgaagggcccagttagagaaaacgacattttggttctaatggaatctgaacgtgaagctcgtcgtttgcgttag

SEQ ID NO: 78654 - DNA, 2430 bp, Saccharomyces pastorianus
atgtcttctgtagaagaattgactcagctgttttcacaggttgggtttgaagataaaaaggtgaaggagattgtcaagaataaaaaggtttctgattcactttacaaattgattaaggagactccttcggactatcaatggaacaaatctactagagcgctagtacacaacctggcatcttttgtcaaaggtacagatctacccaagtctgaattaattgttaacggcatcattaatggtgatttgaagacatctctgcaagtcgatgccgcatttaaatatgtaaaggctaatggcgaggcatccaccaaaatgggtatgaatgaaaactctggtgttggtattgagattacagaggatcaggttagaaattacgtcatgcagtacattcaagaaaacaaggaaagaattttaactgaacgctataaactggtgccaggtatttttgccgatgttaaaaacttaaaggagctgaagtgggccgatccacgtagtttcaagccaattatcgaccaagaagtcttaaaacttttgggtccaaaggatgagagagacttaatcaagaagaagaccaagaataatgaaaagaagaaaaccaattctgccaagaagagttctgataattctgcatcatccggtccaaagaggactatgttcaatgaaggtttcctaggtgatttgcataaagtgggtgaaaacccacaagcttacccagaattaatgaaggaacaccttgaggttactggtggcaaagttcgtacaaggttccctccggagcccaatggatatttgcatattggtcattctaaagctattatggttaattttggctatgctaaatatcacaatggtacctgttatttaagatttgacgataccaaccccgaaaaggaagctcctgaatattttgaatccattaagagaatggtttcttggttaggttttaaaccatggaaaattacttactcaagtgattattttgacgagctttatcgcctcgctgaagtgttgatcaaaaacggcaaagcttacgtttgtcattgtaccgccgaagaaattaaaagaggtcgtggtattaaagaagacggtactccaggtggggagagatatgcttgtaagcatcgtgatcagtcgatagaacaaaacctgcaagaattcagagatatgagagatggcaagtacaaacctggtgaagctatcttaagaatgaaacaggatctaaattcaccaagcccacaaatgtgggacttgattgcgtatagagttttaaatgctccacatccaagaacgggaacaaaatggagaatttatcctacttacgattttacacattgtttggtcgattcaatggaaaatattacacattctttatgtactactgaattctacctatctagagaaagctatgaatggttatgtgatcaggttcatgtgttcagacccgctcaaagagaatatggtcgtttgaatatcaccggtacagttttatccaaaagaaaaattgcgcaattggtggatgaaaaattcgttagaggctgggacgatcctagactattcacgcttgaagctatacgcagacgcggtgttcctcctggtgccattttatcctttatcaacacattaggtgttaccacaagtaccacaaacattcaagttgtgaggtttgagagcgctgttagaaagtacctagaagataccacaccgagattaatgtttgtgttggatcctgttgaagttgttgtcgataatttatctgacgattatgaagaattggcaactattccttacagacctggtactccagaatttggtgaaagaactgtaccatttacaaacaaattctacattgaaaggtcagatttctcagaaaacgttgatgataaggaatttttcagattaacaccaaaccaaccagttggtttaattaaagtctcacacacagtttctttcaaaagtttggaaaaagatgaagctggtaaaattataagaattcatgtcaactatgataacaaggttgaagaaggttcgaaaccaaagaaaccaaaaacttatattcaatgggttcctatctcttcaaaatataattctccattgagagttactgaaactagggtttacaaccaattgttcaaatctgaaaatccatcttctcatcctgaaggcttcttgaaggacatcaacccagaaagtgaagtcgtttataaagaatctgtcatggaacataacttcggggacgttgtcaagaacagtccatgggtcgttgattctgttaaaaactcggaattttatgttgaagaagataaggattccaaagaagtgtgtagattccaagctatgagagtaggttatttcactctggataaagagagtacgacttctaaggttattttgaatagaatagttagcttgaaggacgcaacttccaagtga

SEQ ID NO: 78655 - DNA, 306 bp, Saccharomyces pastorianus
atgatatataactggggatgtataattataatgaaaacaaaaatggaatataaaccatactccgatgatagaaacattatatcgccttttcttttcgatgtagtatttctttttacaaaaaaatcatttttgaaggaaaatataacgttaatctacatggattcaaactctgtatcgatatatctaccattccttagcaacgtcttgcataacatgggcattatttccacttgcaagggttccaaaggaaacttttcaccatccactgaaaataaacctgactccacttttggtataatcttataa

SEQ ID NO: 78656 - DNA, 2361 bp, Saccharomyces pastorianus
atgagtaagcggggtagtttacaggatagagcttccccatcggaggaaactgtaaagaaggcgcagaagagacggaaaccaataaagtcatgcgctttttgtaggaaaaggaaattacgttgcgaccagcagaagccaatgtgctcgacttgtaagacgaggggtcgttctggttgcctgtatacagagaaattcacccacaaaatagaaacaaaagagttatttggcagtactccgaacattgaactgttgaaaaggattgaggatttagagaaaagactagatgacaaagagttgacggagaaggatgtagcgcttagtacgagcccatttaggaacccttacgctaatttttactatttacaatgtaaaggctcgggaagaagaatagtatatggtcctacatctttgagaacgcatctctcaaacgatgataatcggtttgtaaacacgtataatcagctctggtccaaagtgaaaatcgagagaaacagatggaaggctaggcataaatggacaatgaagccagaaactcaactcctagagggaccgccgttagaaaagacaggctctgacatcttgcaacaggtttgtaacgttttgccatcttttgaacaatcgtcaaagattataacagactttttcaatactgaactggaaactaatgaagttagtgaagtattagataaaaccaaaataataaacgatttcacttcctcgtttcttccaagtgacgaactgttacccaacggtgaaaggcggattgaaaagttattaccatcgacaaagaaaaactattataagattggagttattttgatgatactgtgtattcgccatttctacaaaaatactccggaagagatagagaaatttctcatcatgctgacgggactgtcaacagctaaagtatatttcattgaacgcgctcaatttctcttattgaaatactatcatcgagaactaatttgggtgtgtggagacgatttgcatatgattagtctagttgacttattatgcagcacggcaattatgctgggtttacacttgaatataagagaaatatacaaaaatcaagaaaatattgtggggagtatggaaagtttggaaaatttgtgggtttggattatattatcagatttcaatgtttctttaaatattgggagatgtttggcgattaactcatcctattttcaagtcgatgaatgcgagaatggtgagaggttgcctaaaaatacaaaccattattcatcgacggtttttttcgatcagtcaaattcctgcatgggcaagcttaaaaggtttttaagattagctcgaccaatgctagatcaaatttatgatagaagcgcatttccagacttagccgaaaattgtaaaaaactaagaaactttgtagagactgaattccacccaatatcatattacactgacagtgagttaatatctaaagttcctttgtgcgagattaaagtgcttgcgcaggttttgaatttgttgttgacgttttattccttgaggtatttgatttacaaggaaaaaagcgttgttttagagaacaacatcctgcaaaccattttggtctctttttcccttgtcatcaatacgaccatactgtgttttaacctagatgagaagcattttcctgagttttttgatcataattgcgttcatttaccgccatttatggccttgtctttagtatacacaaatttcctttttcctagggcctctactggcttttgtgcgtttttgtatcataagttaactctttttgagaagggctattatctatcatccaacatcaaagatcaagaagtcacagattgggatttgtcaaccttgaatatcccgttggataaagctatgaacttacttactgctttcaaaatacattcagatatatttgctaaatggtctaatgataacaacaagcagttaagaattattatggctcgctcttatacatttgttatcaacatcgccctggaaagcatatatagagctgttttggaaaaagtaatcaaatatagaaccgaggtcgaaaacacatgcttacaacaactccaagacgaattgaatgggtcctattcgctcactgacaatgtaaatactccaatcgatcccagtttaagtgacctgggcgtcacaagcgccagtccattggcgggaaattctccaggattacccccggaggaagtgcgaaataacagcgaaaacgcttcgcataacaatgaaactgggccaattgagactgaactggcacagacaatatccaacgaattttggacggcgtacaaccttggctgggaggaactaatgagtcagccagattataaatatttatttgatacgcaatag

SEQ ID NO: 78657 - DNA, 1194 bp, Saccharomyces pastorianus
atgagtataaaggcagaaagaagagaaacagaagcacgggggtttcgtttggtcttcaaatatatgttaggtcggtaccttttcattgcaaaattgaaaagatttgagcgtgtaaaagtaaaaaaatacatgatgggatcccaagatttagctagtttaattgggaggtttaaatacgtcagggtgttagattcgaaccctcatacaaaggtaatctcactactaggcagcatagatgggaaggatgccgtgttaactgctgaaaagacgcatttcatatttgatgaaacggtacgtagaccctctcaaagtggccgtagcactccgattttctttcatcgtgaaatagacgagtactcctttttaaacggtattactgatctgaaggaattaacttcgaatgacatctactactgggggttgtctgttttgaagcagcatattttgcataacccaactgcgaaggttaacttaatttggcccgcctcgcagttccacatcaagggatacgaccagcaggatttacatgtcgtcagagaaactcctgatatgtatagaaacatagttgtgccctttatccaagagatgtgtaccagcgaaagaatgaaatgggtaaacaacattctttacgagggcgccgaggatgatagagttgtttataaggaatacagtagcaggaataaagaggatggattcgtcatcttgcccgatatgaagtgggacggaatcaacattgattcgttatacctggtcgcgatcgtgtacagggacgacatcaaatctttgagagatttgaacccaaaccatagagattggttaattagactcaataagaagattaagaccatcatcccccagcactatgactataatgtaaacccggacgagctaagagttttcattcattatcaaccttcatattaccattttcatgtccatatagtgaatataaggcatccaggagtaggcgaggagagaggctccggaatgacagtactgttggaagatgttatagaagcgttgggtttcttaggtcctgaaggttatatgaagaagacgcttacttatgtcattggtgaaaatcatgatttatggaaaaagggctttaaggaagaagttgaaaagcaactgaagcatgatggtatcgcaaccagtcctgaaaaaggctctgggttcaataccaatttgggttga

SEQ ID NO: 78658 - DNA, 855 bp, Saccharomyces pastorianus
atgtctgtccaagatactaaagcggtagagttttctatgggtcacatcagatcatcctctgtatccctggtagcagaggctacttcaaacacgaatagtgaagacaaattatctaaggtccaactctacgaagatttgtgccggtacgaggatacattgagtaagttggtggaatctgtagatcgtttcaaaccaaaccttgatattgccaaggatttgatcagaactgatgaggccttgtttgaaaacgtcaaactgttagctgaatatgacaatatctaccgcaacttacagaagattgacaaagactctgaagaactagattctaaaaccaggaagatattggaaattctaaatgaatgtcatgacgagttaaaagcactaccgatgcttgaacaagtagagttcgagaaaaacacaattttacagcaaagatcgaaaatcaattcgacagagttgttggattatgccaccaaactctccaagtttaccaaaataccaccaacgttcgacaagggagctgtgggacccaacaattttatatggcccgcagaggatgccctacgaagaggaatgcttgctatggcctcattacatagtaaagagctaactagaatacccggtgaagaagtagaagaaacagaagtaccgaccgtaccgccatctcaaagtgaagaacaaaaagggcagatggccaagaaagaaggtacaccaaagacagactcgtttatatttgatggtactgctaaagaagttggtgatgaggcagacaataccaaagataaagaaaaggaagaaaataatgatgatgccctagatcttgatcttgatctgtttgatccggacgacttctag

SEQ ID NO: 78659 - DNA, 1860 bp, Saccharomyces pastorianus
atgtacaatcctgtggacgctgttttaacaaagataattaccaactatgggattgatagttttacactgcgatatgctatctgcttattgggatcgttcccactgaatgctattttgaagagaattcccgagaagcgtataggtttaaaatgttgttttatcatttctatgtcgatgttttacttattcggtgtgctgaatctagtaagtggattcaggaccctgtttattagtaccatgtttacttacttgatctcaagattttaccgttccaagtttatgccacacttgaatttcatgtttgttatgggtcatttggcaataaatcatatacacgcccaattccttaacgaacagactcaaactaccgttgacattacaagttcacaaatggttttagccatgaaactaacttcttttgcatggtcgtactatgatggttcatgcactagcgaaagcgatttcaaagatttgactgagcatcaaaaatctcgtgctgtcagaggtcatccacccttattaaagttcctggcatatgcatttttctattcaacgttgctaactggcccaagtttcgattatgccgattttgacagctggttgaattgtgagatgttgcgtgacttgcctgaaagcaaaaagcctatgagaagacaccaccctggtgaaagaagacagattccaaagaatggtaaacttgcattatggaaagttgttcaaggtcttgcttggatgattttaagtacactaggaatgaagcacttccccgtaaaatacgttttggacaaagatggcttcccaacgagatcttttatattcagaatccattacttattcttgcttggtttcatccatagattcaagtactatgctgcctggactatttcggaaggatcttgtattttgtgcggtttgggttataatggttatgattcaaagacacaaaagatcagatgggatcgtgtcagaaatattgacatttggaccgtagaaacggcgcagaatacgcgtgaaatgttggaagcatggaatatgaatactaacaagtggctaaaatactctgtttatttacgtgtcacaaagaagggcaaaaaacctggtttccgctcaactttgtttactttcctaacttccgcattttggcatggtaccagacctgggtactatctgacttttgcgacaggggctttgtaccaaacatgtggtaaaatctacagacgcaattttagaccaattttcttgcgagaagatggtgtcactcctttgccttctaaaaaaatctacgatttagttggcatatatgcaattaaactagcatttggttacatggtgcaaccatttattatccttgatttgaagccatctttaatggtatggggctctgtttatttctatgttcatattattgttgctttctcatttttcctattcagaggaccatatgctaaacaagttactgaattttttaaatccaaacaacctaaagaaatattcattagaaaacaaaagaagttggaaaaagatatttctgcaagctctccaaacttgggtggtatattgaaggcaaagattgaacatgaaaagggaaagacagcagaagaagaagaaatgaacttaggtattccaccaattgagttagaaaagtgggacaatgctaaggaagattgggaagatttctgcaaagattacaaagaatggagaaataaaaatggtcttgaaatagaagaggaaaacctttctaaagcttttgaaagattcaagcaggaattttctaacgctgcaagtggatcaggtgaacgtgtgagaaaaatgagttttagtggttactcaccaaagcctatttcaaaaaaggaagagtag

SEQ ID NO: 78660 - DNA, 567 bp, Saccharomyces pastorianus
atggatttacccaaggacaaaagtgacagaactcatcaaagaattaatctaaataacagtgggacagatcgaactaatgatttgtaccttcatattgtccaaacgttcggttgcatagaaacaactgcaacggaaaatgccacgaaactgttaatgctgggtgacgtcgaagtagaaatatctgcgagcagcgtttcaattgagtggacacagaattcaatgataagccaaacaattgccgatagtatagtaataatgatcatcggtttgtgtgcaagcgacaagaacgtgctatctgaatcagaattgaaagagagaaaccataacgttttgaagatccaagaattgcaaaatctgtttcgagaacaatttggagacagttttagcatcgatgaaggaataggaagaaaagaaaatgtaaagaatggtagcgtcaccataggcaagagtaaagccacgatcgatttctccaccatgaagctgattgattgtaattcgaacccactaaagggaagagtggagagcatactaagcattggccagaaattaacaactccattgtgctga

SEQ ID NO: 78661 - DNA, 1902 bp, Saccharomyces pastorianus
atgggactcctaaactcttcagataaggaaattatcaaaagggctctaccaaaagcgtcgaataagattattgatgttacggtggctcgactatacattgcataccctgataaaaatgaatggcagtacactggactttcaggagctcttgctctggtagacgatcttgtggggaatactttttttttaaaattagttgacatcaatggccatagaggagttatctgggaccaagaattgtatgtgaattttgaatactatcaagaccgtactttttttcatacatttgagatggaagaatgctttgcaggtttattgtttgtagatattaatgaagcatcgcactttttaaagagagttcaaaagcgtgaaagatatgccaacaggaaaactttgttgaacaaaaatgctgtagcattaaccaagaaagtaagagaagaacaaaaatctcaggtggtgcatggcccgagaggggagtcattaattgataatcaaaggaaaagatataactatgaagatgtggacacaattccaactacaaagcataaggctcctccccctcctccgccaacggccgaaacatttgattcagatcaaacaagttcattttccgatatcaattcgacaacagcatccgcaccgactaccccagcccctgctcttcctcctgcatctcctgaagtaagaaaagaagaaacgcatccaaagcatagtttaccgcctttaccaaatcagtttgcgccattaccagaccctccacaacataactctccacctcaaaataacgcgccttcgcaatcccaaagcaatccatttccattcccaattcctgaaattccctcgacacagtctgcaacaaacccatttccatttccggtacctcagcagcagtttaatcaagctccttcaatgggcataccacagcagaataggccccttccacagttgcctaacagaaataatcggcctgtgccacctcctccgccaatgcgtaccactactgaaggttcaggtgttcgcctacctgctcctccacctccgccaaggcgtgggccagcaccaccacctcctccacataggcacgtaaccagtaataccctgaattctgccggtggaaatagcctccttccacaggccactggaagaagagggccagcaccaccacctcctccaagagcatctcgccccacaccaaacgttacgatgcaacaaaatccacaacagtacaataattctaaccgcccctttggatatcagacaaatagcaacatgtcatctccaccccctcctccagtgacaactttcaataccctgacaccacaaatgactgcagcaactggacaacctgcagttccccttcctcagaatactcaagcaccttcgcaagccacaaatgtgccagtggcaccaccacctccttcggcatttttaggccagtcgcagatacctcagtcagcaccctcagcacctattccgccaacgttaccatcgacgacgagtgctgcaccacctccgccaccagcattcctaactcaacaacctcaatctggaggagctccacctccacccccacctcctcaaatgccagctacatcaacatccggaggcggttcattcgctgaaactactggagatgcaggtcgtgatgcacttttagcttcaattagaggggcaggtggcataggcgctttgagaaaagttgacaaatcgcagctagataagccctcagttttactgcaggaagcacgtggagaatctgcttcaccaccagcagcggctggaaatggaggcacacctggtggacctccggcttctttagcagatgcgttggcagcagctttaaacaaaagaaaaactaaagtgggagctcatgacgatatggacaatggtgatgattggtaa

SEQ ID NO: 78662 - DNA, 387 bp, Saccharomyces pastorianus
atgagattacttcaccatggtgaatacgggacaaaactaattggaggaaaatgcagcatagatgagaaactcggtcacccttgccctaagcagaagacgcaaaaaacatctgcgcaaaaagaaatgggtccacaatatgtacggatgtatggtcccaaaagaaaagcaataataaggacaggaaacccggatgacggcattaatttacctgacgccggccgaggcatcttaactgcagccacaatttggtcacgagcttaccattcaaattattcttaccttgtacgcccaaaagtagtgactctttctaagcatcgcgaattaatgactacttttcttttatacgttttatatgtatgtatatatataagtgccttcataaaatag

SEQ ID NO: 78663 - DNA, 1188 bp, Saccharomyces pastorianus
atgtctttggaaagagaggaaccacaacacttcggagcagggccagctcaaatgcctacaccagttttgcaacaagctgctaaagacttaatcaatttcaatgacataggtttgggtatcggtgaaatttctcaccgttcgaaggatgccaccaaagtgattgaagactctaagaagcacttaatcgaactgctaaatattcctgacactcatgaagtgttctacttgcaaggtggtggcactactggtttttcttccgttgctactaatttggcagctgcatatgtgggtaagcatgggaagattgcacctgccggttatttagtcaccggtagttggtctcagaaatcttttgaagaggcaaagagattgcacgttcctgctgaagttatcttcaacgctaaagattataacaatggcaaatttggtaaaattccagatgaatccctttgggaagataaaatcaaaggtaaggctttctcatacgtgtacctatgtgagaatgaaactgttcatggtgttgaatggccagaattaccaaaatgtttagtaaacgaccccaacatcgaaattgttgctgacttatccagcgacattttgtctcgtaagattgacgtttctcaatatggtgtcatcatggcaggcgcccaaaaaaacattggtttagcaggcttaaccctatacattatcaagaaatccatccttaagaatatttctggcgcttctgatgaaacattacatgaattgggagtaccaatcacccctattgcattcgactatccaacggtggtgaagaacaactcagcctataatacaattccaattttcactttacatgttatggatctcgtgttccaacatattttgaagaagggtggtgttgaagcgcaacaggctgaaaatgaagaaaaggccaagatattatatgaggcattggatgcaaattcagatttttacaacgttccagtggatccaaagtgtagatcaaaaatgaatgtcgttttcacccttaaaaaggacggccttgatgaccagtttctaaaagaggcagctgctcgtcatttaaccggtttgaaaggacatcgttcagttggtgggttcagagcctccatctataacgcgctttcagtgaaaactgtacaaaacttggtagattttatcaaggaatttgctgagaaaaacgcttaa

SEQ ID NO: 78664 - DNA, 663 bp, Saccharomyces pastorianus
atgtcagcacctgctcaaaacaatgccgaggttcccactttcaagttagttcttgttggtgatggaggtactggtaagactacctttgtgaagagacatctgaccggtgaatttgaaaaaaaatacattgcaactatcggagtagaagttcatcctctatctttttatactaatttcggtgaaattaagttcgatgtctgggataccgcaggccaagaaaaatttggcgggttaagggatggttattacatcaatgctcaatgtgcaattattatgttcgatgtcacatccagaatcacttacaagaacgtccctaattggcatagagacttagtccgtgtgtgtgaaaatattcccatagtgctatgtggcaataaagtcgatgtcaaagagagaaaggttaaggccaagactatcactttccatagaaaaaagaacttacaatattatgacatttctgcaaaatccaattataattttgaaaagcctttcttgtggttggctagaaaacttgccggtaacccacaattggagtttgttgcgtctcctgcattggccccacctgaggtgcaagttgacgagcaactaatgcaccaataccagcaagaaatggaccaagccactgctttaccattacctgatgaagacgatgctgatttataa

SEQ ID NO: 78665 - DNA, 435 bp, Saccharomyces pastorianus
atgactttggcttttacgaccttcgctatttccaagataaacaattcatccacgaatgaagattctaaagtcatgataatgtgcgatgagcatcaccctttcgagaagggttactttaagtccgccatacgagccttcggcaacagcattaaggtaggattaatgggtaactcgcgaccagaaggcgcagcatccatattccaagataaaaatattcctcacgatctgacgacggaagaactcaggttgcagctggtctgtatggctttttcctggttcatatttggtctcttcatcgcttgcttactactttgtatcacgcttgtgctaacatcgcgatatcctggagaaaatgaaaacaaagccacggaagttgtgccatccagtaatattgacgacgaagaaaagcaattatcgctttccgacatgatttag

SEQ ID NO: 78666 - DNA, 210 bp, Saccharomyces pastorianus
atgtcggaaagcgataattgcttttcttcgtcgtcaatattactggatggcacaacttccgtggctttgttttcattttctccaggatatcgcgatgttagcacaagcgtgatacaaagtagtaagcaagcgatgaagagaccaaatatgaaccaggaaaaagccatacagaccagctgcaacctgagttcttccgtcgtcagatcgtga

SEQ ID NO: 78667 - DNA, 1314 bp, Saccharomyces pastorianus
atgtcagctttattaccaagattactcacaagaacagcttttaaagctcctgggaaacttctgaggctctcttcagtaatttctaggaccttttctcaaactactacttcctatgcagctgcttttgatcgttccaaaccgcatgtaaatataggtacgatcggccatgttgatcatgggaagacaactttaaccgcagccattacgaaaacgttagccgcaaaaggtggtgccaacttcttggactatgctgccatcgataaggctccggaagaaagagctcgtggtattacaatttctactgcgcacgtggaatacgaaacggccaagagacattattctcacgtcgactgtccaggccacgctgattacatcaagaatatgattaccggtgctgctcaaatggatggtgctatcattgttgtagctgctaccgatggacaaatgccccaaactagagaacatttacttttggccagacaagttggtgtccaacatattgtcgtttttgttaacaaggttgataccattgatgatccagaaatgttagagttagtcgaaatggaaatgagagaacttttaaacgaatatgggtttgacggtgataatgctccaattatcatgggttctgccctttgcgctttggaaggtcgccaacctgaaattggggagcaggccatcatgaaacttttggatgcagtggatgagtatattcctacacctgaaagagatttgaacaagcctttcttgatgcccgttgaagatatcttctctatctccggtagaggtactgtggtcactggtcgtgtggaaaggggtaatttaaagaaaggtgaggaattggaaattgttggtcacaactctaccccattgaaaacaacagttactggtattgaaatgtttagaaaggaattggactctgctatggcaggtgacaatgccggtgttttacttagaggtatcaggagagatcaattgaagagaggtatggtcttagctaagccaggtaccgttaaagcccatacaaagattctagcctctttgtacattttatccaaagaggaaggtggtagacattctgggtttggtgaaaactacagaccacaaatgtttataagaacagctgatgttacagttgtgatgagatttcctaaggaggttgaagatcattctatgcaagttatgccaggtgacaatgttgaaatggaatgtgatttgatccatcctaccccattagaagttggtcaacgtttcaatatcagagagggtggaagaactgttggtaccggtctaatcacacgtattattgaatag

SEQ ID NO: 78668 - DNA, 3414 bp, Saccharomyces pastorianus
atgaacgatatggcaaaacctctcccaactccaccgactgctgagatcaggaaaagtcgatccaattcaccaaaaaaagctcagaaaacaaatctaagtccaaacaaaaatcagaataatgagaaaaatgtacctagatcaaacggaagaaccaaaaacgaacacaatagtatggatgacgaagagtttgaattcttccatcaatttagtcgggagaaagttaaaggcgtcatacacgtaatcaccgctgaacttaaggaaaaaggtccagatgttgaatttttaatgataccgttcaggccggaacagacgaacgacaaattgctgacattactaaatcagctattcccactaggaaacggtcaaccagtcaacgaaaaaaaacagctcagaattgtttccaaggccgatgtctggactttatttcaatgcttaaaatacatttggtgcagacttccaaattcagaaattataggctggaaatcttatttggagtttaaattcagggaagaagataaaaaatttcctcgaaaatcatttttggaaattatgcctcaatgtctagcttccccaaatcatgcatcaatcgtttacgatttttttgacttgattatttcaatttcatcaaattcaagagttaataaaatgagcgctagaaaaatatcgaagatgtgtgcaatctgggcgtttagtaaacagataccaaattctgatatccaagattacgattttgaatcagccgccatgaagtcttttgcccccaacaattccatacaagatgggctagatcagtggattccggcttcagatgccatgtttcacctactcttagcatttctaagaagttttgcccctcaagatcttgaatcggcaaagctgccgcgcacacttaagagtttactattcaataatcagtatcctccaagaaaatcaacagcgtacacatcagagacaatcctaaccattcctctggtaactttaaaaacagacgtcttttcgagaaaaccttggcaattattggagcgttgcaatgatcttcttgatttcagtgatcatgatgcattcgaagcaagagaggactacgctttattaaagtctttattcagaaagaaaaatacagtggagggaattagcaggaaaatgtcccaggagtcaagaaggttgatgaaagcaatgtctaccaaacattcaacatttcaaccaggttgggctcccagaaaatgtattgaaaatatttctcatttaaaagaatgtattgaggttaaaagactagatatcgatgattattttatttggacttggttatcgtccctttctttcgaacaaacatccgaaaagaaaaaaatttttggaagatctattatattggaatttgaatttgatggatttaaaaaatgggtggttttccaagaatgtgatataacgttagattataataaaaagggtcaattgaagaaaaagacttctgcacagtcaccaacgaccgaaaaggaactacctcctgatgactttgaattagaagatccacctctctccaaatctcctacactatctcagacctacaaaaaattccaagctgaggtacctcagcaaagtactgttcgaagggattcagcacccgataaccaaggaatctatcacacagtcattagtaaaaatgcattgactaaaaataagcataatgtgaatttgcattcttttgaacataaaatctccaaatggaatcctctaaacaacctgcgaaagaaaagcggtagtaactctagtagttcatcatttgaggaaaaaagtaaagacgctcccatccacgaagaataccataccaacaaaaatcacaaatcgaaaaaagaagagcgagtactatctcagtttagcacacttaatcctgatgaatatcagttaccagtaatagagaccggttcatcaaactttaagattgaaataccggaattaatgtacgaacacgatgatgacgacagtgacaaacttaaaaattcccagaaaagagctaccgactcagctattgaagaattaaacggtatggttgaagaaatgatgattaatgagccagacgatgtaaaaatctccataactgaggcagagactttcgaatcattgacaaagtttgatcaatataagccatccaatataactgacgatgacttacaaagcagccattcaagcgccgttcactcattgaagctaagtacaaatacaaatgattcttgcgctgatagttccaaatacaccgctgataggaaattagcggaacctagaaagatttctgaggaatccaaagtcaacgacgattcatcatcatattattctccaaatatcaacaacttgccggcatcaagaatgcctagtcaacccacttattcaaattcggattcgaaaaaggcatttacgaatgagtctcgcctgaacgtcttacaagatgcagtcagtccatctcaacaggtaacaccaaaaccatataaaaatgcgcctggagactgtgtatctcctgttcagcaaaaatactatcagaacgatcgtagaaatgaaatgtcgcctgcaagtgcaccagttccaccttctgcatattcacctgcgaggtctccacaattctccaccaattcggctggattcaagcagaacacgattaatgtacccgttgggtataaagatcctgctcacgttttagcaaatcaaccacatatgacatatcgggaccagcataattatccatctcaccaacaaaaacaacgtcccttccaaaacaatattgtgcccccagaactaaagtccagaaatcaacgggcagatgcttcacctattccccaacatatggtgccagtaaaacaaggtgtgcccaatcttccatctaacgttccattatatcaacaaatggaacgaatgaaccctaaccaccagcaccctgtaaatacttacaaggtaactcagccgccgcatcataataacacaacaaatgcttatgggaacagccgggcaggcaatgctcatatgttagatggaaagtggagcaataatccgccgcaaatggtaccaaagggagttcgccccaatcaatatccacagcagcacgttaataggtattcaccgcaagctcaacctgtcgtacctgcggaatactacaatggacctccacctatgcgagcacctccaatgatgtcccatatggtaccagctcaggagccgatacgttacacagccggtgctaacaggcgtagttttccccaaggcatgcagcagaatgcctattccgtacccgctcagcctatgggggctgtaaatagtgaattttacctaccagaagctcctcagggaaacaaactgcatggaaatattaacaaaagacaggagagaaagaagctatatgataacattagaagcggaaatttcggcatatag

SEQ ID NO: 78669 - DNA, 351 bp, Saccharomyces pastorianus
atgtcccaagaaagtagcgttttatcagaatcgcaagaacaactagccaataaccctaaaatagaggatacaagccctccctctgccaattcgagagataatagcaaacctgtacttccgtgggattacaagaataaagccatagagatcaagagcttcagtggttataaggtaaatttcaccggctggataagaagagacgtaagagaagaacgtcaaaggggaagcgagtttactgcatctgacgttaaaggatcagatgacaaagctacaaggaaaaaagaaccagcagatgaggatcctgaagtaaaacaacttgaaaaagaaggagaggatggactggactcataa

SEQ ID NO: 78670 - DNA, 1338 bp, Saccharomyces pastorianus
atggtttcgttcagagggctgactacactaacactactttttaccaaattagtaaactgtaatcctgtttccacaaaaaatagggactctatacagtttatttataaagaaaaggatagtatatactctgccatcaacaatcaagccatcaatgaaaaaattcatggagtcaatttgggtgggtggctagtattggagccgtatattacaccttctttattcgagactttccgtactaatccgtacaacgatgaccgtattcctgttgatgaataccatttttgtcaaaaattaggctatgaaaaggcaaaggaacgcctttatagtcattggtcgacgttctataaagaggaagacttcgcgaaaattgcttctcaaggcttcaatttggttagaattcctattgggtattgggcctttacaacgttgagtcatgatccctatgttaccgccgagcaggaatattttctagaccgggctatcgattgggctaggaaatatggtttgaaagtatggattgatcttcatggagccgctggttcacaaaacggatttgataactcagggttgagggattcatataagtttctggaagatgaaaatttaagcgccaccatgaaagctttaacgtatattttaagcaaatactcaacagacgtatacctggacaccgttattggaatcgaattgctcaatgaaccgttaggtccagttattgacatggaaagattgaaaaatttgcttttgaagccggcttatgactatttgagaaataaaattaatagcaaccagatcattgtaatacatgatgcttttcaaccttaccattattgggatgggtttttgaatgatgaaaagaacgaatatggcgtcataattgaccatcatcattatcaggtgttctcgcaggtggaattaacaagaaaaatgaatgaacgtatcaaaatcgcctgccaatgggggaaagatgccgtaagcgagaagcattggtccgtagcaggcgaattttcagcggccttaacagattgtacaaagtggttaaatggggttggtctaggtgccagatatgatggaagttggaccaaagacaatgaaaaatctcattacataaatacgtgtgcaaacaacgagaatattgccttgtggcccgaagagagaaaacagaacactagaaagtttatcgaggctcaattagatgcttttgaaatgactggtggatggataatgtggtgttacaagacagagaatagtatcgaatgggatgttgaaaaattgattcaacacaacatttttccgcaacctatcaacgataggaaatatcctaaccaatgtcattga

SEQ ID NO: 78671 - DNA, 4860 bp, Saccharomyces pastorianus
atggcagcagtacccaccatcgaccttacactagccgattcagataatgaagacatattccattctttttcgtcttcaacaagtgtggataagatagacattaggaaagaaaatgggaaattaagaatggcaggcttggaagtcgcccaatctaatgacgatgcagcacgtcaagcattccatgttttcaagacgaacatatcaaataatgaaaccttcgatactattctttcaaagagcaagacaatcacagacagtaccttcaacaatgaaaaatcttccaacgaagtaaaacagcagcaagtcttgaaggaagaaacgatgggatcttccaacgatgagaagaaaacacaagagagcagcccaagcgcagagatgataaaacttttttatgaaaacgatgatgtgccgttatccgatagttttaaacaaaaagaggaaggtaaaagaataaatcaggatgagcaagtgaaggaaaatatctgtggcatttcttcctcatacgtctccaaagactacgatggcgttgaagatgatttcgagcctaatacctgccaggacagcaatttggattttcaagaggagaagttaaacttgaataacaaaccgtcacagcaacagttcagcgacccagaaacaaaagataacagtttgaagagcgaaaacaaagaccaaataaaaggagtcacaacaacaagttatcgtgatttacctattgaatctagtgctttccaggattctgaaactcaaaataactccaaaaacactatacctaacatcgtaaatgaaaagcgaacgccagcattaccgtccaatctaagctctgttgagagttcccttaaaaacgagacggccaaagtagaggggaagacgaccgttcgtcttccaggacttcaaaataatgttgccttacttgagcaagaacaaagtgaactattcaagcactttagtgaacaacctgtcgatattagcgattttggtcgtaagattaaaaggaagcatagcggagattttgcagataacaagatacttaaaagaccgatattgcccttaaaaaatatggaccatacaacacataattcacatgattccgaacagaaaaatagctcgattattattctttcagatgaggacgaatctggtgccggtatcaatgatatagaaagtcctttgaaagtttctgaaccaaatacagctgatgcgcttaggagcagtgtaccagaagtcatatctttacttgacctacccaatattgacttgaataactcagtaataaaagaagcaagtggcagcaattcaattcctacatcagaaacagacgcacaatcctcgagttcgtcagttcttcaaggaactatcatgacagaacaagctactcaatcctctcaacacgaatgtaacagttcacttgatactctaaaaaaaaatcatcaaaaattattgaaggatttgaattctagagagtctgaactacgtaatgctctcagttgctgcaagacaaactctgaaattttaagaaggaaactaagtagaagagaaaaggaggtctctgatgctgaaaaacattggcagttattgttgacatcgatggctagagggggaagaactatcagctcaactcagcagatattagttgatgaagctgagaaccaattaaacaaactgaaggaaaaaagacagttgacaaaatcgaagctagattcaatcaatttgaaaatgtataattataacgaacaatggaagtcctttgtgcatttgaaaaatataaacctgcagaaatctttggctgcccttgagcggtcagccagggatagtaaagcttctgcgaccgtaaataaaagaaacgaatgcctggctgagaaagaaaagctagaccaaatgttaaaagaaggaaccctaagcttcagtacctacaaacaattaacaggggagatccagcagaaactgaatgagttgaaactgggagaccaacgcacaactgatatcaatagtgtatcgccaatagtacggcaacctctcgccaaaagagatttatttattaagtccattgatactgcaaaagatttattagccaagaacacatccaggacagaaatgacgaagagaattctttataaacatttggacaacttggtctcttataagaacttttttgaagacggaagatccttaatagatataaacagaagacacgttgcacatgaatcggcccaaatattgttcaccaacggtgtaaagatgcccattgtttttgaaacattacaagattacggcatcaagttttctaatccagccattgtcgatcctgacagaagagcccaatattttaaaagcatcgaagttgcacgcgatctcatatcaaagtctactagatcagaggatgctaaacgaaagattactcgatttttgaatataattgaagaatttcgtaaagatattgacaccggatttccacctactcctttaaaaagggaaggcgtcggaaaagctgttgttgggctaagacaacaaagacttaagatggacagactatatgaaaatttgagaagatataagattccaataacaagtgaagaattactgcagcaaagctatttatttccggtaaacgcagatcaacgacctccttcaaactggaacaccgtggaaaataccgaagatactagttctacagctaatgatctatcgatgcaagatgaatttcacatctctaatatgcatgcagcagaagatcaagaacagattagggctcttttggagaatgtcaaacaatctgaatccattatagacggcgaagcacttactcccgaggatatgaccgtaaacttattaaaacaccagaggctgggtctgcattggttgttacaagttgaaaactccgcaaaaaaagggggtctgcttgctgacgatatgggcctgggtaaaacaattcaagctattgcattgatgttagcaaatcgctcagaggaatccaaatgtaaaaccaatttgatcgtcgcaccagtctcagtcttgagagtttggaaaggtgaattagaaacgaaagtaaaaaaacgcgcaaaatttactacatttatttttggaggatcaggtaacggaaaagttaagcactggagggatttggcaagatatgatgctgttttggtatcttatcaaactctagcaaacgaatttaagaaacattggccgaaaaaactggatggtgaacaaaatcagctaccagctgtgcctcatatacaagctcttaataggttgaaaacctcaaatgaatactactctccatttttctgcaatgattcaacgttttacagaattttactggacgaaggccaaaacatcaagaacaaaaatacaagggcttctaaagcgtgctgtactataaatggaatgtataggtgggtcttgtctggtacgccgattcaaaatagtatggatgagctttattccttgataagatttctaagaattccaccctaccacaaggagcaacggtttaaattagacattggaaggttttttcagagaaataagcaatatcaatatgataacgaggatagaaaaaacgcattaagaaaggttagagtccttctaaatgccattatgcttcgtcggtctaaggctgataagatcgacggcaaacctttactggagctccctcctaaaattgtggaaatagatgaatcacgcctgaagggagaggaattaaaattttacacagctttggaatcaaaaaatcaagcactcgctaagaaattgttgaacaattctacgaggggcagctactctagcgttctcacattactacttcgcttaaggcaggcttgttgtcattcagaattagttgttatgggagaaaaaaaagcggaaggtacaaaggtagctaacggcaaaagctttgaagatgactggctcaggctctactataaaatcactcacatgagcggagaagcgcaggctcaggttattacttcaatgaattctatgacatgtttctggtgcatggaacaattagaaccagaagcgatgtccgttctgacaggttgtggtcatttgatttgcgacacttgtatcgagcccttcatcgaagagtcatccatgctacctcaggccaagaaaaccaaaggtggggcatttgctattccatgcaaagattgtcaacgtttgacaaacgagaaagatattgtttcgcacaagttatacgaccaggtaataaaccagggatttactgaggaagatttgcatgcagagtatttaagtgaaatggagaaacaaaaaatacagcaaaaaaatgtatatgtgccaaattttgagagtttagaaccatctacgaagatagagcaatgtatacaggttattcaaagagtttttgatgaatcagcaaccgaaaaaattattattttttcccagtttacaacattttttgagattctcgaacattttctcaaaaataaactgaattttccctacttgaaatatattggatcaatgaacgctcagagaagatcagatgttatcaacgaattttatcgtgaccctgagaaaaggatacttctgatttccatgaaagccggtaactcaggactaacattgacatgtgcgaaccatgtagttatagttgatccattttggaatccttacgtcgaagaacaagctcaagaccgttgctatagaattagtcaaacaaaaaaagtccaggtgcataaattgtttataaaggactctgttgaggatcgtatttctgaattacagaagagaaagaaggaaatggtcgattctgccatggacccaggcaagataaaggaagtgaatagtttagggcgtcgggagttaggatttttatttggtttaaacgctctttga

SEQ ID NO: 78672 - DNA, 1131 bp, Saccharomyces pastorianus
atgacatccgatcctgttaatacgaatataagtagccccactttaacggacagaaatgcagacgaatcatgggagctcttgaaaagagagtttaacacattatttagcaacctgaaaactgacagtaaagaagaaggtaatttcacagacaacaaaggagaaaccgccaagaaaccaattgttctgcaggataatgatgattcggattttacgcagaatcagggaaaagttgctactgcaaccagtacaactaatgacagaagctttaagcgaacacttggttctattgaaatgaaaaaacgttatgttaagaaaaattgccaagcaaaatttgtttttaacacgcttgaaggtaaagaagtttgttcgaaaatactacaacataccctaggcctattaagtttattgctattgacgagaaagatacgactactaaatttttcctcaaaactgcgattggtgattcaacaattgagtttatttcggtactatttgagattcggaaactttgcgatcaatttatataaaattatcaaaagatttcgctggttgagagaaatgaaaaaactacattataaagatcaatcaattttattttattttaaaaatttccggtttttcgacattattgaagctttttataatttgacagatgagttgatactgttccataagctacaatcaatgtttggtaaaaagaacacatcacatgcaaatattaatagactaatgacattcgtcaaagaacagcactatatcttatgggaagttttaaatattcttgctatcaataaaaacattgaacagtggcgacagctaataagagatgaaatttatttaagtatctataataccagtggtaatgcaataaaggaacacgagttaaagtacaaactacctaccaatgacaaagtcaatttggagttacggaaaaataatattacattggatttttataagataatactaaacttattgtctaatctaattaatattaaaggtaaaagggacaaatataactcagagctagcttacgaaataatttcagtaggttccggtgttactgaactccttaagctatggaaccaagccaaagtcacttcggctaatgaacatacaagcgctgtttga

SEQ ID NO: 78673 - DNA, 861 bp, Saccharomyces pastorianus
atgtcgaatgcagaggccagcagagtgtacgagattatcgtagagtctgtggtaaatgaagtgagagaggactttgaaaatgcgggtatcgatgaacaaactttacaagacctaaaaaatatttggcaaaaaaagctcacagagacgaaggtaactactttttcatgggacaatcagttcaatgaaggaaatatcaatggtgtacagaacgacttaaatttcaatcttgctacccccagcgtaaattctagcgagttcaatattaaggaggagaataccggtaatgaaggtctaattttgccaaatatcaattccaacaacaacataccccactctggagagaccaatattaatacgaatacggtagaagcaactaataattcaggtgctaccttgaacacaaatactagtggtaatacaaatgcggacgtaactagccagcctaaaattgaagtaaaaccggaaatagaacttactattaataatgccaatataactaccgtcgaaaacatagatgatgaaagtgagaagaaagacgacgaggaaaaggaggaggacgtggaaaaaacccgcaaggaaaaggagcagatagaacaagtaaaattacaagcgaagaaggaaaaaagaagtgcattattagatacggatgaggtcggttcagaactagatgattccgacgatgactatctaatttcggagggtgaagaggatgggccagatgagaacttaatgctgtgcttatatgataaagtcacaagaacaaaggcgagatggaaatgtagtctgaaagatggtgtggttaccatcaatagaaatgactacacattccaaaaagctcaagtggaagcggagtgggtataa

SEQ ID NO: 78674 - DNA, 2466 bp, Saccharomyces pastorianus
atgaacgaagttcctaccactccagttaggcttattttagggcaagctcagcaacgcgagcagaattcagaaaactgttcgcaagaacgtaacccacgcacgtttaattccgaaccagattccagctttaactctcctggttcctcccagttcgtgatacatcctcatgaaccactcgagaaggagaaggatgagaagcaggatttagaccgctcgattgattacggtaggtcatcagctcttaacaataagaataatgccaatccattagagaatatagacataaataaaatgtttgatgacaaaaaatcagattcaggtaccaatgatgataaaggaggcgcaagtactagtgataagcatgtccttgcattgaattattcaccgatcagagttgatatgaactcctcagagaaacgaagcgacaaaaacgtggacgtagatgaaaatgataaagaaagtagccatattaataaaaagttgaaattgcagttagaatcagtacctaatttgaaacaaagctctaccaaagatatcattaatgacaaagaagaaattatgtcgtctccaatggcgattgatatgattgagaccaacataagcccaaataaattcataataaacgacggagttgaaagaaacgatagtttcaacatcaataccgacacacttaaattagaaaatgatataaatgagaaacaacaagaggaagacttcataaaatctaacagtaacaatgtggttaacattgacaatgcttataaggaaaaggaggacgaagaaaatgatataacaaattctcatataaacaggcttactcctttgtatgagacttctgcaagggagtcgaactcaaatgaagaggggaggaatgactacgatgatgacaaccaacttgatattagacatgacaattttcagattgtagcaaaaagaaacgaggagctcactgatcagatatatcacttaaatcaaatgttaaactctttgatttctaaaaatgaatcattgtcttttcaatacgagaaattgaacaaaaatcaccaactactaatagattcgacaaatgaaaagttagataaactaaatacagaaagagagagcgatattgccaaggtggaaaaattcaaaaagaggattaaggagttgaatacagaaattaaggtattgaattccaaccaaaaaatattacaagaaaaattcgatgcctcaattactgaagtaaatcatataaggggcgaacatgaaaatactgtcaacactttgcagcaaaatgagaaaattttaaatgataaaaatgtagaactggaaaatatgaaagcagaattgaaaggcaataatgataaattatccgaatatgagaccacgttaaatgacctgaattctcgcattgtgcaactgaatgataagattgaaagcacagatattgttttgaaatctaaagagaacgaattagataatttaaaattgagtttgaaggaaactttatcgatttctaaggacttcaacgactctgaccttatagcacaaattaatgagctaatatctacaaaaaacaacttgcaacaaaaaatggatgatttgaataacctgaacgacgataatttgaaggtagtacaggataaattaattaaaaatgaggagacgctaaaactaaaagaagctgaaattgattcattgaatagtgaaatggacgagctgaaaaaacagatcactacaaaagatgatgaatttaagatgtggcaaagcaaatacgaaactgtcgaagacgaagctaagatacgcaatgccgaagttacagagttgaacggagatattgaagatctaaaggaatcaaaattgcatttggaagaaacaattacggaactagaaaacaaagttcataaactagaaaatgagtgtgaactggagaaacaaaaattcgaaaaaacttcgctagaattagaaagcttacaactaaaaaatagtaacattcaggctgaacacatcaaagaattggaaaatcttcatgaaaaccttatttctcttcaaaatgaattgaagatttcatccgacaggataacaacattaacaaaagaaaatgaagtattaatggaacaaaataataataacaataatagcgttactttaagcaatgatcaaaaggatagagatgatgaaaaaattaaatcattaggaaaacaagtacaagattggaaagaaaagtatgaggccaaagaaaaagatacaaataaaaggctaaagttattagcagaagatttgtatatccagtattcatccaaacacgaacaaaaggtcaaactgttgaaaaaaggctatgaaaacaaataccaaaataagtttgatcaattaaatttagaaaataaaactctgtcagaagaaatcgagcaattgaacaagcagctgtcttcagaaagagaagaaaagcaggagttactcaagttgttagaaaatgaaaaaaaataa

SEQ ID NO: 78675 - DNA, 1245 bp, Saccharomyces pastorianus
atgtatagacgatctgttggattactatttgttgggagaaatacaagatggatttcgtccactattaggtgtggaacgagcgcaactcggccaataagatccaatgcattgaatactgattcagataacgctagcgttagggtaccagttggaaattcaactgaggttgaaaatgcaaccagtcagttaacagggacttcggtaaaaagacgcaaggggaacagaaaaagaattacagagttcaaagatgctcttaatttgggtccatcttttgcagattttgtttcaggtaaagcttcgaaaatgatcttggaccctctggagaaggcaaggcaaaatacagaggaagctaaaaaactacctcgttggcttaaggttcctattcctaagggtaccaattaccataaattgaaaggcgacgtaaaagaattaggcctaagtactgtttgtgaggaggcaagatgtcccaatattggtgaatgttggggaggcaaagataaatctaaggcaacggcaacaattatgctgcttggtgatacttgcactcgtggatgtaggttttgttctgtgaagaccaatagaacgcctagtaagccggacccaatggagcccgaaaatactgccgaagctatcaaaagatgggggttgggttatgttgttttaactaccgttgatagggacgatttagtcgatggtggtgctaatcacctggccgagacggttcgcaaaatcaagcagaaggcaccaaatactcttgtagagactctttctggtgatttcagaggtgatttgaagatggtggacattatggcacaatgtgggcttgatgtttacgcacataatttggaaacagttgaatcactaacaccacatgtcagagacagaagagctacttatagacagtctttgagtgttttagaaagggcaaaagctacggttccgtcactgattactaaaacatcaataatgctgggtctaggagaaactgatgagcaaattactcaaactttgaaggatttgcgtaatattcaatgtgatgttgttacatttggtcaatatatgaggccaaccaagagacatatgaaagtcgtagaatatgtgaaacccgaaaagtttgactactggaaagagagagctttagagatgggattcttgtattgtgcatctggacctctagtaagatcttcatataaggctggtgaagcatttattgagaacgttttgaaaaaaagaaacatgaaataa

SEQ ID NO: 78676 - DNA, 1362 bp, Saccharomyces pastorianus
atgaagatgagcctcgaagtttatctaaattaccaccaaagaagaccgactagatttacaatcatgtatccaggtagtggacgttacacctacaacaacgctggtggtaataatggctaccaacggcccatggctcctccacctaaccagcagtatggacagcaatatggtcagcaatatgaacagcagtatggacagcaatatgggcaacaaaatgatcagcaattcagtcagcaatatgctccaccaccaggccctccccctatggcttataacaggcctgtgtatcccccccctcaattccagcaggaacaggcaaaggcacaattaagcaacggctacaacaatcctaatgtaaacgcatccaatatgtacggtccaccccagaatatgtcattacctccacctcaaacacaaactattcaaggtacagaccaaccttatcagtattctcaatgtactgggcgtagaaaggctttgattatcggtataaactacataggttcaaaaaatcaactgcgtggttgtatcaatgatgctcataacatcttcaactttttgactaatgggtacggttacagttcagatgacattgtcatattaactgatgatcagaacgatttggtcagggttcccactagggctaatatgattagggccatgcaatggttggtcaaggatgcgcaacccaatgattctttgttccttcattattctggacatggtggccaaactgaagatttggatggggacgaagaagatgggatggatgatgttatatatccggtcgatttcgaaactcaagggccaattatcgacgatgaaatgcacgatataatggtgaagcccttacaacaaggtgttagactaacagcattgtttgactcttgtcattcgggtacagtgttggatcttccatatacctattctactaagggtattattaaggaacccaatatttggaaggatgttggccaagatggcctgcaagctgctatttcatatgccacaggaaacagggctgctttgattggttctttaggttctatattcaagaccgttaagggaggtatgggcaataatgtggatagagaacgcgtgagacagatcaaattctcagcagcagatgttgttatgttatcaggttcgaaggataaccaaacttctgcagatgctgtcgaagatgggcaaaatacaggtgcaatgtcccacgccttcatcaaggttatgactttacaaccacagcaatcatatatatctcttttacagaacatgaggaaagaattggctggtaagtattctcaaaaaccacaattatcatcgtcacaccctattgacgtaaatctgcaatttattatgtag

SEQ ID NO: 78677 - DNA, 1413 bp, Saccharomyces pastorianus
atgtcctcccaacaacacaagttcaagcgcccagatgtctccgttagagacaagaaattggacactcttaacgttcaattgaaaaaaatcgacactgaaatcggtttaattagaaagcaaatcgatcaacaccaggtcaacgataccacccaacaagaacgtaagaagttacaggataagaacaaggagatcatcaagatccaagctgacttgaaaacccgtagaagcaacattcacgactctattaagcaattggatgctcaaatcaagagaaaaaacaaccaaattgaggagaagttaggcaaaaaggccaagttctcgtccactgcagaagccaagcaaagaatcaatgagattgaagagtctattgcctctggtgacctttctttggttcaagaaaaactactagtcaaagaaatgcaatctttgaacaaattgattaaggacttagttaacatcgagccaatcagaaagtctgttgatgctgacaaggctaaaatcaatcaattgaaggaagaattgaacggattgaatccaaaggatgtctccaaccaattcgaagagaaccagcaaaaattgaacgatatccattcaaaaactcaaggtgtttacgacaaaagacaaactttattcaacaaacgtgctgccttgtacaagaagcgtgacgaattatacagtcaaatcagacagatcagagctgactttgacaacgaattcaaatcattcagagccaaattggacaaagaacgtttgaaacgtgaagaagaacaaagattatccaaacttttggaacagaaagatgttgatatgggtaaattgcaagaaaagttgactcatgccaagattccagccttcacttatgaaatcggtgccattgagaattctttgcttgtcctggacccaacttatgtgaaaccaaagaaaaacatcctgcctgacttgagtagcaatgctttggagaccaagcctgccagaaaagttgttgctgatgatttggttttggtcactccaaagaaggatgattttgtcaatgttgctccatctaaatctaagaaatacaagaagaagaaccaacagaagaacactgaaaatgagcaacctgcttctattttcaacaaagtcgatggcaagtttactttagaaccaacactaattgctactttggccgaattagacgtaactgtcccaatcaacagtgatgatgtcaagatcaccgttgagcaattgaagaagaagcatgaagagcttttgtcgaaacaagaagagcaaacaaaacaaaacattgaatctgtcgaaaaggaaattgagaaattaaatttggactactctaacaaagagcaacaagtaaaaaaggaattggaagaaaaaagattgaaagaacaggaagagtctgaaaaagataaagaaaattaa

SEQ ID NO: 78678 - DNA, 399 bp, Saccharomyces pastorianus
atgtataatatatataggcttattatgtgtgtttgtgctactttatatgacggttatttacaagttagaatattatctattaacaatgcagtagccacgcttacgtttagtgagtcaacaatgggttctggggcccgattgcctttctcaatgccaccaaagggaatttcgacgaagaagtcactcctcatcttcaaattcgttcttacgccctggttttcgttccccaccactagaacaacaggcagctcgttacacaatccgttcaaatcgtgcatgctaatagtttttccaacagtgtatttttctgacgtggcattagctaagtggcttgtaataaacgtccagccacccatttcttgtgatttagtaaaaaactctagcggtttatcaacgtaa

SEQ ID NO: 78679 - DNA, 1239 bp, Saccharomyces pastorianus
atgacttccctgactaatgccgtgttcaaacgatacctggcagtgacgcctagtgctcaccaagctcttaaaacgagaattaagaaaaagtcgtcatctttcgataagtttttcccacagcaaagcaatagtagaaaaaaacaatgggaaacgttgaatgaagacaaagcgtcgtggtttaaaaggaaatacgctcacgtacatgctagggaacaggaccgtgcagcggatccatatggcaagaaaaaggcccacgtcgagaagctaaaggagatcaagaatcaggcgaaattaaaccaaaagagccataaatccaagttccagaataaggacattgcgctgaaacttatgaatgataatcctatcttcgaatatgtctacggcaccaacagcgtttatgcagcgttgctgaacccgagtagaaattgccattctcggttgctgtaccatggcactattcctagtaaaattcttcagacagtcgatgaactgaaggttacgacagagctggtggacaagcacagattaaacttgttgaccaattacggggtgcacaataacattgctcttgagacaaaacctttgcaacctgtggagattgcgtacctaggcgacatggacaccagttcagcagcattaagcattcacgagctgggcttcaataacgaaaatatacctcatgaactgccttatggtacgaaaacagacgctaagaagtttcctctcgggttatatctggatgaaataactgaccctcacaatatcggtgccattattagaagcgcctacttcttgggggttgacttcattgtgatgtcgagaagaaactgctctcctttgacgcctgtggtgtccaagacaagcagtggggccctcgaacttctgcccatattttacgttgataaaccgctagagttttttactaaatcacaagaaatgggtggctggacgtttattacaagccacttagctaatgccacgtcagaaaaatacactgttggaaaaactattagcatgcacgatttgaacggattgtgtaacgagctgcctgttgttctagtggtggggaacgaaaaccagggcgtaagaacgaatttgaagatgaggagtgacttcttcgtcgaaattccctttggtggcattgagaaaggcaatcgggccccagaacccattgttgactcactaaacgtaagcgtggctactgcattgttaatagataatattctaacttgtaaataa

SEQ ID NO: 78680 - DNA, 663 bp, Saccharomyces pastorianus
atgacagagcaaaaagccctagtaaagcgtattacaaatgaaaccaagattcagattgcgatctctttaaagggtggtcccctagcgctagagcactcgatcttcccagaaaaagaggcagaagcagtagcagaacaggccacacaatcgcaagtgattaacgtccacacaggtatagggtttctggaccatatgatacattctctggccaagcattccggctggtcgctaatcgttgagtgcattggtgacttacacatagatgaccatcacaccactgaagactgcgggattgctctcggtcaagcttttaaagaggccctaggggccgtgcgtggagtaaaaaggtttggatcaggatttgcgcctttggatgaggcactttccagagcggtggtagatctttcgaacaggccgtacgcagttgtcgaacttggtttgcaaagggagaaagtaggagatctctcttgcgagatgatcccgcattttcttgaaagctttgcagaggctagcagaattaccctccacgttgattgtctgcgaggcaagaatgatcatcaccgtagtgagagtgcgttcaaggctcttgcggttgccataagagaagctacctcgcccaatggtaccaacgatgttccctccaccaaaggtgttcttatgtag

SEQ ID NO: 78681 - DNA, 354 bp, Saccharomyces pastorianus
atggtaccaacgatgttccctccaccaaaggtgttcttatgtagtgacaccgattatttaaagctgcagcatacgatatatatacatgtgtatatatgtatacctatgaatgtcagtaagtatgtatacgaacagtatgatattgaagatgaccaggtagtgcatcattctatacgtgtcattctgaacgaggcgcgctttccttttttctttttgctttttctttttttttctcttgaactcgagaaaaaaaatataaaagagatggaggaacgggaaaaagttagttgtggtgataggtggcaagtggtattccgtaagaacaacaagaaaagcatttcatattatggctga

SEQ ID NO: 78682 - DNA, 1671 bp, Saccharomyces pastorianus
atgttgaatctgtgtcatgctcttcgaggcgtacgtcagttttcctgttctgtgattgtgaaagtgaaatgtgcgtcatgttccataaaactacaggatcaggatcctagtaaaccaggatattatacgaagccaaaaagtctacccgactcaaaactaaatcctgacctccaagatctgaagtatttgctattcagtcaagacatacagctctcgaaacaggcaattcaaaatgatcctgacctcaaaaccaaaagagatttactattgagagtgatttgcaaaaggtgcagtaatgcccttcatcataacaattataacccggaagagtttcccgaaagtacattaaatgatattctgaactacgtccccagaggctcaaatgttatgcatattgtcccctttgtagaatttcccttacatttagaccccaatgttttgaaacgaaatgatttagatactacattagtgttaacgaaaagcgatcaagtttttaaagataaaaatgctgtcagcaaaaaggttcctatattcatgaagcaatttttaaagaacactttaagaattgactcaaataaaacattcgccatatctgcgctgaaaaactggaacatatccatgttttacaactactttaaaaactacacatatttgctaggcaaccctaatgttggtaaatcaactttgatcaatactctactacagaaatatcttggatataaggttaaaattgattctactgggaaaattaactccccctctgaagaagtgatgcaagaagcttttacgaacccgaagaattttttcaagattcaagctgctggtgtatcacatattcccaatttaactagatccgtacaagcctaccaagttggaggtaaaatactttttgatcttccaggctattcaacttccacctccagattacgcctagaagaaccaatcgacgagcgttggcttcaaaggctgcgaaaaaccgatttattcaatcggaagcatataaaacagaagacttatgagtctatgaagggcacatcacagggaggctgttataccgtgggagggattttctacctggtgcctccgaaaggatccataaatcagattgtgaaatacataccaggaccatcaaaaacattcaagaacattgaaaaaggtattgatgtattcaactcgtgcaattcatcatctggcacacatccgttatcacggtattgtggaattaaaagcgttatatgcgaaaaaagccagtacaaaaggtacgcaatacctccatttattggaagtatagagatcgttctgaaagatataggatatattttattaaggacaactgggaggtatgagttcaaaggactacatgagatatggatacctaggggtatccaagtaggtataagggaaccgctagaaaacttgattgagtctggctaccggcgttacattgaaacaaatggtaaagagtcaagctgtcccagagatagaccgatcatcagttccctgtatgagatggccccggatgaagctgatactttgaacgcagtgaagaagtcgtatttagaaaaaaccgagaaagatttatctgctagaagatttgtcgacgatgatccttatgatttggttcaacacctagaaaaaaaaaagaatccctattggtactaccaatggtaa

SEQ ID NO: 78683 - DNA, 2133 bp, Saccharomyces pastorianus
atgggtaaagtttctaaatcgaccaagaagtttcaatcgaagcatttgaagcatactctagaccaaagaagaaaggaaaagatccaaaagaagagaatccaaggccgtcgtggcaacaaaactgatcaggaaaaggccgatgctgctggtactagggaacaacagcagttgaaaaaatctgcaaaggaagaggtttttaaggacatgtctgtcgaaactttttttgaaaagggcatcgaaattccaaaagagaataaaaaattgaagaaaaaaactccgaaagagcaatctgatgaagattcctcctcttccgaagaggaggaagacatgggacaaagcatggcaaagttggccgaaaaggatcccgaattttataagtatttggaggaaaatgataaagatttattggacttcgcaggtaccaatccattggatggaattgatagtcaagatgaagatgaagatgctgaaagaaacagtaatattgaagaaaaatctgaacaaatggagctggaaaaggaaaaaattgagctttctttgaaattggttaggaaatggaaaaaacaacttcatgattctccaagcttaaaattactaaggaacataatcagtgctttcaaggttgctgtaaatttgaacaaggaagaaaacatcgaagactataaatatgctatcactgatgagaaagcattccacgaattgatgttcatggtcttgaaagatgtaccacaagcgattcaaaagatggccccatacaagattgtaaaaggcgcaaggaccttaccaaatggaggtaacgtctccagggtctcgtccattgtcaagtcgcatgctggctctttgttgattttattgaatgatattactaatacggaaacagcagcattagttcttcattctgtcaacgaattgatgccttatcttttatcatacagaaggatcttaaaggagcttattaaatcaattgttggagtatggtctacaacgagagaattagaaacccagattgcttcttttgcctttttgatcaataccaccaaagagttcaagaagtctatgctagaaacaaccttaaaaacaacgtactccacttttatcaaaagttgtcgtaaaacgaatatgcgttctatgccactgattaattttcaaaaaaattcggcagctgaattgttcggtatcgatgaagttctaggttaccaagttggatttgagtatattaggcaattggcaattcatttaagaaatacaatgaacgcgacaactaaaaaatccagtaaaattaattccgcagaagcttacaagattgtatacaactggcaattctgtcactccttggatttctggtctcgtgtactatcgtttgcttgtcaaccagaaaaggaaaatggcagtgaatctcctttacgacaattaatttacccattggttcaggttactttgggtgtaatcagattaatcccaacaccacaattcttcccattaagattttatttgattaaatcacttattagactttctcaaaatagtggtgtttttattccaatatatcctttactttctgaaattttaacctcaacggctttcactaaggcacccaaaaagagccctaacttggctgctttcgattttgagcacaacatcaaatgtacgcaagcttatctgaatacaaaaatataccaagagggtttgtcagaacagtttgtggacttattgggcgattattttgctctgtactgtaaaaacattgcatttcctgaacttgtaacaccggttattatctctttacgccgttacatcaagacttcaactaatgtcaaacttaacaaacgtttatcaactgttgtagaaaaattgaaccaaaacagcactttcatccaagaaaagagatcagatgttgaatttgggccaacaaacaaatctgaagtttcaagatttttgaatgatgtagcttggaataaaacacctttaggttcttatgttgcagtacaacgtgaagttaaggaagaaaaggccagattaatgagagaaagtatggaagaacaagacaaagaaagagaaacagaagaagcaaaactattaaacagtctggaaggtgatgatgacaacgaagatgttgaaatgtcagacgcttaa

SEQ ID NO: 78684 - DNA, 3450 bp, Saccharomyces pastorianus
atggttgctgcgacaaaaagacggaaaactcatatacataagcatgtgaaagacgaggcctttgatgatttactgaaaccagtatataaaggtaagaaactaactgatgagatcaatactgctcaggataagtggcaccttttaccagcattcttgaaggttaagggtttggtgaagcaacatcttgactcatttaactacttcgttgatacagatttaaaaaaaattataaaggcaaatcaattaattttgagtgatgttgatccagaattctacctgaagtacgtcgatattagagtgggtaagaagtcctcttcttcgacaaaagattatttgactccgcctcatgagtgtaggcttagagatatgacatactctgcaccaatctacgtggatatagaatacactagaggtagaaacattattatgcataaagacgtagaaattggtaggatgccgatcatgctgagatctaataaatgtatcctatatgatgctgatgaatcgaaaatggctaaattaaacgagtgtccgttggatcctggtggttactttattgttaacggtaccgaaaaagtaattcttgttcaagaacaattatccaagaatcgtattattgtggaggcagatgagaagaaaggcattgttcaggcctccgttacttcatctacccatgaaagaaaatctaagacttatgtcattaccaaaaatggcaagatctatttgaagcacaattccatcgctgaagaaattcctattgctattgttctcaaagcctgtggtattttatcagatttagaaattatgcaattggtttgcggtaatgatagtagctaccaagatattttcgcagtcaatttggaagaatcttcgaaattagatatttacacacaacagcaagctttagagtatattggtgcaaaagtaaagacaatgagaaggcaaaaactgactatcctgcaagagggtatagaggccatcgctaccacggttattgcacatttgactgtggaagcccttgactttagagaaaaggctttatatattgccatgatgacgcgcagagtggtgatggcaatgtataaccctaagatgattgatgatagagattatgttggtaataaacgtcttgaattagcaggccaattgatttctttattgttcgaagatttgttcaaaaagtttaataatgattttaaactaagcattgataaggtcttgaaaaaaccaaatagggctatggaatacgatgcattattgtcaattaacgtccattcaaacaacatcaccagcggactgaacagagctatctcaaccggtaattggtctcttaaaagatttaagatggaaagagcgggtgttacacatgttctttccagactatcttatatttccgcattgggtatgatgacaagaatttcttctcagtttgaaaaatcaagaaaagtttccggtccaagagcattacaaccttctcaatttggtatgctttgtactgcagatactccagaaggtgaggcgtgtggtctagtgaaaaatttagcattaatgactcatattactacagatgacgaagaggaaccaataaagaaattatgttatgttcttggtgtagaagacataacattgattgacagtgcatccttgcatttaaactatggtgtttatttgaatggtactttaattggttcaatcagattcccaacaaaattcgttactcagttcagacatctgagaagaacaggtaaagtgtcggagtttatctcaatttattcaaattctcaccaaatggcagttcatattgcaacagatggtggtagaatttgtaggccattaatcattgtttctgacggtcaatctcgcgtgaaagatattcatttacgcaaattattagatggtgagttagatttcgatgattttttgaaactcggattggtggaatatttagatgtcaatgaagaaaacgattcttacattgcattgtatgaaaaagatatagttccctcgatgacacatttagaaatcgagccattcacaattttaggtgctgttgctggtttaattccatatccacatcataaccaatcccctcgtaacacatatcaatgtgcgatgggtaagcaagcgattggtgcaatcgcctacaatcaattcaagagaatagatacattattatacttgatgacttatccacaacagccaatggtgaaaaccaaaacaattgaattgatcgattatgataaattacctgctggtcaaaatgctacggttgctgtcatgtcctattctggttatgatattgaagatgctttggttttgaataagtcatccatcgatagaggtttcggccgttgcgaaacacgtagaaagacaaccactgttttgaaaagatatgcgaaccatacccaagatatcatcggtggtatgagagttgatgaaaatggagatcctatctggcaacatcaatctcttggtcctgatggtctaggtgaggtgggtatgaaggtccaaagtggacaaatttatataaataagtcagttccaactaactcagcagacgccccaaacccaaacaacgtaaacgtccaaactcaatatagggaagctccggtaatatatagaggtccagaaccttcccacattgaccaagttatgatgtctgtttcggataacgatcaagctttaatcaaagttttgctaagacaaaacagaaggccagaattaggtgacaaattttcttctagacatggtcaaaaaggtgtttgtggtattattgtaaagcaagaagacatgcccttcaacgatcaaggtatagttccagacattatcatgaaccctcacggttttccatctcgtatgactgtgggtaaaatgatcgaactgatatcgggtaaagctggtgtattgaatggtacattggaatatggtacttgttttggtggttctaaacttgaagatatgtctaagattttggtagatcaaggtttcaactattccggtaaggatatgttatattcaggtataacaggtgagtgtttacaggcttacatcttttttggccccatttactatcaaaagttaaagcatatggtcttagataagatgcatgcaagagctcgtggtccaagggctgttttgacacgtcaaccaactgagggtagatctagagatggtggtctgaggttgggtgagatggagagggattgtgtaatcgcgtatggtgcttcacaattgctgttagaaaggttgatgattagttcagatgcttttgaagttgatgtctgcgataaatgtggattaatgggctatagtggttggtgtactacctgcaaaagtgctgagaatattattaagatgactattccatatgcagcaaaactgttattccaggaattattatccatgaacatagccccaagattaagattggaagatatcttccagcaataa

SEQ ID NO: 78685 - DNA, 1290 bp, Saccharomyces pastorianus
atgtcagaaccagtgataaagtctcttttggacacagacatgtacaagattacgatgcatgctgctgtcttcactaattttccagatgttacagttacttataaatataccaacaggtcgtcccaattgaccttcaataaggaagccattaattggttgaaagagcaattttcgtatttgggaaatttgaggttcacagaagaggaaattgaatacttaaaacaggaaatcccatatttgccatcggcatatattaagtatattagcagttctaattacaaactacaccctgaagagcagatttccttcacttcagaagaaatcgagggcaagcccacccactacaaattgaaaattttagtcagtggtagttggaaggatactatcctttatgagatccccttactgtccctaatatcagaagcgtattttaaatttgttgacatcgactgggactacgaaaaccaattagaacaagctgagaagaaggcggaaactttgtttgataatggtattagattcagtgaatttggtacaagacgtcgtagatctctgaaggctcaagatctaattatgcaaggaatcatgaaagctgtgaacggtaacccagacagaaacaaatcgctattattaggcacatcaaatattttatttgccaagaaatatggagtcaagccaatcggtactgtggctcacgagtgggttatgggagtcgcttctattagtgaagattatttgcatgccaataaaaatgcaatggattgttggatcaatacttttggtgcaaaaaatgctggtttagcattaacggatacttttggaactgatgactttttaaaatcattccgtccaccatattctgatgcttacgtcggtgttagacaagattctggagaccctgttgagtataccaaaaagatttcccaccattaccatgacgtgttgaaattgcctaaattctcgaagattatctgttattccgattctttgaacgtcgaaaaggcaataacttactcccatgcagctaaagagaatggaatgctagccacattcggtattggcacaaactttactaatgattttcgtaagaagtcagaaccccaggttaaaagtgagccgttaaacatcgttatcaaactattagaagtaaatggtaatcacgctatcaaaatttctgataacttaggtaaaaatatgggagatcctgccactgtgaagagagtgaaagaggaattgggatatactgaacgaagttggagtggtgataacgaagcgcacagatggacctaa

SEQ ID NO: 78686 - DNA, 213 bp, Saccharomyces pastorianus
atgattgtcccagtcagatgtttctcatgcggtaaagttgttggtgacaagtgggaaagctacttaaacttgttgcaagaagatgagttggatgaaggtactgcattgtcaagattaggtctaaaaagatactgctgtagaagaatgattctaacccacgtcgatcttattgaaaagtttttaagatacaacccattagaaaaaagagattaa

SEQ ID NO: 78687 - DNA, 2709 bp, Saccharomyces pastorianus
atgagtaattctacttcattaagggccatcccaagagtggcaaactataacacattagtaagggtgaatgcgagcccagtacggcttttaattctgagaagacagcttgctacgcatccggcgatactatatagctctccttacatcaaaagtccgttggtgcacttacacagccgcataagcaatgttcacggatcagcacatgccaatgctttgagttttgttatcaccaggagatcgatatcacattttcctaaaattatatctaaaattattaggttacccatatatgtgggtggcgggatggctgctgcagggagttatatagcttataagatggaagaagctagctcttttactaaggacaaactagatcgaatcaaggatttaggtgaatcgatgaaggaaaagtttaataaaatgttttccggtgataagtcacaagacggtggtcatggaaacgatggaacggtgccaactgctactctaatagccgctacatcactcgacgatgacgaaagtaagaggcaaggagatcctaaagatgatgacgacgaagatgatgatgacgaggatgatgaaaacgattctgtagatacaacgcaagacgaaatgttaaacttaaccaaacaaatgattgaaattagaactattttgaataaagtggactcttcttctgcacatttaactttaccatctattgtcgtgataggttcacaatcgtctggtaaatcctcagtactagaatccattgttgggagggaattcttaccaaaaggttccaacatggtcacaagaagacccattgaattgactttggtcaatacacctaactcgaataatgtaacagctgattttccaagcatgcgtctatacaatatcaaggactttaaagaggtgaaaagaatgctaatggaactgaacatggccgttccgacttcagaggctgtttcagaggagcctattcaattgacaatcaaatcgtcccgcgttccagatttatcattggtggatctacctggctatatacaagtggaagcggcagaccagccaatagaactgaaaacaaaaatccgtgacctctgcgaaaaatatttgactgcacctaatattattttagcaatttctgctgcggatgttgacctggctaatagttctgctttaaaagcttctaaagcggcagatcctaaaggcttgagaacgataggtgtcattaccaaactggatttggtggatcctgaaaaagcaagaagcatcttgaataataaaaaatatcctctcagtatgggctatgtaggagtgattactaagacaccaagtagtataaacagaaaacacctaggtcttttcggtgaagcaccttcttcgtcattaagtgggatattttcaaaaggccagcacggccaaagtagcggagaagaaaataccaatggtttaaaacaaattgtgtctcatcaatttgaaaaagcttatttcaaagaaaacaaaaagtattttaccaattgccaagtttccactaagaaattgagagaaaagttgatcaaaatcttggagatttccatgtcaaatgcgctggagccgacttcaacacttattcaacaagagttggatgatacttcttatttgtttaaagtagagtttaacgacaggcatctaactcctaaatcataccttttgaataatatagatgtactaaagttgggtattaaagagtttcaggaaaaatttcatagaaatgaactgaaatcaatcttgagagcagaattggatcagaaagttttagatgttttggctacacggtattggaaggatgataatcttcaggatctatcttcctctaagctggaaagtgataccgatatgctatattggcataaaaaattggaactcgcatcatccggcttaactaaaatgggcattggtagattatctacaatgcttactaccaatgcaattttaaaggagctagataacattctggagtctactcaactaaaaaaccatgaactgatcaaagaccttgttagcaatacagccattaacgttctaaacagtaaatactattcaacggctgatcaagttgagaactgtatcaaacccttcaagtatgaaattgatttggaagaaagagactggagtcttgctcgtcaacattccattaatttaataaaggaagaattacgtcaatgtaactcaaggtaccaggcaatcaaaaatgccgttggcagtaagaaattagcaaatgtaatggggtatttagaaaatgaatcaaatttgcaaaaagagacactcggcatgtccaaattactattggaaagaggctctgaagctattttcctggataaaaggtgcaaagtgttatcgttcagattaaaaatgttgaaaaacaaatgtcattcgacaattgagaaggatcgttgtccagaggtatttctatctgcagttagtgataaattgacctccacagctgttttattccttaacgttgaattattaagtgattttttttataacttccctattgaattagacagaaggttaacattgttgggagatgaacaagtggaaatgtttgctaaggaagatccgaagatttcaaggcatattgaattgcaaaagagaaaggagctgttagaattagccttggagaaaatagattcaatcttggttttcaagaaaagctacaagggcgtctccaaaaatttatga

SEQ ID NO: 78688 - DNA, 1272 bp, Saccharomyces pastorianus
atggcagcacatcagatggactcgataacgtattctaataatgtcacccaacagtatatacaaccacaaagtctacaggatatctctgcagtggaggatgaaattcaaaataaaatagaggccgccagacaagagagtaaacagcttcatgctcaaataaataaagcaaaacacaagatacaagatgcaagcttattccagatggccaacaaagttacttcgttgacgaaaaataagatcaacttaaagccaaatatcgtgttgaaaggccataataataaaatctcagattttcgctggagtcgagattcaaaacgtattttgagtgcaagtcaagatggcttcatgcttatatgggacagtgcttcaggtttaaaacagaacgctattccattagattctcaatgggttctttcctgcgctatttcaccatcgagtactttggtagcaagcgcaggattaaacaataactgtaccatttatagagtttcgaaagaaaacagagtagcgcaaaacgttgcgtcaattttcaaaggacatacttgctatatttctgacattgaatttacagataacgcacatatattgacagcaagtggggatatgacatgtgccttgtgggatataccgaaagcaaagagggtgagagaatattctgaccatttaggtgatgttttggcattagctattcctgaagagccaaactcagaaaattcttcgaacacattcgctagctgtggatcagatgggtatacttacatatgggatagcagatctccgtccgctgtacaaagcttttacgttaacgatagtgatattaatgcacttcgttttttcaaagacgggatgtcgattgttgcaggaagtgacaatggtgcgataaatatgtatgatttaaggtcggactgttctattgctactttttctctttttcgaggttatgaagaacgtacccctacccctacttatatggcagctaacatggagtacaataccgcgcaatcgccacaaactttaaaatcaacaagctcaagctatctagacaaccaaggcgttgtttctttagattttagtgcatctggaagattgatgtactcatgctatacagacattggttgtgttgtgtgggatgtattaaaaggagagattgttggaaaattagaaggtcatggtggcagagtcactggtgtgcgctcgagtccagatgggttagctgtatgtacaggttcatgggactcaaccatgaaaatatggtctccaggttatcaatag

SEQ ID NO: 78689 - DNA, 558 bp, Saccharomyces pastorianus
atgttcagacaatcaattaggccacttgtttcaaatagactaaccttcattcgttataacagttctccagcctacacggctgcagtcagcctattgaaaggagatttgaaaaaggctatgattgccaaggatgagatgaagaagacagcaatcagaagtatgttgtctgccataaaaaacaaagaaattgccttaaaagggaagagcgctgatgagtactccctgtacgacatgtactccaagttaatatctcaaagaaaggactcgatcaatgagttccttgctaacaagagggacgatctggtggccaaagagcaaggtgaaatggacattataaagaaatatatggaccaattgccagtgtcttcagagcttgatattgatcaaaatgtgaagaaattactggacgccctcaaaacaaaggcaggtgaaaaaaaggttcaaattaaggaaatcatgggagaaatcgactggaagtcattgccaacagaatggaagacatctccaactgccatcaaaaatagcattgttaagcaattcaaggaaattttcaaatga

SEQ ID NO: 78690 - DNA, 1455 bp, Saccharomyces pastorianus
atgggtaaaaataagaagaaaacaggtaagaaggccaagagtcatcctcatgtggaggacgttgatgaaaccgtcaataaacctgaagaaatcatcaattctgtaaacgtcacagttcctccaaaaatgtccacagatccagaggctgatggtatcgtggcaagcccggacgatgaggggaaagatctctccgaaggagtagacaaacaaaaagtaaatgacggcctgactgtagacaccataaatcctttagaggacaaaaaggctggtgatgagatgaaggaactaagggaagaaattgaacgtttaaaattggaactaagccacaagaaggatcaagaaacgcctaatgaagacttcaaaaatgaactagcaaatgttattaaggaaagagacgaattcaaaacacagtatgacacattattgagcaagatatcttctatgaaatcaatttttaataagatgaaagaagcacaaaaacaattagaggaagtgcaggagcagcttactgaatatgaatcacaaaatctgaaactgaagaagaaacttgaagctaccaagaccgaaaactctgaattacaatccacgattgtgaccctaaatacagaattagaaaacctagaaaaggagcaagaaagtacagaagaggtttttttggaatacgaatcaaggatagaagctttggaagatgaaaaacacgacataattgaaaaacatagtaaggaacttaacacttacaggaaagaaaaagatcaattaaatctccaagttcaggaactcatgataatcttagaaaataataaacaagatatatctgacttgagaacagaaagagatgaattgagacaggctttggaatcccatgaaaaggagaaagcagtattaaagaattctctaaatgatctggaattgaagatagaagaagttgacaacaaaagggaagaagaggctagagagagggaccaggaagtcaaagctttacgatcccaacttgacacggagatagaaacgcacaacaatgacacagaagctttggaaagcatgaaaaaacagctagaagccatgaaagaggacgtctctatgaaggaaaaatatgaggaagaatctaagcagcacatcttacagatcggaaaactacgtcacgaagccattatactaaatgagcatttaacaaaggcactggccatgttgaagaaatcaagcgattctgaatccgttgataaagaactgatatccaacctattgatatctttcgtgtccatacccagagcagacccaagaaagtttgaagttcttgaattactgtccaatttcttaaactgggatgaagacaagaaacaacaggccggcttgatctcgaataatgactctaagaattcaagcgctgtatcgagaacggaaagctttgtatcgctttggaccaactacctcgagaaagagagtgagaaagactaa

SEQ ID NO: 78691 - DNA, 2595 bp, Saccharomyces pastorianus
atggtcaatatttctgatttctttggtaaaaataagaaatccgtaagatcgtcaacatccagacctacgagacaggtgtgttcgtctaaaccagaagttatcgacttagatactgaatctgaccaagaatcaaccaataaaacaccaaagaagatgcctgtaagtaatgtaattgatgtaattgatgtatcagagacacctgaaggagaaaaaaagctacctcttcccgctaagaggaaggcctcttcaccaactgtaaagccagcaagttcaaaaaaaaccaaaccctcctctaaaagttcagactcagcttcgaatattacggctcaagatgtactagataaaattccatccttggatctgtcaaatgttcatgtgaaagagaatgctaaatttgatttcaaaagcgcaaattcaaatgcggatccagatgaaattgcttctgaaataggtagttttccagaaggaaagccaaattgtttattaggtctaacaattgtcttcacaggtgttctgccaaccttggagcgtggtgcatcggaagctttagcgaaaagatacggagcaagggttactaaatcaatttcaagcaaaacttctgtagtagtcttaggtgatgaagcagggccaaagaaactagaaaaaatcaagcaattgaaaatcaaagccatagacgaagaaggctttaagcaattaattgctgggatgcctgctgaaggtggtgacggggaagctgccgaaaaagcacgtcgaaaattagaagaacagcataatattgctaccaaagaagcagaattgcttgttaagaaagaagaggaaaggtcgaagaagcttgcagccactagagtttctggtggccatctggagagagacaatgtggttagggaagaagataaattgtggacagtaaagtacgcaccaacgaatctacaacaggtctgtggtaacaaaggaagtgtaatgaaattaaaaaactggttggctaattgggaaaattcaaagaaaaatggttttaaacatgctggtaaagatggctctggtgttttcagggctgcaatgttatacggtcctcctggtattgggaagacaactgctgctcatttagttgcacaagagcttgggtatgacattcttgaacaaaacgcttctgatgttcgctctaaaactttacttaatgccggtgttaaaaacgctcttgataacatgtctgtagtgggatatttcaaacacaacgaagaagctcaaaatttgaacgggaaacattttgtcattatcatggatgaagttgatggtatgagcggaggcgatagggggggagttggccagctggcacagttttgtcgtaagacgtcaactccattgattctaatttgtaatgaacgtaatttaccaaaaatgagaccattcgatagagtatgtcttgatatccaatttagaagacctgatgctaacagtatcaaatcaagattaatgacaattgcgatcagagaaaagttcaaacttgatccaaatgtcattgataggttgatacagactacaagaggtgatatccgccaggttattaatctactttcaacgatatctacgactactaaaaccataaaccatgaaaatatcaacgagatctcaaaggcatgggaaaagaatattgccctaaaaccctttgacattgcccataaaatgttggatggacaaatatactcagacataggttcaaggaactttacactgaatgataagatcgcattatattttgatgactttgatttcacacccctaatgattcaggaaaactatttatctacaagaccaagcgttttgaaacccggccagtcacatttggaagcagttgctgaggcggctaactgtatttcattaggtgatattgtcgaaaagaagattcgtagtagtgagcaattatggagtcttttgcctttgcatgctgttctttcatctgtttatccagcatcaaaagttgccggccatatggcgggaagaatcaatttcacagcttggttgggccaaaattctaaatctggcaaatattataggttactgcaagagatacattatcatacaagattaggtacatctactgataaaattggactaaggctggattacctaccaacttttagaaagagattattagatccatttttgaagcaaggtgctgatgcaattgcatctgtcatagaggtaatggacgattactatttaaccaaagaagattgggattctattatggagtttttcgtaggtcctgatgtgaccacagcaattatcaaaaagataccagctacggttaaaagtggattcacgcggaaatacaacagtatgacacatccagtcgcaatttacagaacaggtagtactattggtggtggtggtggtggcaccagtactagcacccccgatttcgaagatgtcgttgatgcagatgacaatccagttcccgcagatgatgaagaaacacaagatagtagcacagacttgaagaaggataaacttatcaagcagaaagccaaacctacgaagaggaagactgccaccagtaaacctggtggtagcaaaaaaaggaaaacgaaagcatga

SEQ ID NO: 78692 - DNA, 798 bp, Saccharomyces pastorianus
atggcaaaccaaaagcaaatgagaactcaaatactaatcacggacattcctagtggcaaatttactagtaaatggcctacacaactggaaaaaactttattcaaggagcaatttccaaatttacaaagtcacttgcagtattacacgccgttgccatttttaaacagaattataatcatatttgataatgaagatgacacgctgcaagtgtttaagttcttacaggaattgttggctaaggagaatagcggtccgatgaagttatttgtaactgagtcccttttaaataatcaacatccgcgatctcgttccacggatgatgctgtttcgttgcaagataataacttggcacttttggaggatcatcgcaacaaaccgctcttatctattaatacagatccaggagtcactggagtagacagttcatccctcaataagggaggctcttcattatctccggataaatcatctctagaatcgcccacaatgttgaagctttcgacggattcaaagccatttagttaccaagaaccgctaccaaagctttctaggtcgtcttcttcaacttcgaacctctcattgaacagaagttcacagacatcattaccttcacaactagaaaataaggataagtcagcatctggcaccaaatgccttttcgcctctaagccactaggattgaccattgatacttctactagaagtaatgctgcatcgtgtaccgaaaatgatgtaaacgctactgcctcaaatcctccaaaaagtccaagcataacggttaacgagtttttccattag

SEQ ID NO: 78693 - DNA, 924 bp, Saccharomyces pastorianus
atgtcatcagactcaaacgcaaagccattgccttttatatatcagttcatatcaggtgccgtcgccggtatttctgagttaactgttatgtatccgcttgatgttgttaagacaagatttcaactggaggtgacgacgcctactgccgctgcagtaggaaagcaagtagagagatataatggtgtcatcgattgtttgaaaaaaattgtaaagaaggaagggtttagcagactttacagaggtattagttcaccaatgttgatggaagcaccaaagagagccaccaaatttgcatgtaacgatcaatatcaaaaaatcttcaaaaacctattcaacacgaatgaaactacgcagaagatctccattgcggctggtgcatctgctggtatgacagaagctgcagttattgttccatttgaattgatcaaaatcaggatgcaagacgtcaagtccagctatcttggaccaatggactgtttgaaaaaaacaatcaaaaacgaaggtattatggggctatacaagggtatcgaatctaccatgtggagaaacgctctttggaatggtggctacttcggtgttatctaccaagtgagaaattccatgcccgtagcaaagacaaagggacaaaagaccagaaatgaccttattgcaggtgcgatcggtggtacggtcgggaccatgcttaacactccctttgacgtggtaaaatccagaatccaaagtgtggacgcagtcagcagtgctgttaaaaaatacaactggtgcctaccttcgctattggtcatataccgtgaagaaggcttcagagcattgtacaaaggtttcgtccccaaagtatgtagactagcacccggtggttcattaatgttggtggtttttaccggcatgatgaactttttcagggatctgaagtacggacactga

SEQ ID NO: 78694 - DNA, 879 bp, Saccharomyces pastorianus
atgtccgcagaaccattattacccacacataacggatcgcagggaggggaagtgaggtccccagatcagaagttcattgtgatacggttttccgacgtatcagtaagggatctgcagttgaatatatcaaatgtaccattttcgaatataaatacccactggctacgtcggatgtgtagagaattgaggccccaacaaacacaaaaaagaagactgaagtttataaggaacgggagtattctgaatacgcattccaagattgctgaggaactgacgcattacttcgatactgctaataactctaacgtcgcaacaggcaccagcgtggcaccagagcagaacaactactatattcattgtataattggtacagaggagctgacacaagcagagttagccaacgaagatctaaaggacgatgcaactccgtccaatgactccatgaccacgcaggccatcgggtttgataggctacgatccgtgggatttactgagcaagaaatcgaactgctgaggcaacagtttcgggccacgtatggagatttggaggaggaggaggagagacttgctcaaaatggcaacagagatgatgagggccatgacattagacagttggaggaacagtggatggaaagcgggagtgggaccgctcaggggaatggggccggaggcggcaatgaagacaggtttaactctgtgccgatcgctaacataaagcacaacaaagacttgcttttaggtatatgtgtcggattcttcttcggcgtctttggtatactattaatgaagtttgatggattgttcaacagacggcaaaaaatggcgatttttgccggtgtgattgttaatgttatgttttgtcttgtgagaggtttttag

SEQ ID NO: 78695 - DNA, 441 bp, Saccharomyces pastorianus
atgtctaacactctatttgatgatatattccaagtctcggaagttgatcccggtcgttataacaaagtctgccgtatcgaagccgcatctaccactcaggaccaatgcaaactaaccttggatataaatgttgaattgtttcccgtcgccgcacaagattctttgacagtgactattgcatcctctttaaacctcgaagacaccccagctaacgactcttctgcgacaagaagctggagacctccacaggctggtgacagatcccttgcagatgattatgattacgtcatgtatggtaccgcttacaagtttgaggaagtaagcaaggatctaattgccgtttactactcattcggtggcctcttaatgagattagaaggtaactatagaaatttgaataacttgaagcaagagaacgcttatcttttgattcgtcgttag

SEQ ID NO: 78696 - DNA, 3741 bp, Saccharomyces pastorianus
atgagctccaagttgaagtacactgatatagatgtgccattggactggttgtataaggggaaacgaaggaataggaccaaaagtgcggcttccacgcgcacttcagaagctaccaccacctctgtaaagaaaactgctactttgccatcaaccgcagctgttcctacgaaaactatagcttctcctcaaaggcccctgagcggccagaatgtatataacgaattatccaactctaaaccagcagtatccgccgagaaggtttcgcagcaaggacaagtgcccactaggaggactcgttctcactcagtatcgtacggcctactccagaagaagaataataacgatgacaccacagattctcctaaaatatctcgaattagaacggcacaggatcaacctgttaaggaaacaaaaaccagcacccttgcgggacccatcgtttcaaagaaggggagaagtcgttcttcttctatatcaacttctttgaatgaacgatctaagaaatctctgttcggttctttattcgggagaaggccttcgaccactccctcgcacgttgttgaaagaccgttgtcttctcagaatgaccataaaaaaagcacagaactccctcctatagataccagacagtcaaagatctccaccccaactagtactcctaccactgcatcttccaaacccagtagttctggtgggaatagacattctgatggatctcttacttcaaaacttctaagtattcctcataacatcttggaaatctcttctacgaattttaatgcccaccatcatatccagtcacatcatagtagtggtcgtgaacaagactcgccccattctgaatcaccagacctgcctcccattttagaaaaagaaactacgcaaaaacaattacagaaggtgtcaaaggtaaatttgaaaagggttactattgcagttcaagaatttaactcagatcctccacaacaactaccttcaaggaagcctaaaaggggtaatgttctcataccagaagatatgattagtgcccccccactaatctctctgggaattacaaacagcagcgatcaaagcagttttcagtccaataactctccctcatattcaaaagattctaaagaatataaactagctttggaaaatttcaagaaagcagctaaagaagccgaaaaacatcaaaaggatgcgtattatgttgcagaacgaatggctcaagaagtggcaaactataaggccaagcaattgaagacatcgccgttaactggagcaactaattcagcagcagattcagcgacggatcaagaatcctcctccctagatgctagagcttctaagcttcatatcgataagccgatcaatgcaggtgcacatcctttcgaaacacatcaggatgataacactaaatactcttctcaccttgaacaaacattggacgtagcttacactagatgctgtcatttgagagaaattttaccaataccgtccactttgagacaggtcaaaggtaaaaccgcacctttgcaaactttgaaatttttgaatccaaaaccaaccttggtggatatattatcattttgtgattttattgccataactccgatccataacatcattttcgataatgtgtctttaacccatgatatgttcaagattgtcatttgttctttggtaacctctccggtagtggagaaattggggttaagaaatgttgtgataaacgaacaaagttggaaactactttgcaagtttttattacaaaataagacattgatcaagctggatatttctcagactaaagcaaggacagatttaaatgattctaactacagagaccaaatggactgggaactattttgcgaagttcttagaaataaagaaggtagacctttggaagaattgcttttgaatggtttaaggtttgacaaaatgtcattcagtcatttcaaaaatatcctacttactttcgcacaaatgaaccctaaaaaccctattcgtctcgggatggctaacgtagaattctcaaccgagtgttttgattttctctttaattggatgtctgaatataacgttcaaggtgtggatttggcctataataatttagaaagtttggcaaaacgaatgatcaaaaaactagctaggcttccttataagcatttggaatattttacccttaacagcactaatatcacctctgttgatgatatgtcctacatactaaaatatctttcacgtttgccaagcataaaatttctagatttgagcaacttgcctcagttattcccggggattttaacatccggctataagtattttccccaatttccacaactgaaacgtattcattttgatttcgacgatctttctataaaagaaacaaccatgcttgtcagcatattagctaagtgtgaaaccctctctcatgtttcattgataggacaaagtcccatgcccgatgcaagtaaaatatccgacagtactgatgaacccgataagtcgaaagatgaaaagaaagaacaaatcgtatttatgagaaatacgctttgggcctcattgtatgcatttgttagggactctcacaatttagttagtttagacgttgactatgatcaagtaccagacgaaattcaatcaagaattgcgttatgcttaatgcataatatgaagagaattatggactctagctttaaattagatgaattgactgtacaagatgatttaatatttgatggttccttgataactgagacagcagaagaagttttgaaaagattaaatgacaaatctttacttcaaaatgatgttgggaagaaatatcttttaaagaaatattttgagaaaatggaaaaggtacatcataatgttcaacatacaattgattctatgtttgagaaaagaaaatccggcgaactgccactgcaggaaaaggaaaacctactaaggttattgcttcttgagaaaaatttatcaaatattcttgatatttttgcttctatgcccaatatagcagatgtcgtaccattttcaaaagccgataatagttttcctaatattggggatagcacggttagcgcaaactataatgatggtattcgtctatctctaaaacacttagattctgacaggttaatcaacgatgtttcaattcctgaaaacgattcattaattagaccacacttaatggccaccgactcgggacgaatcatcgatgtgaccactggtaaagctcttcttttcaagagttcgtctaatacctcactggccggcaagagacaggaagaagaggaaggtgaattacataaatggggtgtgtttgtacagcaccaaagctcaagacataactctgggcttccttcatccgccaattcttcgagaattagcgggtcattaacaccagatagcagtgtcgccggaggaaagaaaggggagtcctctcgcacatctggtacaaggccaaaaatcttaccaaagatacctaccggtgccgaattaagggatgccattattaaagctaagggtattgattctgtagatgatctgattaaaaatgttacctctgaaaaggttggattggaatcattatatggagatgaattgaactctagaagcccgagtaatgacagtttacaagaatcacaacaaaaggcgcctttgcagaggccccttgttgaagatgaaacagtgacaaaaaaatacgacaaactattgaacgatctgtctaatgttcgtcacagtaaaacctaa

SEQ ID NO: 78697 - DNA, 909 bp, Saccharomyces pastorianus
atgataaagttgcatgaagtgcctccagaaccagtagaccctgctagtctccctcatgatgttaatgcacatagccccgacggagatggtaatcctgataagaggaaaaaaatatttggcattccgtatcctttttccaggagttcatgtcggagattcctttggaactgtcaaaagatttcggtactgcccatggcattgtatttcccactacatgcagcaaatacattaatcacgccggcagtatcacctgattctgctcctgacgacgttttaatgatggtgagagagattttaccgtccataactaccaagctgttagttgcgggtattactcttcatgtttctgctggtgtcttgctccgaatcgtgaacaactggaacaagccaagaagaaatagacatcgacatttaaagatatcggccgaacaagatctatcccaagattcgattggtttaactggtggaatttctggctatttatttggattgtataagaccttccgcattcctccacaagtgattagtggatacatccttgttcccgtcctgatataccacttattaattatgaaatggctgccgaattccatctctactgaggtggatttcgcctctataaagcaattactatctagcaagaacaggtggtggaaatggcttggaggcctggtgccgttagctattctcctcgagtcaggtgtatatcatataggttcggggctctgccgttatttcggtgttagaaaaatgactagcaggaaaaaatggtccacagctatcaatctattgacactcgttgggttcgtttctctgattagattgatgaaagaggattctacgaaactgggtcccaaccaattcgaaggcattttcaaaaagatccggttgctgttgcacgtgaattag

SEQ ID NO: 78698 - DNA, 1314 bp, Saccharomyces pastorianus
atgccaaaaaaggtttggaaatcatctacgccttccacttatgaacatatctccagcttaagaccaaaatttgtgtctcgtgtggacaatgttctgcaccaaaggaagtccttgacgttcagcaacgttgttgttccagataaaaaaaataacactctaacctcaagtgttatatactctcaaggtagtgatatctacgaaattgacttcgctgtaccactacaagaagccgcttcagaaccggtgaaagactatggtgacgcctttgaaggtattgaaaacacctcgttgagcccaaaattcgtgtaccagggtgaaactgtctccaaaatggcctacttagataagactggagaaactacattattgtcgatgtctaagaacgggtcgttggcttggttcaaagagggtataaaggtccctattcacattgtacaggaattgatgggtccagcaaccagctatgccagcatccattctttaaccagacctggtgatctacctgaaaaggatttctcattagccatctctgacttcggcatttccaatgataccgaaaccattgtgaagtctcagagtaatggtgatgaagaagacagtattttgaaaatcattgacaatgccggtaagcctggtgagattctacgtactgttcatgtgcctggtaccactgtgactcacaccgtaagatttttcgacaatcatatctttgcgtcttgttcagatgacaatattctgaggttctgggacactagaacttccgacaagcctatatgggtgttgggagaaccaaagaacggaaaattgacctcgtttgattgctctcaggtttccaacaacttgtttgttaccggtttcagtacgggtattatcaagttatgggatgccagagcggctgaagctgccaccactgatttgacttatagacaaaacggtgaagatccaattcagaatgaaatcgctaatttctatcatgccggcggtgattctgttgtcgacgtccaattttctgccacttcaagctctgaattctttactgtgggcggcactggtaatatttaccactggaacactgactattccttgtcaaagtacaatcctgacgataccattgctcctcctcaagatgccactgaagaatcacaaacaaaatctctgagattcttgcacaagggtggaagcagaagatctccaaaacagattggaagaagaaacaccgccgcttggcatccagttattgaaaacttggttggtactgtcgatgacgatagtttagtcagcatctacaagccctataccgaggaaagcgaatag

SEQ ID NO: 78699 - DNA, 1527 bp, Saccharomyces pastorianus
atggcttcactgttcagacccccagaatctgcgaaatgcaacccaaactctcctagacttaaactgcccctcttacgaaataatcaggtagatgaaaataatatatacttgacgtcgaatgggagttccaccacagcttacagtagccacaccccagaaccactgacctcttccacatcgacacttttctcccaaactcgacttcatcctagcgactcttcaatgactttaaatacaatgaagaagaggcctgcaccgccatctttaccttcgctcagcataaattcacagtctaagtgcaaaacactacccgaactcgtacccatcgccgatgtgtctgatggtaaacatgatttaggattgaaacagcgtgtgatagccgaaaatgagttgtctggtaatagtgacttaaccccttcatcgatggcaagccccttttcacatacaaacacctcttctccctacctcagaaatgatctgagcaattcagtgggatctgacttttcaaatttgatatcggcatatgaacaaagttcaagtcccatcaagtcatcgtcccagcctaaatcatcttctgaatcgtacatagacttaaacagtgtacgagatgttgatcaattggatgaaaatggttggaaatatgcaaatttaaaagataggatcgagacattaggcattctaggagaaggagccggtggctctgtttccaagtgtaaattgaaaaatggatcaaaaatattcgctttaaaagtgataaacacattaaatacagatcccgagtatcagaagcaaatattcagagaattacagtttaataggagtttccaatccgaatatatcgtacgatattatggaatgtttacggatgacgaaaactcttcaatttatattgctatggagtacatgggtgggcgatcgttggatgctatttataaaaatttgttagagcgtggtggtaggatcagtgaaaaagtcctggggaagattgcagaagcggtactaagaggactatcatatttgcatgaaaaaaaagttattcatagagatattaagccccagaatattttactgaatgaaaatggtcaggtgaaactttgtgattttggggtcagtggagaagccgttaactcgctagccacaacattcacggggacgtcattctatatggctccagaaaggattcaaggtcaaccatacagtgtcacatctgatgtatggtcacttggattaacgattttggaagtggcgaacgggaaatttccatgctcttccgagaagatggcagccaatatagctccctttgaattgttaatgtggattttaacatttactcctgaattaaaggatgaacccgaatccaatatcatatggagtccgtcattcaaatcctttatcgactactgtctgaaaaaagatagtcgtgaacggccatctccaagacaaatgatcaatcatccttggataaagggtcaaatgaaaaaaaaggtcaatatggaaaaattcgtgaggaagtgctggaaagattaa

SEQ ID NO: 78700 - DNA, 201 bp, Saccharomyces pastorianus
atgtgtttatcacttttaaagcgaatatttttgatccatttttcaatttacacttggaaacagagccaccggctccttctcctagaatgcctaatgtctcgatcctatcttttaaatttgcatatttccaaccattttcatccaattgatcaacatctcgtacactgtttaagtctatgtacgattcagaagatgatttag

SEQ ID NO: 78701 - DNA, 2403 bp, Saccharomyces pastorianus
atggcttctgtacctaaacgccatacatacggtggcaacgttgtcactgatagggaccgtcattctcttcaaagaaacaatgagattttgcatcctatacataaaaatcagcgaaaacatgctaccttcggaccatacataatcggttccactttgggtgagggagaatttggtaaagttaagctgggttggaccaaggcttcctcctcgaacgaggttcctaagcaagtggcaatcaaattaattagaagagatacaatcaagaaagatgccgataaagaaattaaaatataccgcgaaattaacgcactgaagcatttaactcatcctaacattatctatttggaagaggtcctgcagaattcgaaatacattggaatagtgctagagtttgtatctgggggagaattctataagtatattcaacgtaagaggagattaaaggaatcttctgcatgcagattgtttgcccaattaattagtggggtcaattatatgcactacaaaggacttgttcatagggacttaaaactggaaaatttattattagataagcacgaaaatttagtcatcacggattttggttttgtgaatgaattttttgaagataacgaattaatgaaaacttcttgtggttcgccctgttatgcagcaccagaactagttgttagtaccaaggcatatgaagcaagaaaggcagatgtttggtcgtgtggtgttattctttatgcaatgctcgctggatatttgccgtgggatgacgatcatgaaaatccaacgggtgacgatattgctagactgtacaaatacatcacgcaaacacctcttaaatttcccgaatatataacccctattccaagagatttgctgaggcgaatactggtacccaatccaagaagaagaataaacttaaaaacaataaaaaggcatgtgtggttgaagcctcatgaagcgtttttgagcattcagccgaactattgggatgaacacttacagaaggaacgtccgaaaccgccaaacaaaggtgacgttggtcgccactcaacttattcttcatcagcatcttcgtactcaaaaagtagggatagaaactctttaattatagagtcgactctagagcaacatcgaatgtctccacagcttgcgaccagcagaccagcatcaccaacattctctactggttccaaagtggtgttaaacgatacgaaaaatgacatgaaagaatctaatataaatggcgagcgtactagtgcatcatgcaggtacacacgtgattcgaagggcaacggccagacccaaatagaacaagtatcagctagacactcatccagaggcaataagcacacatcggtcgcgggactcgtaacaatccctggctcccccacaactgcaagaacaaggaatgcaccatcatcaaagcttactgagcatgtaaaagattctagtcagacaagctttactcaggaggaattccaccgtattggtaattatcacgtgcctcgcagtagacctaggccaacttcatattatcctggactcagtcgtaacaccgcggataatagtttagcggatattccagtaaataagttgggttcgaatggtaggttgacagatgccaaagacccggtaccgttgaacgcaatacacgataccaccaaagctacaatctccaacaattccattatgctattatcagaaggtccggctgcaaagacttccccagtagattaccattatgctattggcgacttaaaccatggtgacaaacccataactgaggttatcgacaaaattaataaggaccttactcataaagcagctgaaaatggttttcctcgagagagcatcgacccagagagtacctcaacgatattagttacgaaagaacccactaactccaccgatgaagatcatgtagaatctcagctggagaatgttggccactcttctaataaatcagacgcttcttctgataaagatagtaaaaagatctacgaaaaaaaaaggttcagcttcatgtcgttgtactcatccttaaatggttcaagatccactgttgaatctcgtacctcaaaagggaatgcacctcctgtttcatctagaaatccatcaggacaatcgaatagaagtaacattaaaataactcagcagcaaccacgtaacctttccgacagagttccaaatcccgataagaaaattaatgataatagaataagagacaacgcacctagctatgctgaaagcgagaatccgggaaggtctgtacgggcttctgttatggtgtcaacactacgagaagaaaatcgatcggaattgtcgaatgaagggaataatgtcgaggcacagacttcaacagcaagaaaggttctgaattttttcaaaagaaggagcatgagggtttga

SEQ ID NO: 78702 - DNA, 636 bp, Saccharomyces pastorianus
atggctggaggaaagattcctattgtaggaattgtggcatgtttacagccggagatggggataggatttcgtggaggtctaccatggaggttgcccagtgaaatgaagtatttcagacaggtcacttcattgacgaaagatccaaacaaaaaaaatgctttgataatgggaaggaagacatgggaatccataccgcccaagtttcgcccactgcccaatagaatgaatgtcattatatcgagaagcttcaaggacgattttgtccacgataaagagagatcaatagtccaaagtaattcattggcaaacgcaataatgaacctagaaagcaattttaaggagcatctggaaagaatctacgtgattgggggtggcgaagtttatagtcaaatcttctccattacagatcattggctcatcacgaaaataaatccattagataaaaacgcaactcctgcaatggacactttccttgatgcgaagaaattggaagaagtatttagcgagcaagatccggcccagctgaaagaatttcttccccctaaagtagagttgcccgaaacagactgtgatcaacgctactcgctggaagaaaaaggttattgcttcgaattcactctatacaatcgtaaatga

SEQ ID NO: 78703 - DNA, 921 bp, Saccharomyces pastorianus
atgtactcaatggacgaaaaagtcgaacttattttagtgccatgccactcaatatggaagtcctcatcgcatcctagtgataattcagttaatttgggtcaattacctgaatactggcatttagctccgtttcagtatgagggtaatgatcatttagcattcatcaaacatggcctaactgctattaaactactcctacaaagattcgacaccgctaccgttatcttcagtggatcccaaacgaaaaaagaggcaggcgctatatctgaggcacaaagctactattctttatttgaaaagttgattagatatgtgatgagcaatgataacatcgatgttccaaactttgataacgagctgcgtcttttattaaaagaggtcaaaaacttgctatcaagtcaaaatgtaaatgttgatgaattgttctatggtggttcaatcactactgaagagttctcgctggactcatttgataatttaatttattctatatatagatttgaggaagtgaataaaaaattcccacagaaaataactataatagggtttgcgtttaagatgccaagattcatcagctgtcatgccaaggccattgattacccacaatcaaacataacctacataggaattgaccctaaaccagcaaactacaaccaaacacaactttcaaaatactatgatgatctagtacaaatggaagataaaaatgcactaagcttattttcttcagattggtacgctacaaaggatagattactcaccaagaaaagatctcgcaacccatttaacagaactgcaccgtacgctcagaatattttctgcaaagaaaacggcaagaggatcgagggaatcgaggatgacgaggaatattttgaaacaaaaattaagtgtaaaatgccatggtcgtcgccaagacaataa

SEQ ID NO: 78704 - DNA, 1647 bp, Saccharomyces pastorianus
atgcataaaggaaaaaaaaattaccctaatttgattacttcgtttcggatgaatttgaaaaaaatcatattgaaccatgaccgatttagccatccagaaagatggaaaacaaacgcactcttaaggttcaccttcgtgtatataaaatttctcttcgacttgatgataatcaaaaatccattaaggatggttggaaaaacttatcgagacgctgttactgcgctaaactctttgcagtccaattatgccaacatcatggctatccgtcaaactggtgatcgtaaaaacactatgacattattggaaatgcatgaatggtctcgaagaattggttactctgcatcggatttcaataaattaaatattgttcatatcactggaacaaaaggtaaaggttctactgccgcatttacttcatcaattctaggacaatataaagaacaattaccacgtatcgggctatatacgtctccacatcttaagtcagtgagagaaagaataagaataaatggggagccaatttctgaagaaaaatttgcgaagtacttctttgaggtttgggaccgtctagatagtacaacctcttctttggataaattcccgcatatgatcccgggaagtaagcctggctatttcaagttcctcacattgctttcatttcacacttttatacaagaggactgcaaaagctgtgtctacgaagtcggcgtcggaggtgaattggatagcactaatataattgaaaagccaattgtctgcggtgttacactattaggaatagaccatactttcatgcttggtgatactattgaagaaattgcttggaataagggaggaattttcaaatctggagcaccagcattcaccgttgagaaacaacctcctcagggattaacaatattgaaagaaagagctgaggagcgcaaaacaacgctaacagaagtacccccatttaaacagttggaaaatgtcaagcttggaattgctggcgagtttcaaaaaagtaacgcctcccttgccgttatgctggcttctgagatcttgcatacgtccaatatattggaggagaagatcaaatgcagttcgaatgcatcgattccagaaaaattcataatcggtctacaaaatactaagtgggaaggcagatgtcaagtactagaaaagggaaaaaacgtttggtacattgatggtgctcacaccaaagatagtatggtagctgcatcaacatggttcagagatacggttcgattgtcgaagagaaagaagatcttgctcttcaatcaacaaagcagagatgccaacgctcttgtgaataacctgtactcatctgtttcgccagaaataacgttcgatgatgtgatatttactactaatgtcacttggaaatcaggctcatacagcgctgacctcgtttccatgaacacttctcaagaagatgtagaaaaattgaaagtccaggagtcattagtcaagaattggaacaaaatagacgataatcgtgctaaaacgcatgtaacggctagtatagaggaagcaaatgaattgattgaaacgctatacgatgaacctgctgatatatttgtaactggttcattacatcttgttggcggattattggtcgtttttgatagaatagatgtaaagtaa

SEQ ID NO: 78705 - DNA, 1116 bp, Saccharomyces pastorianus
  modified_base (1037)..(1059): a, c, g, t, unknown, or other
atgtacaagaactattattcaaacacagaagtttataaaaagcataaagactctggaagtttgaggaagaaagctttgagatcgagaagatcatcttttttttcatttttcaatgactcgtctagttcgaatggaaacgaattcataggttttagacgatttgcaaaagcatatctgtttggtcacgagataggttcatgtggtacagattcatatacaccagttggggcaaatgtaaacaaaagacgtttaaaaaaagaaggtaaaaacgatcaacagctttggaaaaggcagcaccattcacagggttgtttttttcccatagataatgacagtaataagcaaacagaagcagccgtcaacaaattttatgagaatggagaatacgttaatcaggatttaattttcaagggaaaagtatatccagaagaatcagaggttgttgatgagaaaacggcaggttctcagaatcccgctcttctcaaaacaagatcaatttcattaaacgatataccgcgcggcacaggcatctctagtgtattgtctcaagtacgcggaggttccttagaaagaattattgtctataggtacgatactccggaacgttctttgcataaagttgatcttttcttcttaaattacgagggagctcaatcttttatgagatacgcaaaaacaaatatttttaaagttaatggagttcaattaaaaccagaatggatattcctcgagagcacatatgaaaacataatgaaagagcaatctgtcaacagaataatagaagaggaaaagttcatatcaagatgtttgatagtgaaaaaaagctcgacaacagcaatgcctaacaaatcaaatctgaataaagggcaaactttagaaaacattgatattcaagaattagaaaaagattttcagaattttggagaggttctagaaattacgcctattgtatcaagaaaattatgcgtatctatattcttttacgatatttccagtgctatgagagctatggaagaatacgaacaaaagggctcatnnnnnnnnnnnnnnnnnnnnnnnacatggacaatatggtacgggaaagatattacagaccagccttgcattgacttgtag

SEQ ID NO: 78706 - DNA, 1338 bp, Saccharomyces pastorianus
atgtcccatgacgaaaaacaagaacctggtattgccaaaaagataaactcagtagatgatattattatcaaatgtcaatgctgggtccaaaaaaatgatgaagaacgattagctgaaattttatccataaacacaagaaaagcaccaccaaaattctatgttcactatgttaattacaacaagcgtttagatgagtggattaccactgacagaataaacctggataaagaagtactatatccgaaactaaaggctactgatgaagataataagaaacaaaaaaagaagaaggcaacaaatactagtgaaacgccacaagactctctgcaagatggtgtagatggtttctcaagagaaaatacggatgttatggacttagataatctaaatgtacagggaataaaagatgagaacataccacacgaggatgagataaaaaagcttagaacctccggctctatgacacaaaatccacatgaggtggctcgagttagaaatctcaatcggatcattatggggaaatatgaaatagaaccatggtacttttctccatatcctattgaattaactgatgaagattttatatatatcgacgatttcacgttgcagtattttggatctaagaaacaatacgaacgctacaggaagaaatgtacattaagacatccgccaggaaatgaaatctacagagacgattatgtttcattctttgaaatcgatggtagaaagcaaaggacttggtgtcgaaacttgtgtttactttccaaacttttcctagatcacaaaacattatactatgacgttgatccgtttttgttttattgcatgacgagacgagatgagttgggtcaccatctggtgggatatttttccaaggaaaaagaatccgcggatggttacaatgttgcatgtatcttaacactaccacaataccaaaggatgggatatggtaagttattgattgaattttcgtatgaattgtcgaaaaaggaaaacaaagttggttctcccgagaaacctttgtctgatttgggtctcttatcctatagagcctattggtcggacactctcataacgctattagtggaacaccagaaggaaattactatagacgaaataagctccatgacttcgatgaccactacagatatattacacacagcaaagacactgaatatcctgcgatattacaagggtcagcatattattttcctgaatgaagatattttagataggtacaatcgacttaaagccaaaaagagaaggacaatagaccctaatagactcatatggaaaccaccggtatttactgcctctcagttacgctttgcctggtaa

SEQ ID NO: 78707 - DNA, 993 bp, Saccharomyces pastorianus
atgttagacccacgaatattgccatactacgacccggctgtggagaggaagattgctgtagtaacaggcggaaatacgggtattgggtggtatactgtcttgcatttgtatttgcatgggtttgtcgtttatatttgtgggagaaactctcacaagatttcgaaagcaatccaggagatactggcagaagcaaagaagaggtgccatgaagatgacgacggttcaagcccaggcgcgggcccaggtccaagcattcagcgtctagggtcactgcactatatccatttggatttgacagatttaaaatgtgtggagagagcgtcacttaaaattctcaagctggaagaccacatagacgtgcttgttaacaatgcagggattatggcggtgcccttagaaatgacgaaggacagatttgaagtgcaattgcagactaactacatttcgcacttcctcttcacgatgagattattgcctttactgcgccattgtcgtggcaggatcatttccctgtcctcgataggccatcatctagagttcatgtactggaaactgagcaagacgtgggattacaaacctaatatgcttttcacatggtttaggtacgcgatgagtaaaaccgcgctaatccaatgcacgaagatgttggccatcaaataccctgacgttctttgtctctccgttcatccgggtctggtgatgaacacaaacttattcagttattggacaaggttacccatcgtcggtattttcttttggctgttgttccaggtcgtagggttctttttcggcgtatcgaacgaacaaggttcactagcttctttgaagtgtgcattggacccgaatttatctgtggaaaaagataacgggaagtacttcaccacggggggtaaagaatctaaatcgagctacgtttctaacgatgtcgacgaagcggcatcgacttggatctggaccgttcatcaactaagagaccgtggtttcgatatataa

SEQ ID NO: 78708 - DNA, 633 bp, Saccharomyces pastorianus
atgcttcaatccgttgtctttttcgctcttttaaccttcgcaagttctgtgtcagcgatttattcaaacaatactgtttctacaactaccactttagcgcccagctactccttggtgccccaagagactaccatatcgtacgccgacgacaccactaccttttttgtcacctcaacggtctactccacgagctggttcacctcaacttcagccaccattaccaatgcggcctcctcctccttgtccacctcttcggcctctggatctgtaaccccagaatccacccatgaaattacctccacctcgactatcacgtccactttgctgctaacccttcatgactccactactttgtctccatcatctactgcagcaagtgtcagtgacgaagattcaaacaacaaagatgcaaaggtcaagtcctttgaacaggcttcaacttccaatggttgcgtcccaatcacaaagtttgtcactgtcaccaatgagcccgttacccagtacgttacagtcaccccaaatacgactactcaatacgttactgtcaccggtgcaccttctgttaccactacctctccaggtaaagtacaatggtacaacaccacttcgattactaattcgaccagttggtga

SEQ ID NO: 78709 - DNA, 303 bp, Saccharomyces pastorianus
atgactccactactttgtctccatcatctactgcagcaagtgtcagtgacgaagattcaaacaacaaagatgcaaaggtcaagtcctttgaacaggcttcaacttccaatggttgcgtcccaatcacaaagtttgtcactgtcaccaatgagcccgttacccagtacgttacagtcaccccaaatacgactactcaatacgttactgtcaccggtgcaccttctgttaccactacctctccaggtaaagtacaatggtacaacaccacttcgattactaattcgaccagttggtgaattatga

SEQ ID NO: 78710 - DNA, 1338 bp, Saccharomyces pastorianus
atggcaagtctacctggtattgatgagcatactacctctgaagaattgataactggtgataacgaatggcacaagttggttattcccaagggcagtgattggcaaattgatcttaaagcagagggaaaactgatagtcaaggtaaactcgggcatagttgagatatttggcaccgagttggcagtagatgatgagtacacttttcagaactggaagtttcccatatacgctgtcgaagaaacagaattattatggaaatgtcctgatttaactacgaatacaataactgtcaagcctaaccatactatgaaatatatttataatctacacttcatgttggagaagatacgaatgtctaactttgaaggccctcgagtggtgattgttggtggttcgcaaaccgggaagacttccctatcgaggacactatgttcttacgctttgaaattcaacgcttaccaaccactatacatcaatcttgaccctcaacagcccatttttactgttcctggatgcatatctgccaccccaatatcagatatacttgatgcacaactacccacttggggtcagagtctcactagtggtgccacactactacataataagcagccaatggtgaaaaattttggcctggaaaggattaatgagaacaaagatctataccttgagtgtataagccagttaggtcaagtagtaggtcaaaggttacatttggatcctcaagtcaggagatcagggtgcattgtcgatacgccatcaatatcacaactggatgaaaatttggctgaactgcaccatatcattgagaaactcaatgttaacattatgctagtactatgttctgaaacggatcctctttgggaaaaagtaaaaaagacatttggtccagaattgggaaataataatatttttttcattcctaaattggatggtgtatccgcagttgatgatgtatacaaaagatccttgcagaggacatccataagagagtacttttacggctctcttgatacagccttaagtccttatgctattggtgttgattatgaggatttaactatttggaaacctagcaatgttttcgataacgaggtcggtagggtggaactgttccccgtcactataactccaagtaacctacagcacgctattatagccataacgttcgcagaaagaagggcagatcaggcaacagtaataaaatcgtctattttaggatttgctttgattacagaagttaatgaaaaaaggcgtaaattaagggttttactacctgtcccaggccgacttcccagcaaggcgatgattctaacttcatatagatatttagagtaa

SEQ ID NO: 78711 - DNA, 915 bp, Saccharomyces pastorianus
atgccattatttgatcttatttctccaaaagcgtttgttaagttagtggccagtgagaaggttcatagaatcgttccagttgatgcaacatggtacctacccagttggaagcttgataataaagtggatttcttgaccaaaccacgtataccaaactccattttctttgatattgatgcaatcagtgacaaaaaatcgccctatccacatatgttccctacaaagaaggtttttgacgacgctatgagtaatttaggagttcaaaaagatgatatattagtggtttacgatcgtgttggtaactttagctcccctagatgtgcttggacattaggagtgatgggacatcctaaggtgtacttactaaataatttcaaccagtacagagagtttaagtaccctctagattcctctaaggtggcagcgttttcaccctatccaaagagtcattatgagtcctcagaaagtttccaagacaaggagattgtagactatgaggaaatgttccaattggtaaagagtggggaactggctaagaaattcaatgctttcgatgcaaggtcgctcggtagattcgaaggtacagaaccagagcctcgttccgacattccatcggggcatattccaggtacccaaccattaccatatggaagtttacttgatccggagaccaaaacgtacccagaagctggggaggcgatacacgctactttggaaaaggcattgaaagattttcattgcactttggacccaagtaaaccaactatttgctcttgtggaactggcgtttcaggagtcattatcaagacagcattggagctagcaggagttcccaatgttagattatatgatggatcctggaccgagtgggtcttgaaatccgggcccgagtggattgctgaaaacagagattaa

SEQ ID NO: 78712 - DNA, 531 bp, Saccharomyces pastorianus
atgggccgtgatatatgcacattagacaatgtttacgctaacaatttgggcatgctaaccaaactagctcatgtgacagtaccaaacttatatcaagatgccttcttcagtgcattattcgctgaggatagcttagctgcaaaaaataaaaagccatcttcgaagaaggatgtacatttcacacagatggcttattacagtgaaataccagtgggtggtttggttgctaaattagttcctaaaaaacaaaacgaactatctctcaagggcattcaaatcgaatttttgggcgtgttgcctaattataggcacaaatcaatcggttcaaaattactgaagtttgcagaagacaaatgctcagaatgtcatcaacataacgtgtttgtctatttaccagcagtggatgatcttacaaagcaatggtttatagctcatggcttcgaacaagtgggcgaaactgtcaacaatttcattaaaggtgtaaatggcgacgaacaagatgctatcctattgaaaaaacacatttcttaa

SEQ ID NO: 78713 - DNA, 1992 bp, Saccharomyces pastorianus
atgcctacaaattacgagtatgatgaggctagtgagacgtggccgtccttcattttaacggggatcttgatggtcgtcgggcctatgacactgcttcaaatataccaaattttttttggggccaatgctgaagatgggaattcagggaagagtaaggagtttaatgaggaagttttcaagaacttgaatgaagaatacaccagtgatgaaatcaaacaatttagaaggaagtttgataaaaatagtaataagaagtccaaaatatggagcaggagaaagattataattattgtgggttggatcttagttgcaattcttctgcaaaggattaatagtaatgacgcgattaaagacgctgctacaaaattatttgatccttatgaaatccttggtatctctactagcgcttccgatagagacatcaaatctgcttatagaaaattatctgttaaatttcatccagataaattagcaaagggcctaacacctgatgagaaaagtgtgatggaagaaacttatgttcagattacgaaggcttacgaatcccttactgacgaattggttaggcaaaactatttgaaatacggtcatccagatggcccacaatctacttcacatggtatcgctctaccaagatttttggtagatggaagtgcatctccattattagtggtttgttatgttgcgttactaggtttaatcttaccatattttgttagtagatggtgggcaagaacacaatcgtataccaagaagggaatacataatgtgacggcttctaattttgttagcaacttagtcaattacaagccatctgaaattgtcaccacagatttgatcttacactggttatcatttgctcatgaatttaaacagttcttcccggatttgcaaccaacggattttgaaaaacttttgcaagatcatattaaccgcagagatagtggtaaacttaacaatgcgaaatttagaatagtggcaaaatgtcactctttgttgcacggcttattggatattgcttgtggattcagaaatttagatattgcattgggtgcaatcaatactttcaagtgtattgttcaggctgtaccattaacaccaaactgtcaaatccttcaattgccgaacgtagataaagagcactttattaccaaaaccggagatattcatacattaggtaaattgtttactttagaagatgccaagattggtgaggttcttggaataaaggatcaagcaaagttaaacgaaactttgagagttgcatcgcacattccaaatctaaagatcatcaaggcagacttccttgtcccaggtgagaaccaagtaacaccatcatctaccccatacatttctttgaaagtacttgttcgttctgctaaacagccattgataccaactagcttaattcctgaagaaaatttaacagaacctcaagattttgaatctcaaagagatccatttgctatgatgagtaaacagccactcgtcccatattcctttgcaccatttttccctacaaagagacgtgggagttggtgctgtctggtaagttctcaaaaagatggtaaaatacttcaaacgccaattatcattgaaaagctatcttacaagaacttgaacgatgacaaagatttctttgataagaggataaaaatggatttaaccaaacacgaaaaattcgatataaatgattgggaaatcgggaccataaaaattccattaggtcagcctgcacctgaaactgttggtgatttcttttttagagtaatcgttaaatccacagattatttcactacagatttggatattaccatgaatatgaaagttcgtgattcgcctgcagtggaacaagtagaggtgtattctgaggaggacgatgaatactctactgatgacgacgaaaccgaaagtgatgacgaaagtgatgctagcgattatactgatatcgatacggatacagaagctgaagatgatgaatcaccagaatag

SEQ ID NO: 78714 - DNA, 837 bp, Saccharomyces pastorianus
atgagagcaccaccgtcaccgagaaagtccaaatctggtcattttttttacctgtattttcgactgcgtcaactgttcagtggccggaaattaaagaggaggtggcatgtccacaaacttcacattcaccaatataatactcgctggaacttgagccccctctccgaaatacacattgaggatatgataaatgaaccgtctggactatgtccaggaagttccaaaaagaaaccactactgattgcaaggtttcccaagggttgccaagaatcaccaagggtatatgtactgcaaaggaacaatttgtctcgtttaaaattaagcaaaagaaaatatgccctaaggttctatcacaatgaactttttggcaataatttaaagagaaaagacggaagcatccacaaagttgaacaccaacagtgcgcagaaaccgttagaaagatcaagaaagtcacagcaaaccatgctgatgttaaaataatatttcacgataaaaatactataagaagtgacaaattagggggtagcagtaataagatgcagactaggcctagtgttcttgaagaggaagtagaagaggaagtctcttcggtatatatcagattttgtgacgaccattccctgagagttaaagattatcactctttgcacaggcattctaaaaaatcttctaaaaaaaaacaaaataatcaggagattggaaaatctaagttgcttgggaagctttttgaagaggaaacatcgcgtcaaaacaaaggtgtagagaagaaactagatacgattgtgatacagaaatttcaaaattatcctattgtctccttctctcgtgtcatttaa

SEQ ID NO: 78715 - DNA, 2421 bp, Saccharomyces pastorianus
atgaggagcagttatcaaccagtgtcaactacaaactttgaacatgaaaatgctatacctactgcgtcgtcgtcccataatctgttgatgagccagcgttttgatgattctcctcctagttctaacgacaacagtatagaaactaatataacgcctccacctgaaccaccttcttatgaatttgatatagaggaccctcacgatgatcttcacaaaagaacacatctacagagggtttcaattgggtttcaggaaaaaattttggaacccttaatggaaaacatcattcatccactcttacaaatatcaaaattcgttcaagacaaagctgactattacttaagtaaaatcggaaatccctttatacttcgaaggttcttttacatcattttcatgtcatttattgcatattatgtcttgtcaagtggctacttattcaacgaaaaggcatcaggatctaaagggatgttttctcaacacgatatactttttgaatatgccaaaaaatccgtggatttggcaaagtttgagagagatttggaatatattagtagcatgcctcatggatccggaacgaagggtgatgcagctatttctcgatacattcaggaatcttttgacaacaatgggttgaaattggttaaagaaatgggatactcagtttattctaattatccaggcaatgtatcaatttcatattatgataacaagaatgaaaagcacgatctagaactttctaaagaaaatttcaatccgttgagttctaacggaaaattatccaaagtgagtttgatttatggaggcaaaggtacaacatacgatttacaacatttaaaagattcgaaaacgatagaagatgggaaggactatgcgcttttactgcaatatgataaattagtgagtcagcaagtactaattgctgagaaattcggagctaaagctgtaatcttcatatctgaaccatatggtgagaatatagacgttgttcaatctaagcctgtaggattgccccaatattcgactggtgatgcatcaggattgaattgggatggttctcctgtagaagaaaaggatcataaattttggcgtcaaactcatattccaactatcccaatctccacgagacaaggaaaagagctactatcgcgtttatcttcaggaggagtaacggttgatgatggtaatagtgatcgtagtaaaatgggagacgtattaatcgatgtagatctgcaaactaatgttagggaaaagcattttattcctaatattgttggtaaaattgaagggagagaacaatcggacaaagctataataattgctgcatcgagaaactccatcaattttggaactacttatcccaattttggtacagctgcattattatctatagttcaattatttcaagaggtgaaatataagtttggttggaaacctttgagaaatatctatttcatctcattcggtggtaccgaatttaattatgctggatcttcggagctggttgagcaaaggataacgccattaaaagacgaaatttattctttgattgatattagtcaactgggtataccctttgccgaaaaatatgagaacggtaaaactaaaggagaattaagcgttgagacacatcccttattgaagaagtttttcaatagaaacgcgcatggaaactttgatatatctgtggataatgttcagcactatggtgactggactccatttctggcaaatggaattcctgtatctgtaatatcttctgattctacgagaaaccgtgacaccccaactgaaacatcggaggataaatttgaacgtgttgagaagattctggaagacgaacagaaccaacaatctgtcaaggatttgctagtatatcttttacatattagtatggaattgattgatgacccgctacttcattttgacataataagctatgttgaagatatcgatgaaagattgcaaaggttagagcaagcataccctgaaaaactaaatttcacatcaataatcaaaggtttgttattttggaagaaaatcggtagcgaatgggcgtcatggactcaaggttgggagaacatagtatggtcccatggggatggtatagagccctccttactttcaattaataggtggacatggaataaaaaattgactaatattggtagaagaacatgctctccggcgggtctacctaatagatcattttataagaacgttttgttcggaccaacattgatacaggaggacaaatctaaaaatggtggaaatgtagatttctggacatttccaggagtgatggatgcgatttacgatgatgactggaagagggctcaagaacaaattgaccttattggcaaagtactccatcagtctgctgcattgtttgtcgaggagactaatgacatcgggtataaataa

SEQ ID NO: 78716 - DNA, 486 bp, Saccharomyces pastorianus
atgagtaagaacaggtcatcgctacagtctggtccacttaatagcgagttattggaggagcaaaagcaagaaatatatgaggcgttttcattgttcgatatgaacaatgatgggttcctcgattaccacgagttgaaagtagcaatgaaggccctgggatttgagctacccaagagagaaatacttgacttaatagatgaatatgatagtgaggggcggcatttgatgaagtatgatgatttttatattgtaatgggggaaaaaatattgaagagagatccgttagatgaaataaaaagggcattccaattatttgatgacgaccatactgggaaaataagtattaaaaacttgaggcgtgtagctaaagaattaggagaaactttgacggatgaagagctgagagcgatgattgaagagtttgatttggatggtgatggcgagattaatgaaaacgaatttatagctatttgcaccgatagttaa

SEQ ID NO: 78717 - DNA, 654 bp, Saccharomyces pastorianus
atgtcatggaggtatgcgttaaaaaactacgttaccagcccagaaacggtaaacgatgatacagtcatatactttgatgataaagtgtccataattagagactcgtttcctaaatcagagtgccatttattgattctaccacgaactatgcagctgagtagaagtcatcctactaaagtgattgatgctaagtttaagaatgagtttgaatcatacgttaattctgcgattgaccacatctttaggcattttcaagaaaagttccgaataaagaagagtgatgatgacaaagacccctgctgggatgacatattaaaagacaaaaacaagtttgtaagaaattttgtacaagttgggatacacagcgtgccttcgatggccaacttacatatacacgtcatatccaaagatttccattcggtaagattgaagaacaaaaaacattataattcatttaatactggattcttcattagttgggacgatttaccattgaacggaaaaaaattgggcactgacaaggaaattgaaactacgtacctgaaagaacacgatttactttgctgctattgtcagcgaaattttagtaataaatttagcttattgaaaaagcatttagaactagagttcaatagccatttcgagcttaaataa

SEQ ID NO: 78718 - DNA, 1314 bp, Saccharomyces pastorianus
atgagtgaagaacaggaccctttattagcaggattgggggaaacgtccggcgacaatcacacccaacagtcacacgaacaacaaccagaacaaccacaggaaacggaagaacatcatgaagaggagccttctagagtggatcctgaacaggaggcccataacaaggccttgaatcaattcaagagaaagctgctagaacacagaaggtatgatgatcaattgaagcagcgccgtcaaaatatacgagatctagagaagttatatgacaagactgaaaacgacataaaagctttgcaaagtattggacaattgattggcgaagtcatgaaggaattatctgaagagaaatatatagtgaaggcctcttcgggcccacgttatattgtcggagttaggaattcggtagatcgctctaaattaaagaaaggggtgagagtcaccttagatatcaccactttgactataatgagaattttgcccagagagacagatccactggtgtataatatgaccagttttgaacaaggtgaaatcacttttgatggtattggtggtttgactgagcaaatcagagaattaagggaggttatagaattaccattgaagaacccagaaattttccagagggtcggtatcaaacctccaaagggtgtgctactatatggcccccctggtactggtaaaactttactagcgaaggcagttgctgctacgattggagccaacttcattttctctccagcgtctggtattgtggataaatacattggtgagtctgctcgtattattagagaaatgtttgcatatgcaaaggaacacgaaccttgcatcatttttatggatgaagtggatgctattggtggtagaagattcagtgaaggtacttcagcagaccgtgaaattcaacgtacgttgatggagttgttgacccagatggatggttttgataatcttggacagactaaaatcatcatggctacgaatagaccagatactttagatcctgctttgttgaggcccggtagactagacagaaaagttgaaattccattgccaaatgaggccggcagattagaaattttcaaaattcatactgcaaaagtcaaaaaaacaggggaatttgacttcgaggctgctgtaaaaatgagtgatggtttcaatggtgctgatattcgtaactgtgcaactgaagcaggttttttcgccataagagatgaccgtgatcacatcaaccctgatgatttaatgaaagccgtaagaaaagtagctgaagttaagaaattggaaggcactatagaataccaaaaattatga

SEQ ID NO: 78719 - DNA, 1737 bp, Saccharomyces pastorianus
atgtcaattcaggcttttgtcttttgcggtaaaggttccaatttggctcccttcacccagccagattttccattccaaacgcagaacaaagacagtacagctgccacgagcggtgacaaacttaatgagttggtcaatagcgccctcgattcaactgtcataaatgagttcatgcaacattcaacgcgcttgcccaaggctcttttgcccatcggtaatagacctatgattgaatacgtcttggattggtgtgatcaggcagatttcaaagaaatcaatgtggtcgcacccgttgacgaaatcgaattaattgaaagtggtctgacttcgtttttgtccctaagaaagcaacaatttgaactaatatacaaggctttgtcaaattccaaccacagtcatcacttgcaagatcctaagaaaattaatttcatcccttcgaaggcaaattctacaggtgagtccttgcaaaaagagcttttgcctagaatcaatggcgattttgtaatcttgccctgtgattttgtcacagatatacctccacaagtcttggtcgatcaatttaggaatagggatgataataacctagcaatgactatctactataagaactctttagatagtagtatcgataaaaagcaacagcaaaagcaaaaacaacagcaatttttcactgtttattcagaaaacgaagactcagagagacagccaatacttttggacgtttattctcaaagggacgtcacaaagacaaaatatctacagatcagatctcatttattatggaactatccaaatttaacagtatccactaagttactgaactcattcatctacttttgttcttttgaactttgccagttgttaaaattaggacctcaatcaatgtcaagacaagcttcattcaaagatccatttactggaaaccaacaacagcaaaaccctcctactactgatgatgatgaagatcgcaatcatgatgatgacgatgattacaaaccttcggctacatctatccagcccacctacttcaaaaaaaagaatgatcttatcttggacccaataaactgtaataaatcactgagtaaggtttttagagatttatctcgtcgttcgtggcaacattcgaaaccgagggaaccaataggtatttttattttaccaaacgaaaccttgttcatcagagccaataacttgaatgcttacatggacgctaatagatttgtactaaagataaaatcgcaaacgatgttcacgaaaaatatacaaattcaatctgccgctattggtgctgatgccatagtagatcccaaatgccaaatctctgctcatagtaatgtcaagatgtctgttctcggtactcagaccaatattggttccagatgtcgtgttgcagggtctctcttatttcctggagtccatcttggtgacgaagtaatcctggaaaattgtattattggacctatggcaaaaatcggttcaaagtgtaaactcagcaattgttatatcgaaggccattatgttgtggagcctaaaaataactttaaaggtgaaacactggccaacgtttatttggatgaagatgaggaggacgagttaatatatgatgatagtattattgctggagaaagtgaaatcgccgaagaaactgacagtgatgatagaagcgatgaagattctgatgatagtgaatataccgacgagtacgagtacgaagatgacggattatttgagcgttaa

SEQ ID NO: 78720 - DNA, 1044 bp, Saccharomyces pastorianus
atgcccttcgctcagattgttattggtccaccaggttcagggaagtcaacttattgcaacggctgctcacagttcttcaatgccatcggaagacattcccaggtagtgaatatggatcctgctaatgatgccttaccttacccatgcgctgtggatattcgtgattttataacattagaggagatcatgcaagagcaacagttaggccctaatggaggtttgatgtatgctgttgaatcattggataattctattgatttgttcattttacagatcaagtcacttgtagaagaagaaaaagcatatcttgtattcgactgtccgggccaagtggagctatttactcatcactcatctttgttcaacatctttaaaaaaatggaaaaggaattggacattaggttttgtgttgtaaatttgattgactgtttttacatgacatccccttcacaatatatttcgattttgttacttgcattgaggtctatgttaatgatggatctccctcacataaacgttttttctaagatagatatgctgaaatcatacggagaattaccctttagattagactattatacagaggtccaggatctggattatttggagccatatattgaaaaggaaggctctagtgtactgggaaagaaatatagcaagttaactgaaacaatcaaagagctagtctcagatttcaacttagtatcatttgaggttttgtccgtggatgacaaagaaagtatgataaatcttcaaggtgttatagataaagcaaatggctacatattcggcgcatccgaagttggtggtgataccgtgtgggctgaggcttcgcgagaaggtgcattaatagcgaattacgacattcaagacaggtggatagacaataaagagaagtatgataaagaagaagaagaaaaacgtacggcgttgttaaaagaacaagaattgcaaaataaagctgttgatgtgaatgaagaagatgagtgggaaaatgcgctgaaggagtgggaagagaaacaaggaatggattttgttaggtag

SEQ ID NO: 78721 - DNA, 408 bp, Saccharomyces pastorianus
atgtcagtaaattttttctctctaatcacctcaagttgggagcgtggcctcttcttgaaatcatgtaagaacaattctggaacagactctaaccgtttcttcagtttcagtgtacccccaaatcttttagacaacctgttaccaacgttgctggtacgtaaaaccttatcatcttcatcttcaaaatcttgtggtatcgatggaatatacttcaagtcatcagctgttaatgttagcgaagatggtctgactgcatcaacattcttttcaattttattgcccaaaaactttcttggcattactaagttattctgtaggatttttttgctatcctgccctcacaattataaatggttcattcatttaataaatccttttgaatatgaaaacttcatcaatatagagtag

SEQ ID NO: 78722 - DNA, 1293 bp, Saccharomyces pastorianus
atgccaagaaagtttttgggcaataaaattgaaaagaatgttgatgcagtcagaccatcttcgctaacattaacagctgatgacttgaagtatattccatcgataccacaagattttgaagatgaagatgataaggttttacgtaccagcaacgttggtaacaggttgtctaaaagatttgggggtacactgaaactgaagaaacggttagagtctgttccagaattgttcttacatgatttcaagaagaggccacgctcccaacttgaggtgattagagagaaaaaatttactgacatgcaagttcccaagggaccagtttgtcctcaaagcacgattctaccattacgagaaagaaagaaggtaaaatcactaccaattcaaagaaaaagtttacgtaggccgacgctgtcaaagcctgcagtagtacgatcttcagggcataagacacattcggatcatattattgataaagtgtttgtttctcgcccggccccaattgtaatgcctgtaaaagcccttactcctattaatccagtctccctaatccaaacacagacacaagattgctgtagaaaaaataagtatggcaaaagcggtagtgaaatattgtttgacgaaattctatcagcctatgaaaacgtttctacaagcaattctactgccctaaattcagaaattgacagaattatcgatatatgcgcttcaaaacaaatagctaaaaaaaatgaggcatttcaggtaccatatgtcgtctgccctgacgacacagagactttgttttcgtcaacaacaccaaagttgaaacctgtcaattctaacacattaaacgatgtcatttctagcccagaatacaccacgtctggatgcagtacatactctgaccaatcgaattcagatgaggaattgtccgaagtagaaagtatagtatggaacacgaataagaggacaatgagatcatccattgtgtctgaaagcactagtgaggaaggctattgcactgctgcggagactttgccctcaacagtatcagtggaagatctggatatacataacaagcttccaaaagttgcacaaacatcatcgtgcaatacgcttttgaataaactctctataagaaaattaaaaaaagtaattctcgatccgcctaaaataatgcatgtcatgacttttgacgatgacagtgatgatggagatgacaacgatgacgaggatagggctttgaatattcttcaaaaaaaaattgactgcattgaaatagcaagttgcagcagtagcatttacagcgaataa

SEQ ID NO: 78723 - DNA, 321 bp, Saccharomyces pastorianus
atggcacccacacaattggatataaaagtcaaggccttgaagaggctgactaaggaggaagggtactaccaacaagaactgaaagatcaggaagcacatgtggcaaaacttaaagaagacaagtcagttgacccatatgacttgaagaaacaggaggaggtccttgatgacacaaaaagattattacctactttatatgagaagattagagaatttaaagaggatttagaacaatttctaaaaacttaccagggtaccgaagatgtcagtgatgcaagatccgctattacgtctgcacaggaattactcgattctaaataa

SEQ ID NO: 78724 - DNA, 1272 bp, Saccharomyces pastorianus
atggattctcgagttgcactggtacgaaaatacatagcaccatcggtgataaaaagcgattctattcaattgcacggtttagtgaaggcaccactatttaaagcgttgaatagccgttacaaattaggttcactacagatagtacaggatgtcgattggaatgcgaagacaacaccatccgattctccagagcctctggccgctactctaaactctaatcgatccctaccaatgactaagttccccaagcaggagatcttggaacaggtaaaattggatactaaggttggcaaatggaggaaattcatgacaggttggtttagaattggattgtatcttttaaaaagctataaaacaggaattcagaacacgttaaaagtattctgggatactcgaaacgaagagcagaaattcagcataaaaaacggtgcattggctaacttagtacgggaaatagaaatgcatgaaatcaatacaagactatcgtcttcatcattgcctacaagttcttcagcaaaagccccattaaggccactttcaatcaataggaaaacactggtggaactgatcagacgagatcaaatctggaaattacctgtatttttcaccttagtattcatatttgaggaggtaagtgcattgatctttaccttttttccacgtgtctgtccgtacaattgtttaactcctggtggatacaagaagctttccaactcatatatcaagggaacaacaggcacacaaggtaactacggtctgggtcccttagagtttactaagcaaggtacaattaagtatgagccaccatatgcagttcctattgagaatttgtataattttctgacaagctttcctcaaagtatgatatcaaattggaaactgtacatttataaaaagttaaaattacagaagctactttgcaatgagatagaaaaaatttaccagtatctgtttatcgatgactggttgctgttgcagagtatactcaacactgatgttgagaaaactaaaatcgcgctaagtgatagagaattggttaactgtatacttgaaagaaaactttatcacatgggcgatgacttgaatgagatggttaatgacacgttagggaaagaaatcttactgaaaagactgtttctttattggacgttaagatataatgacactatatccttaaacggaaagcatacattcagtgagaaatggggtgtcaacaatatatcattgttaaatataattcacgaattggtagctacgaacgatattcaatag

SEQ ID NO: 78725 - DNA, 2292 bp, Saccharomyces pastorianus
atgcctaatctattgtcgagaaacccattccatggtcatcataatgaccatcatcatgaccgtgaaaattcgtctaataacccgccacagttgatcagaagttctaaatctttcttaaacttcattggtagaaaacaaagtaatgactcactaagaagcgagaaatctacagattccatgaaatctaccacaaccactacaaattatactacaacaaaccttaataacaacacccatagccattctaatgcaaccagtatctcaacaaacaactacaataataactatgaaacaaaccaccaccataatatttctcatgggctccatgactatacttctcccgcctccccaaaacaaacccactccatggcagaattgaaaaggtttttcagaccctctgtaaataaaaaactatctatgtctcaacttcgttccaagaaacatagcacccattcccccccaccttcaaaatcaacttctacagttaatttaaataatcactatcgtgcccagcatcctcatggctttacagaccactatgctcatacccagtctgctataccgccaagtaccgattctatcctatctttgtccaataatattaatatatatcacgatgattgtattctggctcaaaaatacgggaaattgggtaagttattgggttccggtgccggtgggtcagttaaagttcttgtgagaccaactgatggtgctacttttgccgtcaaagaattcagaccaaggaaaccgaatgagagtgtgaaagaatatgccaagaagtgcaccgcagaattttgtattggttcgactttacatcacccaaatgttatcgaaactgttgacgttttctctgattctaaacaaaataaatactatgaagtcatggagtactgtccgattgatttttttgctgttgttatgacaggtaagatgtctcgtggcgagatcaactgttgcttgaaacaattgactgaaggtgttaaatatttacattctatgggattggcacatagagatttgaaattggataattgtgtcatgacttcccagggtattttgaaagtaattgattttggtagtgctgttgtgttcagatatccttttgaagatggcgtaacgatggctcatggaatcgtgggtagtgacccttacttagcgccggaagtgattacctccaccaaatcttatgatcctcagtgcgtcgatatatggtctattgggatcatatactgttgtatgatgcttaaaaggtttccatggaaagcccctagagattctgacgataattttagattatattgtatgccggatgatatagaacacgactatgttgaatctgccaggcatcacgaagagttactgaaggaaagaaaagaaaagggtcaaaggtttttaaatcacagtgactgttccgccatcaatcagcaacaaccagctcatgaatcaaacttgaaaacagttcaaaatcaagttccaaatactccagcatctatacagggtaaaagcgataacaaaccagacattgtggaagaagaaaccgaagaaaataaagaagatgatagcaataatgataaagaaagcacgccagataatgacaaggaaagtaccatcgatattaaaataagcaaaaatgagaataaaagcacggtagttacagctaacccaaagaaagtagatgccgatgccgacgctgattgcgatgctaatggtgactctaacggcagagtggattgcaaggctaacagtgactgcaatgacaaaacggattgtaatgccaatggcaacaacaaaccggattgtaatgctaacaatgactgcagtaatgaatcggattgtaacgctaaagttgataccaacgtcaacactgctgccaacgctaaccctgatatggttccccaaaacaatccactacaacagcaacaacaacaacaacaacaacaacaacaacaacaccatcatcaccagcatcaaaatcaagacaaagcccatagtatcgcttccgataataaatcgagtcaacagcacagaggacctcaccataaaaaaattattcacggcccataccgtctattacgtctactaccacatgcttcaagacctatcatgtcccgtatactgcaagtagatccaaagaaaagagcaaccttagatgatatttttaatgatgaatggtttgccgccattgctgcctgtaccatggattcaaaaaataaagttattagagcgcctggccatcaccatacattggttagggaggaaaatgctcacttagagacctacaaggtttaa

SEQ ID NO: 78726 - DNA, 399 bp, Saccharomyces pastorianus
atggtttttgttttccccttcccatttttttcttatggtttttccagttttctagaagccggaaaaaaggcaagctacaaaatgtactacgcggagccagaattaaaaaccacgcggacgggacgggccgtggcttgtgacgccggatccccgcgtataatccgtgtcacgctaaaggacaaaatcggtttatccgagcggtttacgggaagggtcttttgctatctcgcagtagcgtgtgcctggttatcccaatactaccaccacacctgtgctttttttatcttgtacgtgcatgtatgcgtatgttttctttttttccgttggtgcttattcgctaccgtctcgttgatccatgaatcacaaacacaagccggttctgcttactatacaaaatag

SEQ ID NO: 78727 - DNA, 1485 bp, Saccharomyces pastorianus
atgactaactggcagcaacagcttcctttaacagatacacagaaaaatgaactcgataaaagtgtcctccgatatttgaattggaattacaaacaaactgtacgacatgagcatgctcaagattacgaaagtgttcgacatgcaattgtaactctatcaggttttctgttgcaagaatcagtggaccggcaagaattcatcagtaacaatgacaccagtaacgaaagtatggtagacattgatgaattactgctaccgaagaagtggaactcaattgttagactacaaaaaaaaatcattgaattggagcagaatacagagacccttgtatctcagattaaagatttgaacactcaagtgtcagaactagcacaattcaaacctaccaccagtaacggcaccagcgcacataatgttttgaaatggataccgagaaatctaccaagctgtttaattaatgttgaatcatctgtcacttccgtcaaactacatcccaatttgcctatagtgtttgtggccacagatcatggcaaattatacgcatttgatttatttaactacaccatccctctggcatccttgcaaagtcataccaaggcaattacctccatggatgttttatttaccaattttacgaactccagcaagaagaactatttggtggtcgttaccgcgtctaaagatttgcagattcatgttttcaagtgggtctccgaggaatgcaagttccaacaaattaggtctttattgggccatgagcatattgtctctgcggtaaaaatctggcagaaaaataatgatgtccatattgcgtcctgttccagagatcaaactgttaaaatttgggacttccacaatggttggtcgttgaaaacatttcagcctcattcccaatgggtacgttccatagacgttctaggcgattacatcatctctggttcacatgacactacattaaggttaacacattggccatcaggtaatggtcttagtgttggcacgggtcatgaatttcccatagagaaagttaaatttattcatttcatcgaagactctccggagataaggtttagaacaccatcaacggatcgatataagaattgggggatgcaatattgtgtctcagcgtcaagagatagaacgataaaaatctgggagatacctctacctacgttaatggcccatagagcacccataccgaatcctacagattcaaatttcagatgtgttcttacgttgaaggggcatctttcgtgggttagagatattagtattcgaggccaatacttgttttcttgtgctgatgataaatctgtcagatgttgggatctgaacacggggcagtgcttacacgtttgggaaaagttgcatacaggatttgtcaactgtttagacctggatgtggatttcgattctaacgttaccccaaggcaaatgatggtcactggtggattggattgcaagtctaacgttttcatgagataa

SEQ ID NO: 78728 - DNA, 2523 bp, Saccharomyces pastorianus
atggcagagaaggaggaagcgatttttcgctctgctgaaatggctttagtccaattctatattcctcaagaaatttcaagagactctgcttatactttaggtcaattgggtcttgttcaattccgtgacttgaactctaaggtgcgtgcgtttcaaagaactttcgtgaacgaaattagaagactggataatgtagaaagacagtatcgttacttttattctcttttgaagaaacacgatattaagctctacgaaggagacacggacaaatatttggacggctcaggtgaattgtacgttccaccaagcggttcagtgatagatgattatgtccggaacgcttcatatttggaagaaagattgattcaaatggaggatgcaaccgatcaaattgaagtccagaaaaatgacttggaacagtatcgctttattttgcagtcaggtgatgaatttttcttgaagggtgataataccgacagcacttcctatatggatgaagacatgatcgacgctaatggggaaaacattgctgctgctatcggtgcttctgtaaactatgtcactggtgtcattgctagagacaaagttgccaccttagaacaaattctttggagagtattaagaggtaaccttttcttcaaaactgttgaaattgaacaacctgtttatgatgtcaaaaccagggagtataaacataaaaatgcttttatcgtattttctcacggtgatctgattattaaaagaatcagaaagattgctgaatcattggatgccaatctatacgatgttgactcttccaacgagggtagatcacaacaattggccaaggtcaacaagaatttgagtgatttgtacacagttttgaaaaccacttctaccactttagaaagtgaattatatgccattgccaaagaattggactcttggttccaagatgttacccgtgaaaaggcgatttttgaaattttgaacaagtctaactatgataccaatagaaagattttgattgctgaaggttggataccaagagacgaattggctactttgcaagctcgtcttggtgaaatgatcgcaagattgggtattgatgtcccatccattatccaagtcctggatacaaaccacactccacctaccttccacagaactaacaagtttactgctggtttccaaagtatctgtgactgttacggtattgctcagtacagagaaatcaatgctggtttacccacaattgtcactttccctttcatgtttgccatcatgtttggtgatatgggtcacgggttcttaatgaccttagccgcattgtctcttgtattgaatgaaaagaaaatcaacaaaatgaaaagaggcgaaatttttgatatggccttcactggtagatacattattttgttgatgggtgtcttttccatgtacacaggtttcctttacaacgatatcttctctaaaactatgaccattttcaagtctggttggaaatggcctgatcattggaaaaaaggtgagagtattactgctacatcggtgggcacataccctatcggtttagattgggcttggcatggaactgaaaatgctttgttattttctaattcttacaaaatgaaactatcaattttaatggggttcatccacatgacctattcctatttcttttcgttggctaaccacctatactttaactctatgattgatatcatcggtaactttattcctggtttgctatttatgcaaggtatctttggttatctttccgtttgtattgtttacaaatgggctgttgattgggttaaggacggaaagcctgctccaggtttgttaaatatgttgatcaacatgtttttatcaccaggaactattgacgatgaattataccctcatcaagcaaaggtccaagtgtttttgttgttgatggccttggtttgtattccttggttgctattggtgaagccattacatttcaaattcactcataaaaagaaatctcacgaaccactaccatcgactgaagcagatgctagttcagaagatttggaagcgcaacaattaatttccgcgatggacgccgatgacgctgaagaagaagaagttggttctggatctcatggtgaagactttggtgatattatgattcatcaagttattcatacaattgaattctgtttgaattgtgtttcgcacactgcatcctatttacgtttatgggccttatcattggcacatgctcaattgtctagtgttttatggacaatgacaattcaaattgcctttggatttagaggatttgtgggtgtgtttatgacggttgcactttttgccatgtggttcgcactaacatgtgcagttcttgttttgatggaaggtacatctgccatgcttcattccttacgtttgcactgggttgaatctatgtccaagtttttcgtgggtgaaggtttaccatacgaaccattcgcatttgagtataaagacatggaagtcgctgttgctagtgcaagctctgccgcttcaagctaa

SEQ ID NO: 78729 - DNA, 984 bp, Saccharomyces pastorianus
atggcatcatcagtcccagggcccatcgatttgcccgaatcccgctatgacttatccacgtactggggtagaatccgccattgcgcagagatttccgaccccactatgttgttaactactgagaaggacctggcgcatgctagagaaatcatcagtgcgtatcgtcacggtgaactaaaagagactactccggagttctggcgagccaagaaacaactggactccaccgtgcatccggacacagggaagacagttcttttgcccttccgtatgtcttccaacgtgctatcaaacctagtcgttactgtaggtatgctgacgcctggtttgggtacggcagggactgtattttggcaatgggcaaatcaatcgctaaacgtcgccgttaattccgctaacgcaaacaaatctcatcctatgtccacgtcccaattgctcaccaattacgctgccgctgtaactgcgtcgtgtggtgttgcgttaggtctaaataacctagttcccaggttgaaaaacatttctccacattcaaagttgatcttgggccgtttggtgccatttgccgccgtggtcagtgccggtattgtcaacgtcttcctaatgagaggcaacgaaattagaaagggtatttctgtgtttgactctaacggtgacgaagtcggaaagtccaagaaggctgccttcatggcagttggtgaaactgcattaagtagagtgattaacgccactccaactatggtcatcccacctttgattttggttagactacaacgcggtgtcctcaaaggtaagtctctcggtgtgcaaactttggccaatttggggttgatctcagtcacaatgttctcagctttgccatttgcactcggtatcttccctcaaagacaagcaatccatttaaataaactagaacctgaactacatggcaagaaggataaggatgggaagccaattgaaaaggtctattttaacagaggtatttag

SEQ ID NO: 78730 - DNA, 1383 bp, Saccharomyces pastorianus
atgacagaagataaatcgcaggttaaaatcaggtttttcacgcgtgagaaagatgaatcactacatgtacaagatactccaatgtacgcccccatctcattaaagagatatgggttgtccgaaattgtcaatcacttgttgggctcggaaaagcctgttcctttcgatttcttgattgaaggtgaattgttgcgtacttcattgcacgactatttaaccaagaaaggtttatcgagcgaagcctcgctgaatgtagaatataccagggcagttcttccaccatcctatttgaatagtttcagcaatgaggactgggttagctcattggatgtcggcgacggttccaagcatattattagtggttcttacgatggtatagttcgcacctgggatttatcaggtaatgtgcaaaagcagtacagtggtcattctggcccaatccgtgcagtaaaatacatttccaatacaaggctagtttcggctggtaacgaccgtactttgagattatggaaaaccaaaaacgatgatttgaaattaacttcacaacaacaggcacaggaagacgatgatgacgaagtaaacatagaggacggtaagacactggctatcttggaaggtcataaggcaccagtagtctctattgatgtttcagacaactcgagaatattatctgcatcatacgacagttctattgggttctggtctactatttataaggaaatgacagttgttgatccattagaagatataaacaatccaaacaataaaatatccactgctgctagaaaaaggagaaaattgacaatgaaagatggtaccattagaagacgtgcccctctgtctctgttagaatcccatacagctcctgttgagcaagtgatcttcgattctacagataataccgttggttattcagtatcacaagatcataccatcaagacatgggatttggtcaccgcgagatgtatagatacaagaacaacatcgtactcgttgctttccattgctcaattgtcgactttgaacttgttagcatgtgggtccagcgccagacacatcacattgcatgacccacgtgtgggagcgtcttctaaagttactcagcaacaactaattggtcataagaacttcgtttcctctctggacacttgtcccgagaatgagtatatattatgctcgggttctcacgatggtaccgtgaaggtatgggacgtcaggtctacttctccgatgtacaccataacaagagaagacaaatcggtccaaaagggcgtcaatgacaaagtttttgctgtcaaatgggctgaaaaagtgggtattatcagcgctggtcaagacaaaaagattcaaataaataaaggagacaacattttcaaaaactga

SEQ ID NO: 78731 - DNA, 1980 bp, Saccharomyces pastorianus
atgccttcttctttgacaaaaaccgaatctaactcagatcctcgaacaaacatacagcaggtaccaaaagccttggacaaaaatgtaactaatagcggcaacttggattcgacttcttcttcgacagggtcaataacagaggacgaaaaaagatcagaatcgaatgcagattccaatagcatgacagggggcgagccaattgacccaagagatctcgattgggacgggcccgatgacccagacaatccgcataattggtcctctttgaagaaatggtatactactatgacttcagcttttctttgtttggtcgtcacaatgggtagttccctatatgtttcttccgtaccagaattggtagaaagatatcacgttagtcagactttggcgcttgctggtttaactttctatcttctgggtttatcgactgtcatcggcgctccattaagtgaagtgtttggtcgtaagcctgtctatttattttccctacctgtgtcaatgcttttcaccatgggtgttgggttatccaatggccacatgagaataattctacccctaaggtttttatcaggtgtctttgcatcccccgccttatccgttggatcaggtaccatcctggatatctttgacgtggaccaggtctccgtcgcaatgacatactttgttctatctccattcttagggcctgttttatctcctattatggcaggatttgctactgaagccaaaggctggcgttggtctgaatggatccaattgattgcgggcggtctaatcttgccatttattgcgctcatgccagagacccataaaggtattattttaagaaagcgtgccaagaagagaaatatagccttgaagaagttcagcagggaagctcagaaagaatttttaaaaaccactgtcactattacaatcttaaggcctttaaaaatgcttgtcgttgaacctattgtatttgttttcagtgtttatgtcgctttcatcttcgccattttatttggatttttcgaagcatacgctgtcatttatcgtggtgtttaccacatgtctatggggatatctggcttgccatttattggtattggtgtcgggttatggataggtgctttcttttacctttacatcgacagaaaatatctcttccctaaaccaccagctggcactcaaccactcaccgaaaaagagagaacttctaaaaggactaccccttacagaggtgcaagagacactgaaacaggtgagttgctacccgttgttccagaaaaatttttaattgcctgtaaatttggttctgtagctttgcctatcggcctgttttggcaagcctggactgctagatcagatgtccactggatggctcctgtggctgccggtgtgccatttggttttggtttaattttgatttttttcagcgttttaatgtacttctctacatgctatccgccattaactatggcatcctgtttggctgccaataatctattaagatacgttatgagtagtgtattcccattgtttaccatccaaatgtacacaaagatgaaaatcaaatgggcaagcactttatttgcattagtttgcgttgtgatgattccaattccatgggtttttgaaaaatgggggagcaaattaagacacaagtcacaattcggttatgccgccatggaaaaggaggctgagactgaaggtgatatagatgacgtaaatgctgtcgatggtgaattgaatctaacaaggatgaccacgttaaggaccatggaaacagacccttcgactagagaaaaaccaagtgaaaggctatctctgcgcaggacccatacgcagcccgttcctgcctcgtttgatcgcgaggacgggcaacatgcgcaaaatcgtaatgaacccatttccaatagtttatactcagctatcaaggataatgaagacggttattcgtatacggaaatggccaccgatgcttccgccagaatggtttga

SEQ ID NO: 78732 - DNA, 486 bp, Saccharomyces pastorianus
atgatcaagtatactatcgatgagctttttcaactgaagccaagtgtaactttggaagttaatttcgatgcggtggaatttagagccatcattgaaaaagttaagcaattgcaacacttgaaagaggaagagtttaacagtcatcatgttggtcatttcggtcgtagaagatcttcccaccatcatggtagaccaaagattaagcacaacaagcctaaggttacaaccgattcagatggttggtgcacatttgaagccaagaagaagggtagtggagaagatgatgaagaagaaacagaaaccacaccaacttctactgtgccagttgctaccattgcccaagaaactttaaaagtcaagccaaataacaaaaatatttcttccaacagacctgctgataccagagatattgttgcggacaagccaattcttggtttcaacgcatttgctgctttggaaagtgaagacgaagacgacgaagcataa

SEQ ID NO: 78733 - DNA, 309 bp, Saccharomyces pastorianus
atgacttatgcttcgtcgtcttcgtcttcactttccaaagcagcaaatgcgttgaaaccaagaattggcttgtccgcaacaatatctctggtatcagcaggtctgttggaagaaatatttttgttatttggcttgacttttaaagtttcttgggcaatggtagcaactggcacagtagaagttggtgtggtttctgtttcttcttcatcatcttctccactacccttcttcttggcttcaaatgtgcaccaaccatctgaatcggttgtaaccttaggcttgttgtgcttaatctttggtctaccatga

SEQ ID NO: 78734 - DNA, 828 bp, Saccharomyces pastorianus
atgtctagtcgtaaaaaagtcagagtattactgctcaagaataaaactgtccccattgataaatatgaattggagtgtaggagtaaggcgtttgaacccatattcgtaccgcttattaaacatacacatgtaattcaagattttagaaatgttttgaataccatcccaaactatttgaatactatcaattacattattattacctctcaaaggactgtagagtcattgaatgaagcgatcattcccacattgacaagtgaacaaaaagctgcattgctcagtaaaacagtttatactgtaggccctgctactgctaacttcatcagaagatcaggtttcattaatgttaaaggtggagaagacgctggtaatggttcaatccttgctgatataattattgatgacttgagtacggatattaaggcatgcccaccaagtgaactattatttctcgtgggtgaaattagaagagatatcatcccaaagaaactccatagcaagggaataaaagtaagagaagtggttacttataaaactgaagaattaagcgacggttttaaaagattcatacacgccatgaaagaatgcgatgaggatgaagtattctcggactgggtggtagttttcagtccccagggaacgaaagaaattactcagtatttgggtgacagtaaccgcctaccaggttcccatctacgggttgcgtccatcggacctaccactaaaaaatatctggatgataatgatgtaacctctgatgtggtcagtccaaaaccggaccccaagtcgctattagatgctattgaattataccagcgccataaataa

SEQ ID NO: 78735 - DNA, 801 bp, Saccharomyces pastorianus
atgagtgaaaagaagaaagttctaatgctacatggttttgtccaatccgataagatattttctgcgaagactggaggattacgaaagaatttgaagaagttaggttacgatttatactatccttgcgccccacattcaattgataaaaaagcgttattccaatcagagtcagaaaagggtagagatgctgcgaaggaattcaacacttcagcgactagtgatgaagtatacggatggttctttagaaatcccgaatctttcaattcctttcaaatagatcaaaaggtgtttaactatttacgtaactacgtgctagaaaatggaccatttgatggtgtcattggatttagccaaggtgcaggtcttgggggctacttagtaactgactttaacagaatattaaatcttactgatgaacaacagcccgctttgaaattttttatttcatttagtggattcaaattagaagatcaatcctaccagaaagaatatcataggattatccaggtaccctctctacatgtaaggggggagttagatgaggttgtagcagaatctagaataatggcattgtacgagtcatggcccgataataaaaggacattgttggttcatcctggagcccattttgtcccaaactcgaaaccattcgtatcccaagtttgcaattggatccaaggaattactagcaaagagggtcaagagcataatacccaacctgaagtagatcggaaacaatttgacaaacctcaattggaagatgatttgttagatatgatcgattccttgggtaaattgtaa

SEQ ID NO: 78736 - DNA, 861 bp, Saccharomyces pastorianus
atgcagaatgaaccaatgtttcaggtccaggtggacgaatctgaagacagtgaatggaacgatattttaagagcgaagggtgtaataccagaacgtgcaccttcgcccactgcaaagttagaagaagcattagaagaagcaattgccaagcagcatgaaaatagactagaagataaagacttgtcggatttggaagaactagaagacgatgaagatgaagatttcttggaagcttacaagatcaaaagattaaatgaaatccgcaaattacaggaacgttccaaatttggagaagttttccacattaacaaacctgaatacaacaaagaggttactttggccagtcagggaaagaaatatgaaggtacacaaaccaatgacaatggtgaagaggatgagggtggtgtctacgtattcgttcatctctcgcttcaaagtaaactacaaagcagagttctgtctcatcttttccaatctgctgcatgcaaattcagagaaataaaatttgtagaaatacctgccaatagagccattgaaaactatcccgaatccaattgcccgacattaattgtatattaccgaggtgaggtaatcaaaaacatgataacactactagaactgggtggtaataattccaaaatggaagactttgaagattttatggtaaaagttggcgctgttgcggaaggagacaacagactgataatgaaccgagacgatgaagaatccagggaagagagaaaattgcattacggtgaaaaaaaatcgatcaggtcaggtattagaggaaaatttaatgtcggcataggtggaaatgatgatggcaacattaatgatgatgatgatggattttttgactaa

SEQ ID NO: 78737 - DNA, 321 bp, Saccharomyces pastorianus
atgcttcttctaactttgcagtgggcgaaggtgcacgttctggtattacacccttcgctcttaaaatatcgttccattcactgtcttcagattcgtccacctggacctgaaacattggttcattctgcattatgtctgctgaatatgcctttcttctcagtgatgtttactcgaaggcgttatcttgtactgcagatttcttcaggtcgatcatataaccttttctttttttcctctagcgggatttcctcttttttcagtaattttttttccagcgatattaatacaatgggaaaatcaggtcgtcacaatattacttaa

SEQ ID NO: 78738 - DNA, 732 bp, Saccharomyces pastorianus
atgcaacaaacaaaatttggcaagatgtatttggaccacgattcggtagttgagtactcagaagatgaaattgtcgaagccgatcgtattacattgggctataaaaagagattgtcaatgattgaaaatcaaatgcaacatcttttggaggattttactttggacgttcagcagattgaatccattcttgccgacttgcagaagtactacgacgcgtttctacaacttttacagaaaaggaacaaatcattacaatgtaagaggtccactcaccagccggtcccatccccaatgaatagccacacatcaacaaatgcaaaggttaatttgagcggaaagcttatgaagtttcagctaaatagtgtacaaaagttcgacgaagaaaatatactaaggattctgcaaaataaaagagaattcgaacattatttccaaattgataaaggtaagaagcaaaaggtgctattacttgccgtatatcaatgtctcaatgggccaacacgtttgcataaagtgcttaatattgagggaattatacataataatagtatcagaactatactgggcaaacaagtgtccagttctaagtggacagtgtttctgtacgatgtaaaactagttttattggcgcatagacaagatgttccgaacttagaaactagcaagatgatcgtcagatatggtgatttatttccctgtgcattgtacttcaaagatcatacagcatactaa

SEQ ID NO: 78739 - DNA, 420 bp, Saccharomyces pastorianus
atgtggaaggccgtgatgaatgcttggaatggaaccgagagtcaaagtaagaatgtttcaaatattcaatcttacagttttgaagacatgaaaagaatcgttggaaagcatgatcctaatgtggttttggtagatgttagagaaccatctgagtactcgattgttcatattcctgcttccatcaatgtgccatatagatcgcaccccgacgcgtttgccttagatcctttagaatttgagaaacagattggcatcccaaaacctgacagtgccaaggagctaatattttattgtgcttctggcaaacgcgggggagaagctcaaaaagtcgcctcctcacatggatattcaaacacctcactatatcctggctctatgaatgattgggtttctcatgggggtgataaacttgacttatag

SEQ ID NO: 78740 - DNA, 450 bp, Saccharomyces pastorianus
atgttcaagcatagtacaggtattctctcgaggacagtttctgcaagatcgcctacattggtcctgagaacatttacaacgaaggctccaaagatctatacttttgaccaggtcaggaacctagtcgaacaccccaatgataaaaaactattggtggatgtaagggaacccaaggaagtaaaggattaccagatgccaactacaataaatattccggtgaatagtgcccctggcgctcttggattgcccgaaaaggagtttcacaaagttttccaatttgctaaaccacctcacgataaagaattgatttttctttgtgcgaaaggagtaagagccaaaactgccgaagagttggctcgatcttatgggtacgaaaacactggtatctatcctggttctattactgagtggttagctaaaggtggtgctgacgttaagcccaaaaaataa

SEQ ID NO: 78741 - DNA, 903 bp, Saccharomyces pastorianus
atgtcgtattactttaaaaatctgaagccagacttgaactccgacgtagaagaagatgacggaaacttattggagagcataatggcgaacaaaagtaagcgagaaattgacgaacaagaatcaagtgacgatgagttgaaaaccttgtcttttggttctttgaagaaggctgaaacggtaatagatgaagaagatttcaaagatacgaaacccgttcacaaaaaaccgatcacaactacatacagagaagaaagttttgatgaagatgaggacagtgaggaccaatcagacgaggatgctggattctttgaagaagatagtgaggatgaaactcatcatggtcagaaagtaccaaaaaagaagagcaaacacgctccagtagaacaatcatccaagaaaagggtaccacgagtccgaaatatccctgggctggaaataccgaggaataaaaagtctaacctctatcaggacatcagatttgataagtccaccggtaaagcccttgatagttctatcataagaaaacgttaccagttcttggacgaatatagagaaaaagaaattgatgaactgcagaaactgttacaagatagaaaatttctatcaaaaatagaccagggagaacgtgaagaaatggaacaaagactgaaaagtatgaaatcgagattgcaatcaatgaaaaacaaagatctcgagcgtgaaattctcaaggaatacgaaaatgatatgaataaaaacaataatacgagataccatttgaaaaagtctgagaaacgtaaagtggtgcaaaagtggaaatttgatcacatgaaggccaagcaacgtgaaaaggtcatggaaaggaaaaggaagaagagattgggtaaagagtttaaacaatttgaatttcataatcgtaggtag

SEQ ID NO: 78742 - DNA, 957 bp, Saccharomyces pastorianus
atgttatttcttaatattattaagctccttttgggactttttattatgaatgaagtaaaggcgcaaaacttttacgattccgatcctcatatatcagagttaacgccaaaaagcttcgataaagcgatccataacacaaattacacatcattagtggaattttatgctccgtggtgcggccattgtaagaagctctctagtacgttccgcaaggcagcaaaaagattggatggtgtagtccaagttgctgctgtaaactgtgaccttaacaagaataaggctttgtgtgctaaatacgacgtaaacggatttcccacgttaatggtatttaggcccccaaaaattgacctatctaagccaatagataacgccaaaaaaagtttcagcgctcatgccaatgaagtgtactcaggtgcaagaactctcgcgcctattgttgatttttctctttcaagaataaggtcatatgtcaaaaagtttgtccgtatagatacacttggctctttacttagaaagtcacccaaactttccgtggtgttattttccaaacaagacaaaatttcaccggtttataaaagcattgcccttgattggttaggaaagttcgatttttattcaatttcaaataaaaaactcaagcaactaaccgatatgaacccaacatatgaaaaaactcctgagattttcaaatatttgcagaaggtcattcctgaacagcgacagagcgataaaagtaagcttgtcgtttttgatgcagacaaagataaattttgggagtatgaagggaactcaatcaacaaaaatgacatttccaaatttctgcgggacacttttagtattacccccaatgagggtccttttagtagacgctctgaatatattgcttacttaaaaactggcaagaagccaattaaaaagaaccattcctcctcaggaaacaagcacgacgaattgtag

SEQ ID NO: 78743 - DNA, 756 bp, Saccharomyces pastorianus
atggctttaaggctatttcgaaaatccagtttttttgcaaagatatcaatggaaggccctaaaggttcatcgccatttgcgttttacgcattttatcaactttattcgcacttgaatccggggaaatcgagcagcctttctttagaagatattagaagaaggctataccccgactttaaaatagattacaatgagaaaacttcgttgttcataacttggaagaaaaagtctaataaacatcacacaatagacactaacgaagagaattatatacttagaggatgtatcggtacatttgctaagatgccgattgcacatggtattgagaaatattccttgattgctgctttagaggataggagattttctccgatccagaaaagggaattggtggacctgaaatgcagttgcaacatcttaggcaacttcaaaactatttttcgaggtggtggtaatccaaatggggacattttcgattgggaactcggaaagcacggtattgaactgtattttaagcatcccaaaacaggcaccacatgtagcgcaacctttttacctgatgttatgcctgagcaacattggaataaagaagatacctttgccaatttaatcgagaaggcgggttactggggcaatattagtgaagtaatggataattttgaaacttatttcattgaagtaataaggtacgagggcaaaaaaagttccataacttatgaggaatttaacaaacagttaaaagatatagaggcttag

SEQ ID NO: 78744 - DNA, 930 bp, Saccharomyces pastorianus
atgcctcttcaactttttggcagggatcagatcgttgtacattatgataacggcaacatgagtaacgatgaccagaatcaccaaagtgttctcggatcttggacaagaagtgcagcagcagcattaagaacgttaatgaacaagcgaatacaacgtataacacttacgcactggttgctgttagtcatatgggttactagcctatggaaatttaccagtcattatagacagctgtatgctaattctgctgtttttgcaactttatgcacgaacattcttttatttgggatatctgacatactagcacaaagtatagcctgcttttattcatatcacgtggaccctataccgcaaatacttaacgatacctttcatcatgttcagaacaaccgtgatgtagaaaatggaggaggttatgaaagtgatgagctatctatcttcaatgattttacctcggaacatagctcctacacggataacgacgactatcctgaacttgataggccattagctactttcaaaacggacacatttgacttcttcaggtgggggtgttttatgttctggggattttttatatcatttttccaggctccttggtacaagttcttgaatttcttttacactgaagatccgacagtggtacaggtttttgaaagggttctttcggatcagctcctttattcgccaatctctctctattgtttctttatgttctcaaactatgtgatggaaggtggagataaggacacccttggcaagaaaatccaaaggctatatatatctacgcttggctgtaactatctggtgtggccaatggtacaattcattaatttccttataatgcctagagatttccaagcaccttttagctcttcagttggagtggtatggaattgcttcctttcgatgagaaatgcgtctaaatag

SEQ ID NO: 78745 - DNA, 612 bp, Saccharomyces pastorianus
atgtcagcagaagattacaagaacttaccagtcaccgttgaaaagcctatcccagtggtatacgatttgggtaacttggcagcattcgatagtaatgtcttggataaaaacgatttagattcttcgaatgctaggcgtgaagaaaagataaagagtcttactcgtgataatgttcagttactaatcaatcaactattatcactacctatgaaaacaacaacggagtctgtaggtggcaccggcggtcaaagttccgtgatgaccttgttgcagcttcctgaccctaccactgacttaccaagagaaaagccactgccaaaggctaaggctatgaccaaatgggagaagtttgcagctaagaagggtattaaaccaaaggaaagggcaggaaagatgatttatgatgaggcatccggtgaatgggttccaaagtggggctacaagggcgcaaataagaagttagatgatcaatggttggtggaagttgatgataaagtaaaaggcactgacaatgaattgatcgatccaagaactttgaatagggcagaaagaaaacgtttagtcaagaagaacgaaaaacaacaaaggagaaatatgaagaatgccttatga

SEQ ID NO: 78746 - DNA, 579 bp, Saccharomyces pastorianus
atgctattgtttcctggcttgaagcctgttcttaatgcttccactgtcattgtaaatcctgtacgagctgtttttccaggattagtactttcaaccaaaagatccttttatagcattaatcgtttaaatgctgaaaataaaataaacgatattgcaaatacgtcaaaagaggcatcctcttcagtgcagatgtttaagcccccagagttctctcaatttaaggactcttatcaaaaagactatgagagaatagcaaaatatactttgattccattaacaatggtacctttttatgcctcctttaccggcggggttatgaatcctttactcgatgcgtctttatcgtccatttttttgatatatttacagtatggcttcacaagttgtattattgactatataccgaaggaaaagtatccaagatggcataagctcgccctttattgcctctatggaggatccatgttgtccctgtacggtatctacgaattggaaacgaaaaataatggttttgttgacctggtaaagaaactttggaatgaaaatgatgaccatttgtatatatttggaagaaactga

SEQ ID NO: 78747 - DNA, 1440 bp, Saccharomyces pastorianus
atgggttttgttgatttcttcgaaacatatatggtcggttctagggtccagtttaaacagttagatatttctgattggttgagtctgaccccaaggttgcttattctttttggctatttttaccttcattctttttttactgcaatcaatcaattcctacagttcattaacacgaattccttctgtcttagactgcatttactatatgacagattttggtcgcatgtgcccataataggtgagtacaaaattcggctgctctcgagggcactgacatatagtaaactaaaaataataccaactttagacaaggtgctggaggcgattgaaatttggtttcagctacatttagttgaaatgaccttcgaaaaaaaaaaaaacgtccaaattttcatacccgagggaagtgatgacctaaacttttttaaagatagcaaattccaaaccacattaatgatatgtaatcatcgatcagtgaatgactacacattgattaattacctttttctcaaaagttgtcccaccaagttttatactaaatgggaatttctacaaaagctgaggaagggggaagatctacctgaatggcctcagttaaaatttcttggttggggaaaaatgtttaactttcctcgattggatctactaaagaacatattcttcaaagatgaaacactcgcactctcatcgaatgagttaagagatattttagaaagacaaaacaatcaagctattactatttttcccgaagtcaatatcatgagtttggaactatcaattattcaaagaaaattacaccaagattttccctttgttataaacttctataatttattatacccaagatttaaaaactttaccactttgatggctgctttttcatcaattaaaaacatcaaaagaaagaaaaaccgtaacaatataatcaaagaggcccgatacctgtttcacagagaactcgacaaattagttcacaagagcataaaaatggagtcttccaaggtatccgataagacgacgccgcccatgatcgtagataattcatacttacttaaaaaaaaggaagaaatcagcagcggcaagcccaaggtggtacgaatcaatccatacatatatgatgtcaccataatttattaccgagtcaaatatactgatagtgggcatgatcataccaacggagatttgagacttcataaaggttatcaattagagcaaatatctccgacaatctttgagatgattcaaccagaaatggagtctgaaaacaacataaaggataaggaccccattgtcgtgatggtaaatgtaaaaaagcatcaaattcaaccattactcgcatacaatgatgagagtttagaaaagtggcttgaaaataggtggatagaaaaagatagattaatcgagtccttgcaaaaaaatattaaaattgagaccaaataa

SEQ ID NO: 78748 - DNA, 309 bp, Saccharomyces pastorianus
atgaaatctcgtcaagatatccagaaactgttctcaacttggtgcaggagaatttgctcaatttcttcactacttgcaccattggatgctacgatgcataaatacgataaaaagacattaatacgtatatataatccaaaaaaaattggcgatacgcttcaacgttgtgtcaaactcttgggtcactttaaagaaaacccagcatacattaatatagagcaatgctggttatgtaacttcgccgcccgccgccattcgaggaaaaatattcgtgtttcgagaatgcgggcaaaacgaaaatatcaataa

SEQ ID NO: 78749 - DNA, 1308 bp, Saccharomyces pastorianus
atgaaggaagagctcagcaaagtgagcagtatgcaaaatttcgagatgatccagcgtgaacgattgccaacattgtatgaagtgttaatacagaggacatcgcagccagttgatctctggactttttatacatttctttcacaattcccatatgccatcaactatctggacttttgggttgaccttatgacacatacacgactttgcaaaaactacatagagttggtaagaaaatcattaatcaactttccacaagaacaacagcagaatggaagtacatctacggctacattagacttgctgaacgcactgataaaagaagggcacctagacccggaagcacctgataaactcttagaaaatagcggcccagacgtgcccttttcaccaaaattaaacgaattgctgggtgattggaagcaccaatcgggtatcggtcaagaagccctgagaaacgaagacgtagcgctgatcgtcgacgagataatgaaaaggcgctcccaacaagacggaaaaccgcagataactacaaaacaactgctgcacagcgcagttggtctctgcaacacctatttagtatcgcccgaacaaagcgaacggtacctgagcaacatccccatggaaacgcggaaccgcataatagaaagcgtacaaatcgagcgaaagtacgacattgagatttttgacgacctaaaaaacctaacttaccaattcctagaaatggattgtttcccaaaatttctaagccgcgtcgcactacataacatccacgatgaaatatctgattggagattccactcagtgggcgtcaccaacgaaaaaagcaatcgctctcgaggccagacgcacatttctcgctcgccattctccaatcacacgtcaatcagtcgtattggctttggtttgctctggctaggcatcggcttttggatcggatatgttctaatcttcctggcgtatagtcgcgcaatccgtgtcgttacggtcgtgccattcacactgggatgctactgcattgtgtgtggcatgtatcaagtggacattgtgtattcctggtttggcgtcacacagagacttctccacagacacaaaaacgctggcaatgacgaaggagatgcttctagtggtaccgatcacgtgccaatgatacttgcggtgttcggcggcaggcgccgtcttacccgcatagagcacccatttactcggcagcttctacgtaagcgtggactgtggtgtctgcttctcgtagtgggtgccactgccgcattcacagttattttcagctgtgttcccggccgtcgtgtatga

SEQ ID NO: 78750 - DNA, 78 bp, Saccharomyces pastorianus
atgtttagcttatcgaactctcaatacacctgccaagactacatatctgaccacatctggaaaactagctcccactaa

SEQ ID NO: 78751 - DNA, 1236 bp, Saccharomyces pastorianus
atgtcctccgctccaacaaaagctactttctgtatccaaaatggtccttcctttgaaggtatatcttttggtgcaaacaaatctgttgctggtgaaacagttttcactacttctctggttggttacccagagtccatgactgatccttcctaccgtggtcagatattagtcttcacgcaacccttgattggtaactacggtgtcccatccggcgaagcccgcgatgaatacaatttgctgaagtattttgaatctccgcatatacatgtggtcggcatcgttgtcgctgaatatgcttatcaatattcgcattggaccgctgttgaatctctggcacaatggtgtcagagagaaggtgttgctgctattactggcgtagacacccgtgaactagtgcaatacttgagggaacaaggctcttctttgggccgtattacgttggctgatcatgaccctgtcccctacgtgaatcccatgaaaactaacttggttgctcaagtcaccacaaaaaagcctttccacgtctctgccttgcctgggaaggctaaggcaaatgtggctcttattgactgtggtgttaaagaaaacattatcagatgcctagtcaaaagaggtgccaatgtaactgttttcccctatgattacagaattcaagatgttgcttctgaattcgacggtattttcttatccaatggaccaggcaacccagaactatgccaagctacaatttccaacgtcagggaattactaaataaccctgtttatgactgtatccctatttttgggatttgtctaggccatcaactcttggctctggcctccggtgcctctactcacaaattgaaatatggtaatagggctcacaacatccctgccatggatttgactaccggccagtgccacattacatctcaaaatcatggctatgcagttgatcctgagaccctaccaaaggaccaatggaaaccttattttgttaatttaaacgacaaatcaaacgaaggcatgatacaccttcaaagacccatattttctacccaatttcacccagaggcaaaaggtggtcctttagacacagctattctttttgacaaattcttcgataatatagaaaaataccaattacaatctcaggcaaaaagttcaatctcactaaaagtaacatacagtaccgataaatcgagattgcagagtataaatgttactaagttggcaaaggaaagagtgttgttctaa

SEQ ID NO: 78752 - DNA, 231 bp, Saccharomyces pastorianus
atgagtactgaaaaactggaagcttcggaggaaccacaggctcccttggccaatacatctgagactaactcaataaagggagatacagaaaatattgtaaccgtgtttgacctggcaaatgaaatagaaaaatcactaaaggatgttcagaggcaaatgaaggaaaatgatgatgagttttcacgcagtatacaagcaattgaagacaagcttaacaaaatgagtcggtga

SEQ ID NO: 78753 - DNA, 729 bp, Saccharomyces pastorianus
atgataaaaaactatttgggacgaagatggctcaataatcctgcaattcaagcatatgtgaaacaaaatgctgctgtcgcccattctacggtgtttcaaggaaatctttatgaatatacggtgatgagggagttatctgagaaactacgaatgacaaagttgagaaaaaccggtggcgcccatgatggtggcgtagacataaagggaagctggccagtagatgatatttattggaaattttcatcgttaatgcccaatttggaaatggctagtaacataaaaagaacgaactcgcaaaatggcttcgtattgaaacctttaaagtataggataatcgaccatacttttgaaccattgaaagtactagtccaatgtaaggctttcactaaatcaaaattatctcctagagaattccgtgagttagtaggaacattcacctcactagtatcacatagtcaacgcaacaaaacagtatgcattatgtgttcccctcatatgttaacaaaagataccttaaatcttatcaataacatcacgcttcctctgatatatttacgtgttgagatgctgaaagagaagactgacgggcactttgacttaatcaattcaggaaaactaatcaattattacgagaattcatacgcctctacgttaatgcaagattgcaagatttctgaatggctgaagttgaagttgtacaaaaatagtgactttaattcagaaaaataa

SEQ ID NO: 78754 - DNA, 1566 bp, Saccharomyces pastorianus
atgagctcagacagtttaacgcctaaagacactatagttccagaagaacaaaccaaccaactgcggcaacctgatttagatgaggatagcatacattatgatccagaagctgatgatttagagtcattagagactactgcctcttacgcgtcaacgttggtgtcggcaaaggtgtataccaagaaggaagtaaataaaggaactgacattgaaagccaaccacattggggtgaaaatacctcgagcacgcacgacagtgacaaagaagaagattccaatgaagaaattgaaagcttcccggagggtggattcaaggcttgggttgtgacatttggttgcttcttgggtctaattgcatgctttggtttattaaactcaacgggggtcatagaaagtcatctacaggacaatcaattatccagtgaaagtgtttctaccattggttggctgttttctttgtttctttttgtttgctttgcctcatgtatcattagtggtacttactttgatagaaatggatttaggacaattatgattgtgggcacggtttttcatgtagccggtctgttcgctaccgccaactctactaaatattggcacttcatactgtcctttgccattgtctgcgggttcggtaatggtattgtactgagtcccctagtaagtgttcccgcccactatttttttaagagacgtggtactgcattggcaatggccactattggtggtagtgtgggtggcgtcgttttcccaattatgttgcgtagtttcttctctatgaagtcagacactgatccaacttatggatttgtttggggcattagaactttaggatttttagatttggctttgctaactctgtcaatcattttagtcaaagagaggttaccacatgttatcgaaaattccaaagatggtgagtcacgttggagatacatactcagagtttatattctgcaatgttttgatgcgaaggctttcctggatatgaaatatcttttttgtgtcctgggaacggtatttggtgagttatccattaattcagctcttacttattatggatcatacgccaccagccatggaatttctgctaatgacgcctacaccttgattatgattataaatgtctgcggcatacccgggagatgggttcctggctatttgagcgataagttcggtaggtttaacgtcgcaattgcaactctactcactctatttatcgtcatgtttgttggttggttaccatttggtaccaatttgacaaatatgtacgttattagtgccctatatggattttgttctggaagcgttttctccttacttcctgtttgctgtggccagatatctaaaacggaagagttcggtaaacgttactctacaatgtacttcgttgtcgctttcggtactttagtcggcattccgataacaggtgccattatctctaacaagacaacggccgattaccaacactatattattttttgcggtttggcaacttttgtaagcgctgtttgctacataatttcgagagcatactgtgttggcttcaagtgggtcagattttaa

SEQ ID NO: 78755 - DNA, 1761 bp, Saccharomyces pastorianus
atgaacaaaaccgaaaacctttctattgaggagacaaatgaaataagggaaaagctgggtatgaaacctattccagtttttcaagaaaagaatacagaccataaagagtctttgtcaatcgaagagacgaatgagttgagggcgtcccttggcctaaaacttatcccaccccaacaaaatttcaattcttctccccctaatgtacataacacatccaaaatcgatgaacttcgagagaagataacaaagtttcaaaaaaaggtgaacgctcctttacgaatggcgcaccttctcgaagaaactgatgtaaatgacgacagttcatggctagaaaacatgaatgcaattccttcctcacatgaatccaaacgttccagcacattgccaagaaaaggcgccacgaaggaagacgaaaatattgatctgcataatgttcaagtatcatataatatcgaggcgcttagtccaaagaaagatacgattctaactttgaaagagagcagtatttttgatgatactgattctaccgaagtgttagagaatgtgaaagctgccgaggaaaacgctgatagagagaaactacgattacgacaaatgaataaagatagaagacaaaaaaaaaaatttttaaatgtatctagcttagatattgaagaagaagaaggagagaaacactcacttacaactacacatctaatcatcggagcagaacagggtattatgaaggcaccgaatactatatcagcaaaaccaccaacgggaaaagttaaagtgaatttcgatagcgcaaataatatgtcagatgaagatggtggagactttaaacctttaaaaattaaaaaacgtaagatcaaggacccaagatctactaaagctaggaagtcaaaaattactgataagatggaaattgttaagttagtagatgaagatgaaagtttatcctggatggaagaagaacagccagtcaccataataaatcccagaacaagctcaaacaatgaattgaaagggccagaggacctcgctagagaaattgaaaaggcaagagacgaagagaagcgacgcactgaaagcattttgaaaatgcgtgaaatttccaacagtattgtcgtcgacgaaaaggtaacttttttaaatactttggataccagtctctccgaacgaagtgctactgagaataaagtgaaagtgcatggtgaaggagagaaaaatatcggagatattactaatgggcatactaaggaagggagtggaaacaatacactgactgaagcagttaataatgaaccaaactacgagggagatgctgaaaatgcaccgaattttttttctggtcttgcatcaacactaggatatcttcggaaaaagagtgttttcaccacaggagacgtcgatttgaaaccaggaaaggatgttaataatagtgaatcacttcgaagggatgtccgaaataaagagcatacgggcactggcacttatacaaaagataagctacaaggactggaacaattcacatctaatgactcttccaatgcaaatactcattcaaaaagacaagatcattatgatcctgacataaaactggtttacagagacgaaaagggaaatcgactgactactaaggaggcatataaaaaactgtcacagaaatttcatggtacaaaaagcaacaagaaaaagagagcaaaaatgaaatccagaattgaagcaaggaaaaatacccctgaaaatggtagtttgtttgaatttgatgacaattaa

SEQ ID NO: 78756 - DNA, 384 bp, Saccharomyces pastorianus
atgcagatgctgataccgcaaaggctgcttctgattctgaatccgattctgatgatgaagaggaagaaaagaaagaaaagaaagaaaagaagagaaagagagacgatgatgaagattccaaggattctaaaaaagctaagaaggaaaagaagaaggaaaagaaggaaaagaaggaaaagaaggaaaagaaggaaaagaaagagaagaaagagaagaaggaaaagaagtccaagaaagagaagaaagagaagaaataaggatgcattttacattttaataattggtgacccctcgcgttcccttttatttggatttagaaaattttctataattatccaatgcttaacctatttctcatttcatattttattccataatctgtaa

SEQ ID NO: 78757 - DNA, 1017 bp, Saccharomyces pastorianus
atgccatcaaatttgaatatagtgaaggttacaaaaccacaagaagaaaataagaattttttacacaaaaacacgaatgaacccaatgaaatggaacaatcgcagacacaagaagcagttacagaaaattttaccgaaaacagtaatctcagtgcaaatgaacatgcagctaggaggggtagattaaatttgaaaacagttgatcacatagaaacttatccaatagtgcaagaaacagaagagattgcaaagaagattgctctaacgagaattattttagcacaaacaaagcctagaatcgataaagtggtagtgtcacgtcccgttcaagccgtagcaccagtggtcaatttttttgacaagatggccaattcgactttaagtacagtagagcgcgttgtcccttctttgaaaacaaaaacttataaaagattaggtgaggaaattgcacttccgtatactttgtcgaaaaagtatggaaagcagctcagggatacgacagcaagaaatggagacaactatgtttaccaacctgtccatggaaggttgatgaaatttaggaagtactataatgaaaaattcatagacacaaagggcaagcctttgataagggggcaacttgaccctgttttgttaccagtcaataatacattcgaaaaggtaacggtaaagtatttgcccaaaggtaagaaagttccaaatgattccttttcttgtgagtttaatagggggctagctttagaatacaattttatgacaagagcagtttctgcagttagtcatcaagttgttggtattgcaaagcttcccattgcctatggatatcatacaaactctgtttataataaaaacttagacaaacaggccgatttaaaaatgaaaaatgtattgagaggtacttgggataccataactgatttagaacgcgaaatttgggcctctgtcaccgatagaagtttgtttagattttttggcaacaaatctgagggaggagatttaccacatctagtacaataa

SEQ ID NO: 78758 - DNA, 330 bp, Saccharomyces pastorianus
atgacaatgatacgtttttgtggcgcgcgtcaatcggcgataatcagcaacgcgtctgacgctgctgcaggaaccaacaaaaaaaggatactaaaccctcttgagtccttgtgtcttaacgaccgcatagacgaacaccgttgcaaagaagtccagttatcttcattacgaagtctattgtatgctatgattttaaatagaaccataggcagcgagaccggcgttttttcttttctgctcttttcttttcgttacttcggagaggaaagagacttattttactgcttcttctccgtctttttacttaacattacatatttattggattag

SEQ ID NO: 78759 - DNA, 111 bp, Saccharomyces pastorianus
atgcatgcccatttcgataggaaaatcttgaattttaagcccgttaccgtaaatgtcattcgatactgtttacagtttagttttaaagcggtaacattcttgttaatttaa

SEQ ID NO: 78760 - DNA, 1041 bp, Saccharomyces pastorianus
atggatgaaatgcattcttcagacacatttttgttgcgaacaccgaaatcaaaaaaaaaaaatgggcttgtaatacccagtacaccaagtaaaaaatgtaaatattcatcaggctttatagcagaagacactacgccctccaaacggtttcgtttataccaagccaaatttaagacaagttcaaagaatgtcaaagcccaaactcttagtgtatcaataaaaaaaaatcaaggtgaaatcaccaatccatttatgaccgaaggatataatgattaccggaatattgtcagtcctggattgagttttgataacgactgcttttcagaacatgaattagttagtccattgagtgatatatcttcgataaactcgacatcgcctgatgttgaaaagattgattctttagatccttttggcgttgattcttttgtctggaactgtaagccgcttgttaataaagaagcactggagctccaccgaatgattcattcttcgtttccgatgagcccactggaatccaacagtgatgtgccacttttattgcctaaactcaaaaaaaggttatctccagtaaacagatcgaccttcaagccaacaaggtacgaaccctctcaccgtctattgaagcccaaaaaatcaattctaacagtaccagccaaatctctgaatctcatagtcagttcgtcgcgaggctcattaaatgacgctaccatctttgccactgaaataaattctactttgagcaatgaagaaaacaaattaccagcaatttctagtatttgggagaagctcacaattccagtaaactcttcaattaaggagaaatacaagaagcttaaagaccaaatatatgggcaagctagtaattttggcgaagatgaagataatgaagaagacaatgaagacgaccttcccgacgcggcagtaataagaggttacgaatttcagtcaggaatgcgcgatgagctgacgcaatgtaatgaactacagaatacgaaggactacaaaaaagttcagtgggcaaaggttttagaacaataa

SEQ ID NO: 78761 - DNA, 210 bp, Saccharomyces pastorianus
atgctggttcccatgcataactcacccacggccgccaacggccgcttatcacttactgtcgccagctccggtcttagaaagggtaaaaaaaaccgggtgtatactatacactcatacatccgctcacccgtttccagtagtgaattttcattttctgtacgaaggcaatataagctgacgatccgcataaagcagaagactcatttgtaa

SEQ ID NO: 78762 - DNA, 2103 bp, Saccharomyces pastorianus
atggttgctcaatataccgttccagttgggaaagccgccaatgagcatgaaactgctccaagaagaaattatcaatgccgcgagaagccgctcgtcagaccgcctaacacaaagtgttccactgtttatgagtttgttctagagtgctttcagaagaacaaaaattcaaatgctatgggttggagggatgttaaggaaattcatgaagaatccaaatcggttatgaaaaaagttgatggcaaggagacttcagtggaaaagaaatggatgtattatgaactatcgcattatcattataattcatttgaccaattgaccgatatcatgcatgaaattggtcgtgggttggtgaaaataggattaaagcctaatgatgatgacaaattacatctttacgcagccacttctcacaagtggatgaagatgttcttaggagcgcagtctcaaggtattcctgtcgtcactgcctacgatactttgggagagaaagggctaattcattctttggtgcaaacggggtctaaggccatttttaccgataactctttattaccatccttgatcaaaccagtgcaagccgctcaagacgtaaaatacataattcatttcgattccatcagttctgaggacaggaggcaaagtggtaagatctatcaatctgctcatgatgccatcaacagaattaaagaagttagacctgatatcaagacctttagctttgacgacatcttgaagctaggtaaagaatcctgtaacgaaatcgatgttcatccacctggcaaggatgatctttgttgcatcatgtatacgtctggttctacaggtgagccaaagggtgttgtcttgaaacattcaaatgttgtcgcaggtgttggtggtgcaagtttgaatgttttgaagtttgtgggcaataccgaccgtgttatctgttttttgccactagctcatatttttgaattggttttcgaactattgtccttttattggggggcctgcattggttatgccaccgtaaaaactttaactagcagctctgtgagaaattgtcaaggtgatttgcaagaattcaagcccacaatcatggttggtgtcgccgctgtttgggaaacagtgagaaaagggatcttaaaccaaattgataatttgcccttcctcaccaagaaaatcttctggaccgcgtataataccaagttgaacatgcaacgtctccacatccctggtggcggcgccttaggaaacttggttttcaaaaaaatcagaactgccacaggtggccaattaagatatttgttaaacggtggttctccaatcagtcgggatgctcaggaattcatcacaaatttaatctgccttatgcttattggttacggtttaaccgagacatgcgctagtaccaccatcttggatcctgctaattttgaactcggcgtcgctggtgacctaacaggttgtgttaccgtcaaactagttgatgttgaagaattagattattttgctaaaaacaaccaaggtgaagtttggatcacaggtgccaatgtcacgcctgaatattataagaatgaggaagaaacttctcaagctttaacaagcgatggttggttcaagaccggtgacatcggtgaatgggaagcaaatggccatttgaaaataattgacaggaagaaaaacttggtcaaaacaatgaacggtgaatatatcgcactcgagaaattagagtccgtttacagatctaacgaatatgttgctaacatttgtgtttatgccgaccaatctaagactaagccagttggtattattgtaccaaatcatgctccattaacgaagcttgctaaaaagttgggaattatggaacaaaaagacagttcaattaatatcgaaaattatttggaggatgcaaaattgattaaagctgtttattctgatcttttgaagacaggtaaagaccaaggtttggttggcattgaattactagcaggcatagtgttctttgacggcgaatggactccacaaaacggttttgttacgtccgctcagaaattgaaaagaaaagacattttgaatgctgtcaaagataaagttgacaccgtttatagttcgtcttaa

SEQ ID NO: 78763 - DNA, 642 bp, Saccharomyces pastorianus
atgaactacagcgcagactctggtaatacagtttatgtggggaatatagatccaaggataacgaaagaacaactttatgaactcttcattcagatcaaccctgttttaaggattaagtatccgaaagataaagttctacaagcttaccaaggctacgcattcatcgaattttataatcaaggagatgctcaatatgcaataaaaataatgaataataccgttagattatacgaccgactgataaaggttcgtcaagtaaccaattctacaggaacaactaatttaccttcaaatatttctaaggacatgattctacctattgctaagttgttcataaaaaaccttgcagattcgatagatagcgaccaattagtgaaaattttcaataaatttggtaagctcataagggaacccgaaattttctacctatcaaacggaaaattaaagtgtgcttatgtttattttgaggactttgaaaaagcagatttggcaataaaatctttgaacaatcagttagtcgccaacaacagaattactgttgattatgccttcaaagaaaatggaaaaggtaacgcaaaatacggtgatgacgttgacaggctgttgaataaagaagcattaaagcacaacatgttgaaataa

SEQ ID NO: 78764 - DNA, 1476 bp, Saccharomyces pastorianus
atgaggttgatatccaaaagaagaatcagatttattgtgtttattttgttcggcgtcctcactgtattcgtagtatcaagacttgttgttcattttcagtataaccaagaaataaagttctataaaaagtattttcaacagaggaaggatgggcttcacgaaatttacaacccattagaaatcaagcaaatacccaaggaaacgatagatgacttatataccgcccgtttagataaagagttgaaaaacggtgaggtcatcgagtggtccaagtttgcatacgtgaattatgtgactaatgctgattatctttgtaatacgctgatcatatttaatgatctgaaacaggagtttgagacaaaggccaagttagttcttctgatatctaaagatctgctagacccaaacacttcctcaaatgtggcttacattagttcactccttaacaagattcaagctatagatgaggaccaggtagttatcaagttgatagataacattgtgaagccaaaggatactacaccttggaatgaaagtttaacaaaattactagtatttaaccaaacagaatttgaccgtgtgatttatcttgacaacgacgcaattttaagatcaagcttggacgaattatttttcctaccaaattatatcaaatttgcagctccattaacatactggtttttatctaacagtgatttggaaaaatcataccatgaaacgcgacaccgtgaaaagcaaccaatcaacctccagtcgtatacaaaagtgctgactaaaagaattgggaaaggccagatgatttataatcatttgccgagtttgccgcattcattgtacttgaattctaataacatagctcaggacattataagttctacatcatctttatcgccgttatttgatttccaaagtagtaaaaaggttggaaaattaaaatttgcttctaatttaatggttattaatccctcaaaggaggcgtttgatgaaattgtgaacgttatgctgcccaagattttaaacaagaaggaaaagtacgatatggatttgatcaatgaagaaatgtacaatttaaagaagattatttataaacagtttattttcttcagaaaagtccgaaaacttttcaaaccagaagtattggttttgccatttgcaaggtacggcttactgacgggttcattgagaaacccacggcactattctataatctataatgacgttttgggttataagacattggataatgatggcaacgatattccggtaggattaaacgacagtgtcgcatattctaagtacatacatttttcggattatccattggccaagccctggaattatccatcaatgaaggagtttgaatgtatcgttaaagaagaagacgcggaggattcaaagctagagcaccaagcttgtgacctttggaactcggtgtacgcttcttacatacagtccagggaaatctgcctcgtttga

SEQ ID NO: 78765 - DNA, 2457 bp, Saccharomyces pastorianus
atggcatttccacgtcttacatctactcatcagtccaatcataacggctacagtaatagcaacaaaaaaggacaaagtcttccactaaccctttctattgatgtagaatcaccgccatgtgttctttatgggtctgctatggaatcctcaggtgctgtgctaagtggactttttactgtgacggttgtcgatccctacagtagtgctgaagataaatctttaaagaatacagaatctaatgtgtcgacgacttctaaaagcctaaaaagaaagagtacatttggttctgcactttcatctagattgtccagcttgtcagcgtcgacgtcaaatatctctccttcaacatcttctacatccatatcgcattctcccacgcctgctaatttaagaataatggctggttataccaagatcaccattacgtcggtaacactaagtttggtacagaagatccatttccataaaccctttgtgcctaatatttcctcaatgcaaacctgtatgaactgtaaaacaaagattacaaacatgaaaagctgggaaattcagagtaatacccaggatctttctgttggaagccactcttacccattttcctatcttataccggggtctgtcccatgttcttcatcgctaggtgctacggctgaaacccaggtcaaatacgaacttatcgctgttgtgacgtatatagatcctcatagaaattccttttcttccggtcattctactcccaggaaagaaggaagctcttctaagaagcggttgttgcaactagcgatgcccatcgccgtgactcgaagtataccgcgcgggcctgataagaattctctaagagtatttcctcctacagagttaactgctgctgctgttcttcctaatgttgtatatcctaaatctacttttcctttggagatgaaattagacggtgtttcttcgggggataggagatggcgaatgcgtaaattgagttggagaattgaagaaactacaagagttaaagcacatgcttgtccagtgcacaagcatgaattgaggcagttagaagagcaggttaaaataaaagagtcagaaaaaagtaaaaagccacgcagtcatattaagcgttatggtgaactaggcccacaaatccgggttgcagtaaactctttagaaaatatgccgtcgcaaaggcttccaggcgagcccggtcgtgaacaagcacctaattcttcgggtccagcgtcaactggtaatgttggacttgatgatgaaaatcctgttaatgaagatgaggaagaccaacccggtagcgaattcatccatcccagtgacgacgctttgcgtcaggagttactaatgcagcaacaacgcgcaagacaacaacaacttcaacaagagctgaaaaacaacagtagtttatttacggaagaggttcggataatatctaagggagaaatgaagagtggatggaaaaccgattttgacgataatggaaagattgagctagttacagaaatagattgtatgggacttaattcaggcgtctctaatccggtaatgcatgcatcgacactacaaactccttccacgggcaataagaagcccagcatcaatgtggcttgcgatatacaggatccaaatttaggtttgtatgtaagccacatcttggcagtggaaatagttgttgcagaagaaacattgcaatatgccgatgggcaacctatacggaaaccaaactccaaaaacaagaaagaaactaataacaatacgatgaatgttcataatcctgatcaacgcttagctgaattatctccaatttttgcaaatagaaatacaccgaaagtacggcgcatggggcctgaagatataacaccggtgaatagtaataagtccaaccatagtactaataaggagaaggcatctaacggtgctagtagctctaatatagtgagtgttcccactggtgcagcacgtgttttaagaatgcaattcagattaacagtcactgaaagatctggacttggaatctcctgggacgaagaagttcctcccatttaccaagatgtcgagttgctctcgccaccatgttacgagctctctataaataatggaatcaaaaataaactttattcaacaatgagtactcctgttagatcagaggatgattttgtgggcggcagcgatgaagatattgggaactatgagagccaagggctcgaacctggtcctaacgtacaggaagtaacgatcacacaaaataaattaacgataccaccaaccgcacatcactaccagcctgcttcctcttcgcaaagatcccttaccacagtacagtcaccaccactggaaagtgttgttagtgtccagggtagtgtaccttttcgtggacatgtgttgacaccacatagcacaagagatatcagaatacaaaacttttccgattttctagattccaatagaataacccagtag

SEQ ID NO: 78766 - DNA, 1371 bp, Saccharomyces pastorianus
atgtccagttcacaacaaatagccaaaaatgcccgtaaagcagggaatattttgaaaaccatctcaaacgagggcagatcagatattttatacaaaattcacgatgccctgaaggctaatgcgcatgccattgaagaagcgaataaaatcgatttagctgttgccaaagagactggcctagcggattctttattgaaacgtctcgacctatttaaaggggacaaatttgaagttatgttacaaggtattaaggatgtagccgaactagaagaccctgttggcaaggttaaaatggccagggaattagatgatggcttgacgttgtaccaagtaaccgctccagtcggcgtgttgttagttatctttgaatcccgcccagaagttattgccaatattaccgcattgagtatcaagtctggtaatgctgcaattttgaagggtggtaaagagtctgtgaacacgttcagagaaatggcaaagatcgttaacgacaccattgcacaattccaaagtgagactggtgttcctgtgggctctgtgcaattgatcgaaaccagacaggatgtttccgacttgttggatcaagatgaatacatcgatttagttgttcctcgtggttccaatgccttagtcagaaaaatcaaggacactacaaaaattcccgtgttgggtcatgcggatggtatctgctcaatttacttggatgaagacgcagatttgattaaggcaaaaagaattagtttggatgcaaagactaactacccagctggttgcaacgctatggaaacgttgttgattaacccaaaattctctaaatggtgggaagttctggaaaacttaactttggaaggcggagtgactatccacgctacaaaagatttgaaaactgcgtattttgataaactgaatgagttagggaaattgacagaagcaattcaatgcaaaaccgttgatgctgatgaggagcgagattttgataaggaatttttatccttggatttggctgccaagtttgttacatctacagaatcggccattcaacatataaatacacactcttcgagacataccgacgctattgtaacggaaaataaagcaaacgctgaaaaatttatgaagggtgtcgactcctctggtgtttactggaatgcatcaactagatttgccgatggtttcaggtacggttttggtgctgaagtgggtatttctacctctaagattcacgcccgtggtccagttggcttggacggtctggtgagttatcaataccaaataagaggtgacggccaggttgctagtgactaccttggtgctggtggtaacaaagcttttgttcacaaggatttagatataaagactgtgacattataa

SEQ ID NO: 78767 - DNA, 1809 bp, Saccharomyces pastorianus
atgaacttgctaattgaccggatggagaatcccggatcgaggaactgtaccctgttacctccttcattcccaagaggcttttgtaagggaagaagggcttccagtggcgacgcagtgaagataaaagaatccggtctacagccgcagccgcagccggaacctctacaagctaaaacaaatgttgcacacttttcgaaatcatcttctagattacctgtcatagcagtgaatgataatccggtggtcccaagaccaagcactgaagtaaacttgggatcgttgttacaaaaggaaagggagaaagaaaaggaggaacagcctgcgctgcatgataggagacatttatatgtgacaaagaatagggcacatggggtacgacaacgttcattggaaatgactagcttacctgtcctgggatcgaccaaaaccgggaagtttagcgattttttgtttgaagatgacatcgataacagagtaggtcgacacagtagatcatatagtggggcatccagtttggatgatccattcagagtgtcgccgaaaaccgacttcaactctaatagggccagattgtcttgccttagtaaaggacgtcgtggttcgatgttcgttttccaaagctgtcatactgggctagctttcaatcaaatacagggttcctcctcttcgcaacgtagatcatccgctggttcttttgattatgagaggaaacgattggttaaccaatttttacagccttctttgggaaattcagacccatttgatacgttgagggagtcggtagtgtttgagccctcatccaccgctggcggcattaaattagggaatatgcattctcaatcacaaatttccgtaaactcctcccccagcacatctttgttttatcatgatttggacggttctgctgtcaacgattcttcgtcatttctgtattcccgttctaatgtaccagcatttttgtcgtcatcagccttttcgtccacgtcatccacctcatcagattcagaagatgtggatagaagaagtttaaacggtgtatatccctctttaggatatttgactaaccagaggaaaccaaggaattcatcaggctcttccactgcacctggcaccgataccttgggatttaagtatttactgaataggcagaagtcagcggattcttccactaggttcaagagtgtactgaaggtgaacaataataatggctccgcagccactcctgattctagctcaaactctatttcgaagagcaactcaaatttgaatgataacattgatgaattgaattattatcaaaatcatatttcgacacttctagtgaagatcgagaatgagatgagaagaaatttaaacgatacaataatcaagaatgaaaacaacgttcaaaaaactatccaaaagtatgatcttctatcaggagagttaacccttttattagacgaaatgaccaccttgcgaaccacggtgattgatcaattcttggtcaagttgaaatcagactttgacgaggatgacaataaggcgtttattaatgaattaaagatatcagtcgaagaaagtgtagcgcaattacaaggattggaaaggagaatggaggtttgccaagaaagattaaataaacataagtcctctctaagggaaatggatagtttgatagagctgaaaaacgtgttaaataaatcgaagaacaacacgaaatccatctacctgtataggtatttcatcattgacattattgcatttcttttgatgggcggctttatcgtttacgtcaagaatttgttaactcgtttttttactcgttaa

SEQ ID NO: 78768 - DNA, 474 bp, Saccharomyces pastorianus
atgtcatcttcaaacaaaaaatcgctaaacttcccggttttggtcgatcccaggacaggtaagctagtcatttccaatgaacgttgtcgtaccccatgtgccctattctttgtcacatataaatgtctcctatcatgcagcgcaggctgttcctccttttctttctccctttccttttgtaacaacgatcccaagtttacttcagtgcttggtcttgggaccaccggattatcattcactgctatgacaggtaatctagaagatgatttcgaaaagtgtgcaacatttgttttagcttgtagaggttccggctgcggctgcggctgtagaccggattcttttatcttcactgcgtcgccactggaagcccttcttcccttacaaaagcctcttgggaatgaaggaggtaacagggtacagttcctcgatccgggattctccatccggtcaattagcaagttcattttcacttaa

SEQ ID NO: 78769 - DNA, 4725 bp, Saccharomyces pastorianus
atgtcttttgaagtgggtacacgatgctggtatccccataaagaattgggctggattggggcggaagtaatcaaaaatgagttcaacgacggcaagtaccacctggagttacaattggaagacgatgaaatcgtgtccgtggacacaaaagacttgaataacgataaggaccaatctctaccgcttcttagaaaccctcccattttggaagcaacggaagatttgacctctttatcttacttgaatgagccagctgttttacatgccatcaaacagcgctattctcaattgaatatctacacatactcgggtattgttctgattgctacaaacccttttgatcgtgtcgaccagctttatacacaagacatgatccaagcatatgcgggaaagcgcagaggtgaattggaacctcacttgtttgccattgccgaagaagcgtataggttgatgaaaaatgacaaacaaaatcaaaccattgtggtaagtggtgaatctggtgctggaaaaacggtttctgccaagtatattatgcgttattttgcttctgtagaagaggaaaattccgctactgtacaacatcaagtggaaatgtcggaaacagaacaaaagattctagctacaaaccctatcatggaagcatttggtaatgctaagactaccagaaatgacaattcttccagatttggtaagtatctagaaattttattcgataaggacacatctattattggagcaaggatccgcacatacttgttggaacggtccagattagtttaccagccgccaattgagagaaactaccacatattttatcaattaatggctggattaccagctcaaaccaaggaggaattgcatcttaccgatgcctcagattacttctacatgaaccaaggcggtgacaccaagatcaacggtattgatgatgccaaagaatacaaaattacagtagatgcattgacattagtcggaatcaccaaggaaactcaacaccaaatatttaagatcttggccgcacttctgcatatcggtaacatagaaattaaaaaaactagaaatgatgcatcactatcagctgatgagccaaacctgaaactggcgtgcgaattgctgggaattgatgcctacaactttgccaaatgggtcaccaaaaagcaaatcattacaaggtcagagaaaattgtttcgaatctaaattataatcaagctctggttgccaaagattccgtggctaagtttatttattccgcccttttcgattggcttgtggaaaatatcaacaccgtgttatgcaacccggctgtgaacgaccaaattagctcatttattggtgttctggatatttatgggtttgaacattttgaaaaaaattcatttgaacaattttgtattaactatgccaacgaaaaactacaacaagagttcaaccaacatgttttcaaattagagcaagaagaatacgttaaagaagaaattgaatggtcttttatagagtttaatgataatcaaccttgtattgatctgattgaaaacaagttgggtattttatcactgcttgacgaagaaagtaggttacctgctggttccgacgaatcttggacccaaaaactttatcaaactttggataaatctcctacgaacaaagtattttctaaaccaagattcgggcaaactaaatttatcgtgagccattatgctctagatgtcgcttatgatgtggaaggatttattgaaaaaaatagagacaccgtatctgacggacatttggaagtgttgaaggcttctaccaacgagacactaataaatatcttagagggattagaaaaagctgccaaaaaactggaagaagcgaaaaagcttgaattagagcaggctggcagtaaaaagccaggtccgataagaacggttaacaggaaacccactttaggttccatgtttaagcaatctttgattgaactaatgaataccatcaactcaactaatgttcattatattcgttgtataaagcctaatgcagataaagaagcttggcaatttgataatttgatggtgttgtctcaactcagagcctgtggtgttttggaaactattagaatatcttgtgctgggtttccttctaggtggacttttgaagaatttgtattaagatattacatcttgataccacatgagcagtgggacctaatcttcaaaaaaaaggaaactacagaagaagatatcatatcagtggttaaaatgatcctagatgctactgtaaaggacaaatccaagtaccagattggtaatacaaaaattttcttcaaagcaggtatgcttgcatatctggaaaaacttagaagcaataagatgcataattcaattgttatgatccagaagaaaattagagctaaatattaccgtaagcaatatttgcaaatatctcaggccatcaagtatttacagaacaacatcaaaggtttcatcattcgtcaacgcgttaatgatgaaatgaaagttaactgtgcaactttattacaggccgcttacaggggtcattccatccgtgccaatgtgttcagcgtattgagaacaattacaaatttgcaaaagaaaattagaaaggaactaaaacaaagacaactgaaacaagaacatgaatataatgctgcggtaactattcaaagtaaagttaggacctttgaaccgagatcgagatttttacgcactaaaaaagacactgttgttgttcaatctttgatcagaagaagagctgctcaaagaaaattgaaacaattgaaggcagacgctaaatcagttaatcatctgaaagaagtgagctataaattagagaataaagtgattgaactaacgcagaacctagcatccaaggtcaaagaaaataaagaaatgacagaaagaattaaagaactacaggttcaagtggaagaaagtgccaagttacaagagacattagaaaatatgaaaaaagagcacttaatagatattgataatcagaaatctaaggatatggaattacaaaaaactattgagagcaatttgcaatccactgaacaaactctaaaggacgctcaattagagttggaggacatggttaaacaacatgatgaattgaaagaagaatctaaaaagcaacttgaagaattagagcaaacaaagaaaacattggttgaataccagacattaaacggagacttgcaaaacgaagttaaatctttaaaggaagaaattgctaggttacaaactgccatgtcgctgggcaccgttactactagtgtactacctcaaacaccattaaaggatgtaatgggaggcggtgcttcaaatttcaacaatatgatgcttgagaattccgacttatctcctaatgatttgaatctaaagtctagatctactccattgtccggaaacaaccacattgattcattgagtgtcgatcgcgaaaatggtgtcaatgctacacaaatcaatgaagagttatacaggttattggaggacactgaaattttgaatcaagaaatcacggaaggcctgttaaagggattcgaagtaccggatgctggtgtagctattcaactaagtaaaagagacgttgtttatccggctagaatactgattatagttttaagtgaaatgtggagatttgggctgaccaagcaaagtgaaagctttcttgcccaagtattgactacaattcaaaaagttgtcactcaattgaagggtaacgatttaattccaagcggtgtattctggttagcaaacgttagagagttatactcatttgtggtatttgctctaaactctattttaaccgaagaaacgttcaaaaacggcatgaccgatgaggagtataaggagtatgtttcattggttacagaactaaaggatgatttcgaagctctaagttataatatatataacatttggctgaagaaattgcagaagcaattgcaaaaaaaggccatcaatgctgtggtcatctccgaatcattaccaggtttcagcgcgggagaaaccagcgggtttttgaacaaaatttttgctaacactgaagaatatacaatggacgacattttgacctttttcaacagcatatactggtgcatgaaatcttttcatattgagaatgaagtgttccatgctgtagtcacaaccttattgaattatgtggatgcaatttgttttaacgaattaatcatgaaacgtaatttcttgtcgtggaaaaggggtcttcaattgaactacaacgttactagattagaggaatggtgcaagacgcatggcttgacagatggtactgagtgcctacaacatttgattcagaccgctaagctactgcaagtccgtaagtatactatcgaagacattgatatcttaagaggaatttgttattcgctgacacctgcacaattgcaaaaattgatttcacaataccaggtggcagactatgagtctccaattccacaggaaatcttaagatacgttgctgatatagttaagaaagaagctgcgttatcttcatcaggtaatgattctaagggtcacgagcatagcagcagtatatttatcactccagaaacaggtccattcactgacccattcagtttgatcaagacaagaaaatttgaccaagtagaagcctatataccagcgtggttatccttgccctcaactaagagaatagttgaccttgttgcccaacaagtcgttcaagacggccactaa

SEQ ID NO: 78770 - DNA, 348 bp, Saccharomyces pastorianus
atgtcgtcatcagtgccatacgatccatatgtgcctccagaggagagtaactcaggcgcaaacccaaattcccaaaacaagactgctgctttgagacaagagattgatgacacggtgggaataatgagagataatatcaacaaggttgctgaacgtggtgaaaggctaacatccattgaggacaaagctgataacttggctatctccgcacaaggattcaagagaggcgccaacagggtcagaaagcaaatgtggtggaaagatctaaaaatgagaatgtgtctattcttagttgttattattttactagtggtaattatcgttcctatcgtcgtccatttcagctaa

SEQ ID NO: 78771 - DNA, 2619 bp, Saccharomyces pastorianus
atgtcgtttgattggcttaatgttccgggattggacttaagcagcggggaccaagcagaaaagaggccatcgaatggattaggaccacccagtgtgtcttttgattttggtataaatactgctgctccacatgattccagcttttgggatcagggatcaagaagtcacagtgatacaactttgtcttacagaaataatcacgcaaatacagcagctgataatgccactaacgtgagctctcctcaaaaggataatccacctaatggggaggtacgaacactttctggaggcgatgtgtacgcggagtcaccagaagacatgcaagtcccattgtctttatcacaaaaccaacttacccatgaagaaataaggacatatctaagatggtaccactatatatgtttgagaacccatggaaaattagtaagattgaacgacgtgtttaggttcttgaccaattttaatttatcacaaaaagtaaaagatagaattgtggaaattttccgtagctgtaaaaatgcgttaaatattggtcaatttttcgctgttttaagattagtttctagagctattatatatggcatcttacctctaagacgcatgatcttggaaaaggcacctgttcccaaaccacgtcctatcctaagtagtgagaatcacgaagaggtgtacgaggaggtggaagacgatgatagttctgccaaaactggtgatcaaaaggtcgattttgactcatttgcttcattgctgttgactggtaagacaacgagaaaaagagtcaggagaagaatcaaaaatttgaattttaagagtaagaaggttaggttttcagagcatataacatttcaagaccctccaaacctcaatcaagaatcatctaataatagtgaagcaagaaagcaagatcctgatgcagacaatgaagatcaggattctaataatgacagtcctttggatttcacattgcccatggatcaattattaaagaggctatataagcggagaaaaaacagcggattagtttcgagtttgcccagcgaacaacaagaaactgaggaggagaagaaagttttggaggatatgaaggattccttgtcccatttcaaacaaatacagactgttgattctgcctcattaccaatttcatcggtatttttacagaatggcaatactctaccaactagcaatgtgaataacaccgctgttccacagcaaattccgttagaacctttgaagccaaccgccacaggttctgctaatcacctggtgcgagaagaatataatcaggggttgcatccaagcaacggtgccatccaaacaggtttacaacctttaaaaccaacagcaacgggatctgcaaattatttgatgcgaagtcatatggaacaacctcagtctatcaaaccttcgagtacaccagaaacagttacaaactctgggggacttcaacctttgaaacctaccgccacaggttctgcaaattacttgatgaaacagcatatctcaccttcagttaataacccagtatcttcgatgtttcaggcgcaatttacgaaccaatcttcatctccacaaagtacaggaccagcatttctgaattctccgaacattactcttcctcaaagcaatcaacagcaaccttaccaagaggttaattcgactcaagcgaaaattgaaccatctaacatatcccctcaacacacctactctaacaatgttcggattaataatggtaacatcgtatccatgccgaaagtagaaataactggtgcattcccccctcaaaacactcttcctcaacatcagcaatcgcatttgctttctcctcaaaatacgatcccgcagcaccaacggtcgcaattgatatctccacaaaataccttcactcaaaatcagcccattctttctccgcaacatacttattccaataatcaagcaacaatgatatccccccagaatacgtatactaataatcaacagcagccccaacatcttccacctcctccacctccacgcgctcagcagcagcaacaaggggccattgtgccacctcaacatatgtactctaacgtgcaaaagcagaataacttggtgccgacccaaccctcctatacaaattcaccaagcatacaatctccaaattttttgtcacctcagaatgctgctaatagttactttcaatctttactttcttcttcaccatctccaaatcctacgccatcaaatgcgtctactgttaatggcaataatgccagtaatggcataagttcattccaaaatactagtgcggcaatgaacaatactcaatctcatcagacgtatattcagcagcaacaacaacaacaaactcaacaacgaatatatggtggccaactttctcaaatgcaacaacatccggggcaacttcacttaaacaacagtgatatacatagccaacctaacaagcctaattacggaatgctagggcagcaagttcatcaacagcagcagcaacagcagcagcaatttccattcactgcagatgttaatagatccaattcaagcgatattttgggtaacttgcagtcattgcagcagcaagtcgatgctttacaaatccaatataataggagaccatag

SEQ ID NO: 78772 - DNA, 210 bp, Saccharomyces pastorianus
atgtttcgttaccatgtaaaatttatcgagcctgcaatgatctataaaatcttagctaacgagaagatgcagataatttgggttttgaattcctattttgaattctaccttttgttttgtccccgtttcctaatgttaactctttttctaataggggcaacttacttttgttttctcatttggcgaaaaaaagtaagtagaaataaataa

SEQ ID NO: 78773 - DNA, 3843 bp, Saccharomyces pastorianus
atggactacgaaagaacggttctaaagaagaggtcgagatggggattatatgtagttgttgagcaacgagggacaagtatgacgaaattgatggttagatctgaatgcatgctgcgaatggtgcggcggcggccgctgcgtgtgcagttttgtgctcgatggttctccacaaagaagaatgccgcagaagcacccaggattaatcctgtggggatacagtatttaggtgagtctttgcaaagacaggtatttggtagttgcggtggtaaagatgaggtggagcaaagcgacaaactgatggagttatcgaaaaagtcgctaaaggaccatgggttgtgggggaagaagacgctcatcacggatccaatatcgtttcctctgccgccactacaaggcaggtcgctagatgagcatttccagaagattgggcgtttcaattctgaaccgtacaagagtttttgcgaggacaagttcacggagatggtggcacgaccggcggaatggctgcggaagccaggctgggttaaatacgtacctggaatggcacccgtcgaagtggcatacccagacgaagagctggtggtgtttgatgtagaaacactctataacgtctctgactatccgactttggccacggccttgtcatcgacggcgtggtacctttggtgttcgccgttcatatgtggtggtgatgatcctgctgcgctgatacccctaaacacattgaataaagagcaagtagtaattggtcacaatgttgcgtatgatagggcacgggttctcgaagaatacaacttcagggactcgaaggcgtttttcctcgacactcaatctctgcatattgcatctttcgggctgtgttcaagacagcgtccgatgttcatgaagaataacaagaaaaaagaggcagaagtggaatcggaagtacatccagaaatttccatagaagattatgacgacccttggttaaatgtgtctgctttaaactcgctaaaggatgtagcgaaatttcactgcaagatagatcttgataagactgatagagatttctttgcttccacagataaatcaacgataatagaaaatttccaaaaactggtcaactactgcgccactgacgtaacggccacaagccaagtgtttgataagattttccctgttttcctgaaaaagtgtcctcatccagtttcgtttgcaggtttaaagtccttaagcaaatgcattctgccgacgaagctaaacgactggaatgattacttgaacagctctgaatctttgtaccaacagtccaaagtccaaatagaatccaagattgttcaaatcataaaagatatcgtcctgttgaaggacaaaccagatttttatctcaaggatccctggttatcacaattggattggaccaccaaacctttaagattgacaaagaaaggtgttcctgcaaagtgtcaaaagctgcccggctttccagaatggtatagacaactttttccctcaaaggacactgtagaacctaagatcactattaaatcaagaataattccgattttgttcaagttatcgtgggaaaattcccccgtaatatggtcgaaggagtctggatggtgcttcaacgtgccccatgaacaagtagaaacatacaaggctaaaaattatgttttggcagatagtgtatctcaagaggaagaggaaataaggatgaataacctaggattgcaatgcacaggtgttcttttcaaagtacctcatcctaatgggcccacttttaattgtactaatcttttaaccaaatcgtataaccatttttttgaaaagggcgtactaaaatctgagtcagaattggctcatcaggctttacaaattaactcttcaggttcttattggatgtcagcaagggaaagaatccaatcccaatttgtagtccccagttgtaaattccctaatgagttccagtctttgtccgcaaaatcgtcgttaaataatgagaagacaaatgatcttgccataattataccgaaaatcgtccccatgggcacaatcactagaagagctgtggaaaatacgtggttaaccgcatccaatgcaaaagcaaataggataggttccgaattgaaaactcaagtcaaagctcctccaggttattgttttgttggggcggacgtggatagtgaggaattgtggatagcatctttagtcggtgactccattttcaatgttcatggtggtaccgccattggttggatgtgtttagaaggcactaaaaatgaaggtacagatttgcacacgaagactgctcaaattttggggtgttctcgtaatgaggcgaaaatttttaattatggtagaatttacggcgctggtgctaaatttgcgagtcagttacttaaaaggtttaacccatctctaactgatgaagagacaaaaaaaattgcgaataagttatatgaaaatacgaaaggtaaaacgaaaagatcaaaattattcaaaaaattttggtatggtggatctgagtcaattctattcaataaattagaaagcatcgcggaacaagaaactccaaagacaccggtactgggatgtggtattacctattcacttatgaagaaaaatctgagggcgaattcctttttaccttcaagaatcaattgggccatccagtcatctggagtggattatctacatcttctttgttgctccatggaatatattattaagaaatataaccttgaggcaaggctttgcatttccatccatgatgagattagatttttggtgagcgaaaaggacaaatacagagctgctatggctttgcaaatcagcaacatatggacgagagcaatgttttgccagcaaatggggataaatgaattaccgcaaaactgtgcctttttctcgcaagtagatattgattctgtcatacgtaaagaagtcaatatggactgcataaccccctcgaacaaaaccgccattcctcatggggaggcgcttgatatcaatcaactgctagacaaacccaatagtaaattgggtaaaccaagtctcgatatcgacagcaaagtatcacaatatgcctataactacagagaacctgtatttgaagaatataataaatcttatactccagagttcttaaaatattttcttgcgatgcaagtccagtcagataagcgcgatgtgaatcggctagaagatgagtatctgcgggagtgtacatccaaagaatacgctagagatgggaacactgcagagtacagcctcctagactatataaaggatgtcgagaagggcaaaaggactaaagtacgtattatgggatccaattttttagatggtaccaaaaatgccaaagctgatcaacgaatcagattacctgtcaatatgccagattatcccacacttcataaaattgctaacgattcagcaatcccagaaaagcaattgctggagaacaggagaaagaaggagaacaggatagatgacgaaaataagaaaaaattaaccagaaaaaagaataccacgcctatggaaaggaagtacaaaagagtgtatggtggcaggaaggcatttgaagcgttctatgaatgtgcaaataaaccattagactatactttggagacagaaaaacaattctttaatattcctatagatggagtgattgacgacgttctgaacgacaaatctaattataaaaagaaaccatcacaagcaagaacggcatcatcatcgccaataagaaagactgcgaaagcagtacattccaaaaaattgccggcaaggaagtcaagcactacaaatagaaatttggttgagctggaaagggacattactatttctagagagtactag

SEQ ID NO: 78774 - DNA, 702 bp, Saccharomyces pastorianus
atgtcctccgctattactgctttgacaccaaatcaagtgaacgatgaattgaacaagatgcaagctttcatcagaaaggaagctgaagaaaaagcgaaggaaatccaattgaaggctgaccaagagtacgaaatcgagaagaccaacatcgtaagaaatgaaaccaacaacattgacggcaacttcaagagcaagttgaagaaggccatgctttcgcaacagattactaagtcaacgatagcaaacaaaatgaggttgaaggttctttctgctcgtgaacagtcgctagacgggatattcgaggaaaccaaggaaaagttgtcaggaattgccaacaaccgggacgagtacaagcccattttgcaatcattgatcgtggaggctcttttgaagttgttggaacctaaggcgattgtcaaggctcttgaaagagacgtcgatttaatcgagtcgatgaaggacgacattatgcgtgagtatggggaaaaggcccagcgcgcaccattggaagagattgttatctccaatgattacttgaacaaagaccttgtttccggcggtgttgtggtctccaatgcatcagacaagattgaaattaacaacactttggaggaaagattgaaattgttaagtgaagaggcattgcccgccatcagattggaattgtatggtccttccaagacaagaaagttctttgattga

SEQ ID NO: 78775 - DNA, 417 bp, Saccharomyces pastorianus
atgacaatacagtttggcttacacatgatggttggaataatatcaatagaggagttatctattttcctcaggtctctggggaaaagggaatgttcagttaaaaaggaccatttaggaaacttctcggacattgagataatatttcccttagaattgaataccgtacacgaaatgaacagtgaatcagaggcagaaatgggcttcaacgatagtaactgtttccgcaatatggtgctgttggtgtttgcagcagtggatgtgtcagcatactttctaagaaatggcgtgtttggtcttccaaaagttattctcgacaaaggttggaaacaagatatagaacgtaccaggagacgccgattcatgagatgcttgattgaaaatcactttcactacgattgcgtataccgttactgttag

SEQ ID NO: 78776 - DNA, 1413 bp, Saccharomyces pastorianus
atgaatcggcgtctcctggtacgttctatatcttgtttccaacctttgtcgagaataacttttggaagaccaaacacgccatttcttagaaagtatgctgacacatccactgctgcaaacaccaacagcaccatattgcggaaacagttactatcgttgaagcccatttctgcctctgattcactgttcatttcgtgtacggtattcaattctaagggaaatattatctcaatgtccgagaagtttcctaaatggtcctttttaactgaacattcccttttccccagagacctgaggaaaatagataactcctctattgatattattccaaccatcatgtgtaagccaaactgtattgtcatcaacttattgcatatcaaagctcttatcgaacgagataaggtctacgtcttcgatacaacaaacccttccgccgctgccaaactgagtgtacttatgtatgacttggagtctaagttgtcctccaccaagaataactctcaattttacgagcatagagccctcgagagtattttcatcaacgtaatgagcgcactggaaacagatttcaagcttcactcacaaatctgtattcaaatcttaaatgatctggaaaacgaggtcaatagacttaaactgcggcatcttttaattaagtccaaagatcttacgcttttttaccaaaaaactttattgattagagatctattagatgaactattagaaaacgacgatgatttagcaaacatgtacttgacagttaagaagtctcctaaggacaatttttcggacttggaaatgcttatagagacgtactacacccaatgtgatgaatacgttcagcaatcagaatctttgattcaggatatcaaatctactgaagaaattgtcaacatcatattggacgcaaatagaaattccttaatgttgttggagttgaaagttaccatctacacgttgggattcacagtagcatctgttctgccggcattctatggtatgaatttaaagaatttcatcgaggaaagcgaatgggggtttacttcagtggtggtattttctattgtgtctgccctttatatcaccaagaaaaattttaattctttaagatccgtgacaaagatgaccatgtatccaaactcacccgcaaactccagtgtgtatcctaaaacatcagcgtctattgccttgacaaataaactaaagcgaaggcggaagtggtggaaatcaaccaagcagcggttgggagtgctactttatggcagcagctacactaataaggctaacctgtcgaataataagattaataaaggtttttcaaaggtgaagaaatttaacatggagaatgatattaagaacaagcagaacagagatatgatttggaaatggttgatagaagacaagaaaaattga

SEQ ID NO: 78777 - DNA, 81 bp, Saccharomyces pastorianus
atggagcattctcattggtttcgaaaaatgtcttcacttcatcaagagtttgtttgttttcttttttggcccttgacttaa

SEQ ID NO: 78778 - DNA, 2280 bp, Saccharomyces pastorianus
atgacagcgccattgtggccaaacaagaatgaaaaaaaccacacagttaaaagagcgttatcaacggatatgaccagcaatattttgagtagcacaaacgcgagctcaaacgaagaaaattctaggagttcttctgcagccaatgtacgctccggaacaggtgcaaatacacttactaatggcggcagtactagaaagagacttgcgtgcactaattgtagaaatagaaggaaaaaatgtaatttaggatttccctgtggtaactgttccaggttggaattggtttgtaatgttaatgacgaggacttaagaaagaagcggtacactaataaatatgtcaagtctttggagagccatattgctcaactggagaccaacttaaaaaacctagttcagaagatctaccctgacgatgagcaaatgctgaaccgaatgatggtaggtgatgtattatcagctctaccagacagttcacaagtctcaatcaattatactgaccaaactccctctcttccaattcccgcaaccagaggtacattcattattgaaaacgataaggtcagtcaacctctatcgtcctttaaccaacaaacagagccatctactctaaactcgggtatcttcaacacccaaaaacaaaatttcgaagaatcccttgatgatcagttacttttacgaagatcgttaacaccgcaaggtgaaaaaaagaagaaaccgttggtaaaaggtagtctttatcctgaaggacctgtcagttacaaacggaagcaccccgtaaaatcggacagtttattgcctgtgtcttcgttaacagctgctacagacccatctactttttctgacggtataactgctggtaattccgtcctagttaatggtgaactgaaaaaacgtatatccgacttgaagaccaccgtaatagtaagaggactaaacgatgataatcccaactctatcaataacgatcccaggattttaaaatctctttccaatttctataagtggctgtatccaggttattttatttttgttcacagagaaagttttctttatggattcttcaatcactccaagaataactatgaagactcaagttactgttctgtcgaattgatatatgccatgtgcgctgtcggttcgaggcttacaccggatctacaagaatattcagaagtgtattatcaacgaagtaagaagactttattacagctcgtctttgatgagcaaagtacagcccgtatcaccaccgtccaagcgctattttgcttagccttttacgaactggggaagggtaataatcaattagggtggtacttctcgggcctggctatcagggtcggctacgacatgggatttcaactggaccctaaagtctggtacgttgatgataacaatctgcagctgacccaaagtgagttggaaataagatcaaggatttactggggttgctatatagcggatcattttatttgcctgatgttgggtagaacgtccacattaagcgttagtaactcaaccatgccagagtcggatgagctgccagaagtcaacggcaccgaagagttcagatttattggaagacatgttttacagatatccttgcctctgaaaaacttgataattctatcaaggcttgtacaaatcttcacctctaaaattttcatcgagtcggaagatatagcacaaaaactaaagtacttgaacactttcaattctcaggtttacaactggagacaatctctaccggaatttttgcaatggtcgaaaacactcatcgagaacgatgacgtatccacagaccccactatatcttacttctggtattgctactacatagtgcggctcacctttaacaagccatttatagaagactctcaagaatccgaaacggtagtcatagagatcatcgatgatttgaagactttgctggacaatttcgggaaaaaattcggaaactacacgaagggaaacctttaccaactttactcatgcctgttggccatcaactgtttgaagaagttgaaagagatacgttccagtgagcaagactcatggaatgcacaattggattttttcaatcacatcttctacacacaactatatcccgcatatgatctgccgaaaaagctgcaggaggatacggagctggaaacagaacaagaaaaccagatgttgaaccaagttggaaatataaactacacgcacgatttttcactctcccacgaaattgacgatcttatcagagaactgtttggggtgggcacacctcaaaaactctga

SEQ ID NO: 78779 - DNA, 471 bp, Saccharomyces pastorianus
atggcagtagaagagggtggttgcgtgacgaaacgtttacaaaatgagctgctacagctacttagttctacaacagaaagtattagtgcgtttcccgtagacgataatgatttaacatactgggtagggtatattacaggccctaaagacacaccgtatagtggacttaaattcaaggtttcattgaagtttcctcaaaactatcctttccatccgccaatgattaaatttttgagtccaatgtggcatccaaacgtggataagagtggcaacatttgtttggacatcctgaaagagaaatggtctgcagtgtataatgtagaaacaattctattgtcattgcagtcattacttggcgaaccaaataacagatctccgctgaacgctgtggcagcagaactttgggatgcagatatggaggaatacagaaaaaaggtcctgacctgttatgaagaaatcgacgattactga

SEQ ID NO: 78780 - DNA, 981 bp, Saccharomyces pastorianus
atgtcacaagtaaaaagagccaatgagaaccgcgaaaccgcaaggttcatcaagaaacacaaaaaacaggttacaaacccaattgatgagaaaaatggaacttccaactgtatagtgcgtgttcccattgctctctatgtttctttggcaccaatgtatttagaaaatcccttgcaaggtgtcatgaagcagcacttgaacccattagtaatgaaatataacaacaaagttggaggtgttgtgctaggttatgaagggttgaaaattcttgatgctgatcctttaagcaaagaagatacatcagaaaaactaataaaaatcacacccgataccccttttggatttacttggtgccatgtaaatctatacgtttggcagccacaagttggagatgttttggaaggttacattttcattcaatccgcctcacacattggtcttttgattcatgatgcgtttaatgctagtatcaaaaagaataatatccctgtggattggacctttgtccataacgacgtggaagaagatgctgacgtgataaacacggatgaaaataatggaaacaataataacgaagataacaaggatagcaatggtggaagcaatagtttgggcaaattttcctttggaaacagatctttgggccactgggtagattctaatggtgaacctattgacggtaaattgaggttcacagtgagaaatgttcatactacaggaagagttgtttctgtggacggtacattaataagtgacgccgacgaagaaggcaatggctataacagctcccgttcccaagctgaaagtttacctatagtttcaaacaaaaaaattgtatttgatgacgaagtttcaatcgaaaacaaagagagccacaaggaactagacttacctgaagtaaaagaagataatggttcagagatcgtatacgaggaaaacaccagtgaaagcgatgatggtgaatcgagtgatagtgattag

SEQ ID NO: 78781 - DNA, 4995 bp, Saccharomyces pastorianus
  modified_base (3648)..(3679): a, c, g, t, unknown, or other
atggatatttctaaaccggttggttctgaaatcacatccgttgatttcgggatcctaacagctaaagagattagaaatctatcagcaaagcaaattaccaatcctacggttttagataacttaggtcatccagtatcaggcggtttatatgacttagccttaggtgcattcttaaggaatctgtgttctacttgtggtttggatgaaaaattctgtccaggtcaccaaggtcacattgaattacctgtcccttgttataatccattgttctttaaccagctatatatttatttgagggcatcatgtttattctgtcatcatttccgtttaaagtcagtagaggttcatcgttacgcatgtaaattgagattgttacaatacggtttgatagacgaatcttacaagctagatgaaataactttgggctctcttaatagcagtatgtacactgacgacgaagctattgaagataatgaggatgaaatggatggtgaaggaagcaagcaatcaaaggatatttcctccactctcttaaatgaactgaaaagtaagcgttcagaatatgttgacatggccatcgctaaagctttgtcagacggcagaactactgagagaggctctttcacagctactgtaaatgatgaacgaaagaaattggtccatgagtttcacaaaaaactattatctagaggtaagtgtgataactgtggtatgttttcgccaaaatttagaaaggatggttttacaaaaatcttcgaaactgcgttgaatgaaaaacaaattacaaataacagagtaaaaggtttcattcgtcaagatatgattaagaagcaaaaacaggctaagaaattggacggttctaacgaagcatctgcaaatgacgaagaaagttttgacgttggtagaaatcctaccaccagaccaaaaaccggctcaacatatattttatctactgaagtgaagaatattctggacactgttttcaggaaggagcaatgtgttttacaatatgtttttcattcgagacccaatttatcaagaaaattggtcaagactgactctttttttatggatgttcttgttgtgccaccaactagattccgtttgccttccaagcttggtgaagaagttcatgaaaactctcaaaaccaattgttgtccaaggttcttactacgtcattattaattagggacttaaatgatgatttatctaagctacaaaaggacaaagtttctttggaagatagaagggtgatcttcagtaggttaatgaatgcctttgttactattcaaaatgacgtcaatgcttttatcgactctaccaaagcacaaggtagaaccagtggtaaggttccaattcctggtgttaaacaagcactggaaaagaaagaaggtttattcagaaaacatatgatgggtaagcgtgttaactatgccgctcgttctgttatttctccagacccaaatatcgaaactaatgaaattggtgtcccacctgtttttgctgttaaattgacttatccagaaccagtaacggcttataacatagcagagttgcgtcaagctgttattaatggccctgataaatggccaggtgccactcaaatacagaacgaagatggttctttggtctctttgatcggtatgtctgtagagcaacgtaaggcattagctaaccaactattgacaccatcttcaaacgtttctactcatactttgaataaaaaggtttaccgtcacatcaagaacagagatgttgttttaatgaaccgtcaaccgaccttacataaagcctccatgatgggtcacaaagttagggtgttaccaaacgaaaagactttgagattacattatgctaatacaggtgcttataatgcagatttcgatggtgatgaaatgaacatgcattttccacaaaacgaaaatgctagagcagaagcactaaacttagctaatactgattctcaatacttgacaccaacttctggttctccagttagaggtttgattcaagatcatatttctgcgggtgtttggctaacaagtaaggacagttttttcaccagagaacaataccagcaatatatttacggttgcatccgtcctgaggatggtcataccacaagatcgaagatcgttaccttacctccaactatcttcaagccatatccattatggacaggtaaacaaatcatcacaacagttttgttgaatgtcacccctccagatatgcctggtatcaatttaatttctaaaaataagattaaaaacgaatattggggcaagggatctctggaaaacgaagttctcttcaaagacggcgcattgctatgtggtattttagataagtcacaatacggtgcctctaagtatggtattgttcattcattgcatgaagtttatggcccagaagtcgctgctaaagtcttatccgtcttaggtagactatttaccaactatatcactgccacggcattcacttgtggtatggacgatttacgtctaacagcagaaggtaataaatggaggactgacatcttgaagacgtctgttgatacaggtcgtgaagccgctgcagaagttactaatttagataaagacacgccagcagatgacccagagttattaaagaggctacaagaaatactgcgtgataataataagtcaggtattcttgacgctgttacatcctccaaggtcaatgctattacttctcaagtcgtctccaaatgtgttccagatggtactatgaaaaagtttccatgcaattctatgcaagctatggcactttctggtgctaaaggttctaacgttaatgtttctcaaattatgtgtttgttgggtcaacaagctttagaaggtagaagagtgccggtaatggttagtggtaaaactctgccttctttcaaaccttatgaaacagatgccatggctggtggttatgttaagggtcgtttctactctggtataaagccacaggagtattacttccattgtatggctggtcgtgaaggtttaattgatacggccgttaaaacatctagatccggttatttgcaacgttgtctaacaaaacaattagaaggtgttcacgtatcatacgataacagtataagagatgcagatggtacgttagtgcaattcatgtatggtggtgatgccatcgatataaccaaagaatcacacatgactcaattcgagttctgtttagacaattactacgcattattgaagaaatacaacccatcagcactgattgaacatttggatgttgaatcagctttgaagtactctaaaaagactttgaaatacagaaagaagcatagcaaggagcctcattacaaacagtctgtaaaatatgatcctgttttagctaagtataatcctgccaaatacctgggttccgtttctgagaacttccaagataaactagaatctttcttagacaagaactctaaattgttcaaatcatcggatggtgttaacgaaaagaagttcagggccttgatgcaattgaagtatatgcgttctctaattaatccaggtgaagctgttggtattattgcttcacaatctgtcggtgaaccctcaacacagatgacattgaataccttccactttgctggtcacggtgccgctaatgtgacnnnnnnnnnnnnnnnnnnnnnnnnnnnnnnnntgactgcctctgctgccattaaaactccgcaaatgactttgcctatctggaatgatgtttctgatgagcaagctgacactttctgtaagtctatctcaaaagtcctattatccgaagtgatagataaagtgatagtcactgaaactaccggtacttcaaataccgctggtggaaatgcagctcgttcgtatgttatccatatgagattcttcgacaataatgaatacagtgaagaatacgatgtttctaaagaagaattacaaaacgtcatatctaatcaattcatacacttgctagaagctgctattgtaaaagaaatcaaaaaacaaaagagaactacaggaccagacattggtgttgcagtaccaaggctacagacagatgttgcaaatagttcttcgaactctaaaaggttggaagaggataatgatgaagaacaaagtcataagaaaactaaacaagcggtttcgtatgacgagccagatgaagatgaaattgaaactatgagagaagctgaaaagtcttctgacgaagaaggtatcgattccgataaagaaagtgattctgactctgaggacgaagacgttgacatgaatgaacaaattaataagagtattgtggaagctaacaataatatgaacaaagtgcagcgtgatcgtcaatcagcgattatttctcatcatagattcatcaccaaatacaatttcgatgatgaatctggtaaatggtgtgaatttaagctagaattagcagcagacacagaaaagttgttgatggttaatattgttgaagaaatctgtaggaagtctatcattagacagattcctcatattgaccgttgtgttcatccagaacctgaaaacggaaaacgtgtccttgtcacagaaggtgttaatttccaagctatgtgggatcaagaggcatttatcgacgttgatggtattacatctaatgatgttgctgctgtgttgaaaacgtacggtgtagaagctgctagaaatactattgtgaatgaaattaataacgtcttctctcgttatgctatttctgtttctttccgtcatttagaccttattgctgacatgatgaccaggcaaggtacttacttagcctttaacagacagggtatggaaacatccacttcatctttcatgaagatgtcctatgaaactacatgtcaattcttgaccaaggctgttctagataatgagcgtgaacaattggacagtccttccgctagaattgtggtgggtaaattgaacaatgttggtacgggttcatttgatgtgttagcaaaggttccaaatgcggcttag

SEQ ID NO: 78782 - DNA, 960 bp, Saccharomyces pastorianus
atgactattctagaggagcttaatgattcaagcattcctcagaggctagataatcacatatttttcggctccgtacattcactgacgcatacagatttcctagtagaaaataacgttaggtttttcataaacgttgatttatcgactgaactaatatcacatatctatcatgaggtccgctcaaagtttgcccatgaaatagtaattgtcaacatcgacaatgactctcaaataccaatagaaagcgatttggtgcgttccttccattggcacaacacttcccttttgcaacaattgatccatcatctcgattttctcagcggtattaataatcacggcgaaccattaactccaccaccagaatctcattaccgaaatgcgtatgttcaattcgaccatccaagtgactcagtatcgatattagataaacttttatatggtaataagtcagaatattcgcgtacaaatatttttcaagttaccaacgaagcgaagtttcaagtcttcaacgacctaattacaattttcaaatactctatcgctcaaggcgggaataccaatagtaacatacttgttctctcagaaaacggcagcaccgatgaaaatttgataagtttactgatgtctaccgtattgaaagaaaacccaactttcaacgtttaccaggccctccaattcgttaagtctattgcagtaattcctgatacggtaagagatgaaaaaatcttatgggccacaggatttatcaactatcaagaattaatcaagaaaaatgaaatgtattggggcctaggttcgcaaaagggtcgcaaacttacgtcctttgcgtccccaatatcgaaagtggaaagaaaacaaagaagacgtgacgaccagaatatcatgcgatcaaagctaccacaacagagacaaaaccccttctgctcaacagagagacctaaaagggctcgctgcgattag

SEQ ID NO: 78783 - DNA, 876 bp, Saccharomyces pastorianus
atgaactctattttagacagaaatgttagatctagcgaaactactttaattaaacctgaatctgaatttgataattggttgtcggatgaaaatgacggagctagtcatatcaacgtcaacaaggactcctcgtcagttctttctgcatcttcttccacatggttcgaaccattggaaaacattatctcctctgcatccagctcctcgataggctctccaatcgaagaccagtttatatcttccaacaacgaggaatctgctctttttccaacagatcagtttttcagtaatccttcctcatactcgcattctcccgaggttagcagctcgataaaaagagaagaggatgacaatgccctttcgttggcagattttgaaccggcttctttgcaattaatgcctaacatgataaatactgataataatgacgataataccccacttaagaatgaaatcgagctaaacgactcgtttataaaaacaaatctagatgctaaggaaacgaaaaagagggctccaagaaaaagactgacccccttccaaaagcaagctcacaacaagattgaaaaacgctacagaataaacatcaacacaaagattgcaagactgcagcagattatcccatgggtagcaagtgaacaaacagctttcgaagtaggtgattctgtaaaaaaacaggacgaagacggcgcagaaactgccgctactactcctcttccatctgccgctgctacaagcacgaagctaaataaaagcatgatcctagaaaaagctgttgactatattctatatctacaaaataacgaacgactatacgaaatggaagttcaaaggttgaaaagtgaaatcgacactttgaaacaagaccaaaaataa

SEQ ID NO: 78784 - DNA, 2958 bp, Saccharomyces pastorianus
atgggtgaacatggtggtcttgtagatttattagacagcgatttggaatactctataaatagggaaacacctgataaaaacaattgccttagccagcaaagtgtcaatgattcacatttaacagcaaagaccgacggcttgaatgcaaggtcttttctatctacgttaagcgatgattccttaattgaatatgtcaaccaactctcccaaactaataagaataattctaatccaactgcaggtactttaagatttactactgaaaatattagctgtgatgaattacatgctgatcttggcggtagcgaagattcacccatagctcgtagcgttatcgagatccaggaaagtgatagcaatggtgatgatgttaaaaaaaatactgtgtatactagggaggcttatttccacgagaaggcgcaaggacaaaccctgcaagatcaaatattaaaagatcaatataaagatcaaatttctagtcaaagcagtaaaatattcaaaaattgcgtcatctatataaatggctacaccaaacctggaagactgcaattacacgagatgatagttttacatggcggaaaatttttacactatttgtcttcaaagaaaacggttactcacatagtggcttccaatttaccattaaagaaaaggattgaatttgcaaattacaaagtagtcagtccggattggatagttgatagcatcaaagaagcaagattattgccctggcaaaattactcgttaacatctaaacttgatgaacagcaaaaaaaactagataattgtaaaaccgtaaattcaattccattgccctcagagactagcctgcacaaaagatctaaatgtgtagggtcggcattgttgccagtagaacagcagtcaccagtaaatctcaataatttggaggcgaaaaggatagtcgcttgtgatgatcctgatttccttacttcctattttgctcattcgagattacatcatctctccgcatggaaggccaatctgaaagataaatttctgaatgaaaacatcaacaagtacaccaaaattacggataaggatacctacattatctttcatatcgattttgactgtttttttgcaactgttgcgtatctatgtagaagttctagtttctcagcatgtgattttaaacgggatcctatagtggtatgccatggtactaaaaactccgatatagctagttgcaattatgtagcaaggtcatatgggattaaaaatggaatgtgggtgtctcaagctgaaaagatgttgccaaatgggatcaagctaatatcattaccatatacctttgagcaatttcaattaaaatcggaagccttttacagtactctcaaaagattgaacatattcaatttgattttacctatatctattgatgaagctgtttgtgtgaggataatccctgataatattcataacactaataccttaaatgcaaaactgtgcgaagaaatacgccaagaaatttttcaaggaacgaatggttgcacagtgagcattggatgttccgattctcttgtgttagcaagactagctctcaaaatggcgaaaccaaatggttacaatatcacatttaagagtaacctatctgaagaattctggtctagtttcaaactagatgatctgcctggagttgggcattctactctgtcaaggttagaatcaacgtttgatagcccacattctttaaatgacttgagaaaaagatatactttagatgctttgaaggcgagcgtcggctctaagttaggtatgaagattcatctcgcgttacaaggccaagatgatgaagaaagcttgaaaatactgtacgatcccaaagaagtcttacaaagaaaatcactatcaattgatatcaattggggaatcagatttaaaaatatcactcaggtagacttgttcatagaaagaggttgtcagtatcttttagaaaaattgaatgaaatcaacaaaacaacgtcacaaatcacattaaaactgatgagaagatgtaaagatgccccaattgaacccccaaaatatatggggatgggaaggtgcgactcattcagtcggagcagcagattaggtattccaacaaacgaattcggaattattgctaccgaaatgaaaagtttgtatcgaactttgggctgccctccaatggaattaagaggtctcgctctacaattcaacaaattggttgatgtgggtccggataacaatcagctgaaactgaggttaccgtttaaaacaatagtgacgaacagagctttcgaagccttaccggaagatgtaaaaaatgacattaacaacgagttcgagaaaagaaattatatgagaaaagaatccgggttgacttcaaactcattgagctctaaaaaaaaaggatttgccatttccagattagaagtaaatgatttgcccagtactatggaagaacagtttatgaatgaactgccaacccaagttcgagcagaagtaagacacgatttgagaattcagaaaaaaatccaacagacaaagttaggaaacctacaagaaaagataaaaaggagagaagagagcctacagaacgagaaaaatcatttcatgggccaaaatagtatattccagccgatcaaattccaaaatctgacacggttcaaaaaaatttgtcaattagtgaaacaatgggttgccgaaactttaggtgatggagggccgcatgaaaaagatgttaaattattcgtgaaatatttgattaaactttgcgattctaatagagtccatttagctcttcatttatcaaacctaatatcaagggaattaaatctctgcacctttttaaatcaggatcattcaggcttccaaacgtgggaaagaattttactcaatgatataattccacttttaaacagaaataaacatacttaccagactgtgcgtaaacttgacatggactttgaagtttga

SEQ ID NO: 78785 - DNA, 1992 bp, Saccharomyces pastorianus
atgaagttactttttaaaagatgttcgtctagtcatattggtaagctgattaaggactctttaatcactcctgaaatactaccacagctagggcgacagccatcatcgcataaacgtttaccaaataacaaaagaactaactcaataactgataaatggttgaaggatgcgctaacaagaaaagataaactgaatgaagataagctccaaaatgtaaatttacgattaaatgtggtactgactactctacagaagcttcgtacatccgataatcctgctttgtattttgcgttgttgaatcgtattggcacaggtcacataaaatggctaaataaaagtggccgacagattgatgcattcccacctgatcggctgcctttggaattttatcatgagctatctaatatgctctataaactatcgcttcggtccgcaaatgacaaaattgcactagctaaattttcattgcaattattggatcgctattattttcttaaaaccaaatctttaactgtagaaggaaaatttcgggcaaacataaaatttttgaggaattgtactcttttaattgttaaatcccaatcgaactactacttaagggcaatacagcggttgttcgcggaaaattcggagggtcaattattagccaatttatcccagctggcattttatgtggagacctcccaatggacaagtatgttggatattttatcctcatgtgtaccggattctggtttaagaggttcgaaggagcgtgaaagagctattcaattgttggagttatttagtccatgcctagtcaaaagtctaaaagtaatgatagcacaaaatatggagaatgaagcttgtcagattttaaggagcttgtctgaatggaactttcattttgatcagcatgattcctccaacttgatacaattatcccagaaccattcttgcctcaaagttattgaaaccatgaatggattatcatcaactaccgctgtcactaggcaattcggacttgaaaaattaccaactgacgtgagtttgaagcagagcatacatattttatcaaaagataatttcgaacctctcaagcaagattcatttcttcaatttctatcgtttaaattaagtgatttgcctctgaacttagaagtatggaaaaagcacattaaggaggttgatgaccaaatgcaggctgagtccaatctgcattccttaagagctttttttattgatatgctactgtgtcatttatctgtgcgcaaggatttcgattttatgctttcattggtcgagcacatagtatacgaaaaaaatttatggcagccattattactcacagataatatagttggaaacaaagaaaattccacttttcattgcctctttcatggcgcctctcaagatatttctaccaaacttactctactggcattgtataaccagttgaatgaaatcggctatcaatttacctcccacgattttctctcgatgttgaaagtctgcaaaaactactctgattctgattttttctattttgctttctataatttgttggttacacaaagtcacaaattttttcttttcgataagtttagtgataagttttcgtggaggttgccaatacaaatcggagatgcaatttctgaatggctatccagcttagaaattgatatacaagaaaacaccgatagagttttgcagataacagatgacgtcggcgaatggtatgttgagaataaaccatttaactcagaaaaagggaccattcaaccaataaacataatggaattgcgcaaaatttttggggagcgaaaaactctatttcatatggattcagaaattttccaaaaatctaaagcaaaaagagataaagaaatgcggaatgaagctttatttaccgcaaatgatgcggaatacaattttgctgcggatgtatcctatgcaaagagagtagaaaatctattttcttacataagatctaagcaaatgcaacaaaaataa

SEQ ID NO: 78786 - DNA, 1494 bp, Saccharomyces pastorianus
atgagaccgttgtatagctgcaaccttgcaaccaaagatgatattgagacggcaggtggcgtagctcctgctcacctggaagttaatgtaggcggctataatacagagcagacaatacctatagtaaagcatcagctcgtgaaagttgggagaaatgataaggaatgtcaactcgttctaacaaatccctctatctcctctgttcattgcgtgttttggtgtgtcttttttgatgaggatagtattccaatgttctacgttaaagattgttctcttaatggaacgtatttgaacggtttgcttttgaaaagggacaaaacgtatcttttaaaacattgcgacgttattgaattatcgcagggaagtgaagaaaatgacattaaagaaacacgactagtttttatgattaatgatgatttacaatcttctctggacccaaaacttttagatcaaatgggttttctgagggaagtagaccaatgggaaataacaaatagaatagtgggtaatggcactttcggtcatgttctgatcacgcataactcaaaagaacgtgatgaagatgtctgttatcaccctgaaaattatgctgtgaagatcattaaactaaaaccaaataaattcgataaagaggctcgaatccttttgagactggatcacccaaatattatcaaagtctaccatactttctgtgacaggaacaatcacctttacatattccaggatcttatccctggtggtgatttgttttcttacctagctaaaggcgactgtctaacttccatgtcagaaactgaatcgctattgatcgtctttcaaattttgcaagctttaaactaccttcatgatcaagacattgttcaccgcgatttgaaactagacaatattttgttatgtacgccagaaccgtgcactagaatcgtcttggcagactttggtatagctaaagatttaaattccaacaaagaaagaatgcatactgtcgtaggcactccggaatactgcgctccagaagttggattcagagcaaacagaaaagcatatcaaagcttctcaagagcagctacgttagagcaacgaggttatgacagtaaatgtgatctttggtctttgggtgtcattacacacattatgttaacagggatctcgcctttttatggagatggttctgagaggagtattattcaaaatgcaaaaattgggaagctgaatttcaaactgaagcagtgggatattgtttcagataatgccaagagttttgtcaaagaccttttgcaaactgacgtagttaaacgattaaatagtaagcaaggtctcaaacatatttggattgcaaaacacttaagtcaattagagagattatattacaaaaagatattgtgcaataacgaaggccctaaactagaaagtataaattcagactggaaaaggaagttacccaaaagcgttatcatttctcaggcaataccgaaaaagaagaaggttttggagtaa

SEQ ID NO: 78787 - DNA, 1032 bp, Saccharomyces pastorianus
atgtctgagccaaacacaccattacatgctcaaccgaatgagcaactggacttgaacaacttaaatgatctagatgaaaaagacattgatgatttaaacttggatccaaactcagatgtagaaattagtgcagactcaggtgatgtcgtaaattctaacatagacaacgttatatggcagcgtaattgtaataagaaaagaagatatcatacaccagaattcaatgatgtttacaatgaaactaacaacacaatcaacgacgtaactatggtcgatgatgttgacgatttccagcctagaataaacgtgtcttctcccttttcgtctgccacaaagctgagtgaattattgccaaatgatcacaatggaacgtcacacccgagaagattgtcaatgtctcaacaatccaaattcatctcttacgttgatgatcagcttttacaaattcaaagaaaatttgttcaatccaggggcctgaatatcaaaaacggctatgccagtcttactccgctgctgcaggatttaaaaactttagttgacttcgtttggtattctattgcccatgttccaaactcagactatttacttcaatcagaagaaaagagacattgcccagattcccgaaacccaaaagatacatgcggatattctagttattttggtcaagggtcctatttaataaaaattgccgacgatctcatcgattacgttgaaaaatttacattcaaaaatatggaagactcagagattaatgacactttatccaaattattcaaactcttcttcatccttgacaggatatttgtaattctaactgatgataatgataattgcaaagaagtccctaaaacgtcttcagccagcaagaacatagcaggattgaatgggactgatattgtgaggttaaaaggtatcgcggaacgaacaagagttcgcctacccatatttttggaatcccagggtatccatggttaccattatgaattaagcaagatttacgagggatttttagaccatgccaattcattttaa

SEQ ID NO: 78788 - DNA, 2376 bp, Saccharomyces pastorianus
atggtagcgacatcttcaaagaggacgttggatccgaaggaggaacatttgcctgctgacaaaacatccactaattcaagcaacactataatatctgagttggcaacacaagagaaatccagctctagtggtactacactaaaattaatagctcttaatatcaagtccatatcagatgaagatgtgggatatatccaaaatgttgaaagactgtctttaaggaaaaatcacttaacatccttaccagcgagtttcaagaggttatcaaggctgcaatatctggatttgcataataacaattttaaagaaatcccatatattttgacacaatgccctcaattagagatcttggatctgtcctccaatgagattgaagcattgccagatgaaatatcatcgttttggcaagataatattcgtgtattatcattgaaagacaacaacgttactagcatacgtaatttgaaatcgatcacaaaattaaacaagctgagcatcttggatttagaggataataaaatacccaaagaagagcttgaccaagtacagagttatactccatttcatacgggcatccccaaagaagaatattgggcaattgcgatatcacgatatctaaaagatcatcctaacctatctactccagaacctaaaatatctagagcagcgaaaagaatgggattcataaatacgaacttgtctaatggagcaatgaatgaaaacaatataatttcacttgccccaagtgcaaatacaactataagtgcatctactgcaatggtctcatctaatcaaacctctgcaacatctttcagtggtacagtcaatgcagaatcagaacaaagtggggcagtgaatggtacggaactatacaatcacaccaaatataatgactacttcaagaggttgtcgattttaccagaagagtcaatgagtaacgggcatcaaaaaatatcgcatgcagagttggttgtttcctgtcggaagctcctatttagttttacagaatgccaacaagctatcagaaaaatcgcctctttctgtaaagagaaggccgtagcggttaatgtagtatcattattatactctgtcagatcacatactgataatctggtggaggtcttgcagcaaacagagaacgaggacgaatcgcatgatcaggcgttaatcaagctgtgcctcattatcatcacaaattttaaacaaattataacattgttgagaaaaaattttgagatttttttcaaagaagacgatctatgcttcataaggatgttttatatgacattaatgtgtgcttatatggaaatgtataatgcatggtcttttatcaaagaagatgatcaagtgtccggttctgcaagtaaggcacccaagaaacattctttttcgaggcacgagacatcgtccagtagtatcacaagcggtggaggacccgcagcaagtacgaccagtacacattgtagcggaaacataaaattactgccgaaaacaaggagcacaagaacaccatctgcatctgcattgctttcaaatagtaatattctgacgggtgataccactgctgttcctcttttatcaccaaatctaaatggtgcacacacccatggtccaattttgggacaccaaaatgcaataagcaatggaagttctcaaacgaacatgaatgaagtaaaaactactagcgatactattccaaggcaacagctgcttcagcacaataaatccatcagcgattcgaaaaaagagtcacaggcgcatgaacctaaacagcatccggttatgacttcttcaataattaacgcatcaaatagtaataacgtctcgaatgttaatataaccccaccaccgatgaatggtggtggtgccgcgaacagtagtgctaatgtagtggagacaaatattgacattcaactgtatcaaacgttgtccacagtagttaaaatggtgagcgttgtatataaccagttaacttcagagatatccaagatagccattgctagcaccatgggaaagcaaattttgacggactcgctagcacctaaaattcgtgatttgacggaaacatgtcgtcaagcgatggatttatccaaacaattgaatgaaaggttaaatgtattaataccgaacgattcaaattcagagaagtatctgacatctttggagaagctgaaaacgtgggagataatgaattcgttcttaaaagtaataatatcaattctggctaatactaaaatcgtaatgagcgacgtgcctaatttgaatgagctgagacctaacctagccaacttggcgaagattaccaaggatgtcactgtgatattggacttgagttcatacaaggctgtatcagtaagcgccaactctccggagtaa

SEQ ID NO: 78789 - DNA, 2079 bp, Saccharomyces pastorianus
atgctttcccataatgctttaagggcctttgattgttcaaaggtgattatttcacgaagatgtctaacctcttcaacatcgatataccaacaaagcagcgttcacttacaagaaacagatgatggacattcaggaaatagagaaaagcacgtctcaccgtttgaaagggtacaaaatttggctgctgatttgaagaacgagttgaaagctccagattcagatatcaatgaagtttttaatgactttaaagataagattgaatcgttgaaacagaaattaaggaacccttcacctatggaaagatcacacttgttagcgaatttttcttcggatctcctacaggaattaagttacagaagcaaaaatatgacgctagatccttatcaagtattaaacacattgtgccaatacaaattggcacgctcacaacatttcacgattgttttaaagtaccttctatataatcaatcaccacaggacgttattgccttatgggtgaagtacttggaaaccatttccgaaaacccagtgatcttacttcaaaatagttcttctcgtgcacatatgcaaaatattgcaattaccaccattgcttacttatctttaccagaaaatactgtggatatcaatattctgtataagattttacagatcgatcgtaaaatgggccaggttttaccttttaacatgattagaagaatgttaaatacagaatttagctctcttgaaagaagagacgtgattatcaaaaatctaaacactttgtactatcaatacacagtacacgatagtgatcatttcttaagtcaaattgaaaatgctcctagatggatagatttaagggatctttatggccaatacaataaacttgaaggtgagaaaaatgtagagatcataagcaagttcatggacaagtttattgatttggataaacccgaccaagttgttactatttataaccagtatagcaaggttttcccaaatagtacgtcgctgaaagattgtcttttaagagctgtgtcgcacttacgagctaaatcgagtaaagagaagttggacagaattctagcagtctggaacagtgttatcaaaccaggagataatattaaaaacacatcttatgcgacgctagttaacgcactaactgattctggaaatttcaaccatttaaaggaattttgggaagaagaacttcctaaaaagttcaagaaagatcccatcgtgaaggaagcatttctcctggccttatgtcaaacttcgcctctaaagtatgaccaagtcaaaggggagttagcagagactgttaaaaccaagaagttgttcaataaagttttattgctaatgttagatgatgaaaaagtgagcgaagaacaattcaacacattttactataaccattatccatcagatggtgtgttaccccctactttggatactctaagcattaaaatgtacgctaattataaatttcaggcagaagatacacgcccacaattcgatctattgcaaagtgtttccattaatcccaccgattatgaaaaggttgaaaagattacgaaagcctttatttcagtgtgccccactgtcgagccgattcgtcaactttacaaacaattgggaactcacttaaatgctaggaattatgcagactttatttccgcagagtttaataagcctgacggcacagtggcggaggcaaagaatttgttttctgattttctctcatatcaaaagactagaaagagaaacgtggataatatgcctctaaatgctttattattggggttctgtgataaactttacaagagtaaacatagcgagtacgttccctacatcgaaaagtactacaatctagctaaggattcaagtatcagggtgtcgaacttggccgtttcgaaaattctattcaacttggccacatttgcacgcaatactcagcagttatctgacaaagaggttgcttttattaaccagtttatgcgagatttaggcactaatgagggttttcgtcccaaccctaaggatattcaaattttaaaagaatgtgatggaattactgttccagaaaagttgacttaa

SEQ ID NO: 78790 - DNA, 1569 bp, Saccharomyces pastorianus
atggcattggcaaattccagacctttgcaaataccaactttagagaatgaaattcttcataactcaaattctccagtatttcagttgaattcaatgggatttacaactagagctgacactatttcgaatccaggcacggatcttatcggcaaccagccaggcatggcccttgatgataataatttggccggttcttcgttttcctcatctcaggaaataaaagctaccaaacctaagaaggactttggtgctcccaaaaaagacaatccattattagaaatttctaagctaatacctgttactggtgagaggccaaaacccgaaaatagagactcccctctggatgatgacgttcttcacgcagtttttttaatattatgggaaatggatccgaatcaacaaggcatgaccgtcaaacaactgtgtgacttgcttttgcaaaaacatccagatatgtccaatttatcaaccaagttgtcaaatttaatttccgcaaaactgaacgcttatgttaaaaaaattgaaaaaggtgagaaaacgttaacttatgctttatcgagggaatggtctaattcatctcctagaaggatgctctatatatacagaggcatattatctcccgattacaaggagcatgctcaagctgttacgatgcaacttaaacaacaattggagacatccggtgatacaagcgactttaattcaaatggcaagaaaaaaagggagtccagcagtaaccagctagttaacaatgacagttattcaagttctatgacggacatgaaaaatatgtcttctaacagttccttctcaaaaaatttgaatgtagggaatctggccttttcattaagtccagaattcaacataccttattccacttctccagtgtcactaaatctttccccatcgatgagtaataatcagcaacaattactgacacctaattcggcatcgaagagtaaaaacaataataaaaaaagaaattacatggatgaagatactaacgagtcaatgaccgagccaaagaaaaccaaaactactaaacctggcaaacaaacaaaatcccaatctttatcagttttatccaccccaaaaaagggttcctctgcatctctttctacatttgcaagctccaagaatatttcgccagattcttctctgtcgcataatgcatcgtcaaatacttatgttactgccgctgccgctgcaccaaggctttctaagcttttgccgaaaaatgggtttaagaaaaattcacgtagctcttctgaactggctgctatccataaagtaatctctacacagactccaattgagagctcttcagagagctctcaatataacagtagtagtagttcaccagttaatagtgcagctgcttcttctgctgaatctttatccgacatcaattccagtcaggataacggaagagaatcaaacccaagttcccaagaatcacgaaacgaagttacgaattggatgaaaattgtgagaaatggatttttgacacatgatattgaatctcctgaatcaatcacattagatgacctagaaaatatattcaattga

SEQ ID NO: 78791 - DNA, 1896 bp, Saccharomyces pastorianus
atgattaagttcactaacgagaacttaattagagggatccgaatgacgatttccgcaaaatctcatcatttggctctagggacagatatgacgagaaagtttagcttgtcgtgtaggtttttgaacaaagcaaatcttactgaagaagagaaagagttgttaaatgaaccaagggcgcgcgactatgtggatgtttgtatagttggaggagggcctgcgggattagcaacagcaatcaaattaaaacagttagacaattcgtcaggaacaggccaattgcgtgtcgttgttcttgaaaaatccagtgtattgggtggacaaactgtttccggcgctatattggaaccgggagtgtggaaagaactattccctgatgaaaagtctgacattggcattccgttaccaaaggagttagctacgttggtaactaaagaacatttgaaatttttaaaggggaaatgggccatcagcgttccagaaccatctcaaatgatcaataaaggacgtaattatattgtctctttgaaccaagtcgtcggatatttaggagaaaaggcagaagaagtaggagttgaagtttaccccggaatagctgtctcggatctcatatatgatgaaaacaacgccgttaagggtgtaattactaaagatgctggtatttcgaagtccggtaagcctaaggaaaccttcgaacgtgggatggaattttgggctagacaaactgtattagcagagggctgtcatggttccttaacaaaacaagccttggcaaaatatgatttaagaaaaggcagacagcaccaaacttatggattaggtattaaagaagtttgggaagtcaagccggagaattttaacaagggatttgcagctcataccatggggtacccgttgacaaatgatgtttatggcggtggtttccagtaccattttggtgatgggctggtcactgtgggccttgtcgtggggttagattataagaatccctatgtttcaccttacaaagagtttcaaaagatgaaacatcatccatactattcaaaagttttagaaggaggtaagtgtatcgcttatgctgcaagagcattgaatgaaggtggactgcaatctgtacccaagttgaatttccctggtggtgttttggtaggggctagcgcgggtttcatgaacgttccaaagatcaagggtactcatactgcgatgaagagtggattacttgccgctgaaagtatctttgagtccataaaagggttacctgtcttagaagaggttgaagacgaagacgccaaaatggctatgtttgataaggaggcaactattaacttggaatcatatgaaagtgcattcaaagaatcatcgatatataaggaactatacgaagtgcgtaatattagaccgtccttcagcgggaaacttggtggatatggtggtatgatctactctggaatcgattctttgatattgaagggaaaagttccgtggacactgaaatttgatgaaaaaaatgacggtgaaattttggaacctgcttccaagtacaaaccgatagaataccccaagcctgatggtgtgatatcctttgatatattgacctccgtgtctagaaccggaacctaccatgatgatgatgaaccatgtcacttgagggttcctggacaagatatggtaaagtacgccgagagaagctttcccgtttggaaaggtgttgaatcgaggttctgcccagcaggtgtctacgaattcgtcaaagatgaaaaatcgcctgtgggtacgagactgcaaatcaattcacaaaattgtatccattgcaagacctgtgatattaaggcgcccagacaagatattacttgggaagtacccgaaggtggagatggaccaaagtacacgctaacttaa

SEQ ID NO: 78792 - DNA, 489 bp, Saccharomyces pastorianus
atgccaagagaattcaaatcctttgggtctacagaaaagtctttgctgtcaaaaggacatggagagcctagttacagcgaaatatacgctgagcctgagaactttttagagattgaggtgcacaaccctaaaactcatataccaaatgggatggattcgaaggggatgtttacagattacgaaataatatgccgtacaaacttgccaagttttcacaagagggtatcgaaagtaaggagacgatactcagactttgaattcttccgcaaatgcttgatcaaggaaatttctatgcttaatcacccaaaagtcatggtacctcatttaccgggtaaaattctcttgagtaatagatttagtaacgaagtcattgaagagaggagacaaggtttgaatacctggatgcaatcggtagccgggcacccgcttttacaatctggttctaaagttctcgtgaggttcattgaagctgaaaagtttgtcggctga

SEQ ID NO: 78793 - DNA, 729 bp, Saccharomyces pastorianus
atgactgataggaatttctcaccacaacaaggacaaggacctcaagaatcgctcccggagggaccgcaacccagtacgatgattcagagagaggaaatgaatatgccaaggcaatattcagaacagcaacaactgcaagaaaacgaaggggaaggggaaaatacgaggctacctgtttctgaggaagagttccggatggtacaggagttgcaagctatccaggcgggccatgaccaagctaatctaccgccaagtggtcgaggatcgcttgaaggcgaagataatggaaacagcgacggcgcagacggagaaatggacgaggacgatgaagagtatgatgtgtttaggaacgttggtcagggattggtgggccactacaaggagataatgatccgttattggcaagaattaatcaacgagatcgagtctacgaatgaacctggttccgagcatcaagatgacttcaaatcacattccttaccatttgcgagaatccgcaaggtcatgaagacggatgaagatgtcaagatgattagtgcagaggcccccatcattttcgccaaagcctgtgagatctttattacagaactgactatgagagcttggtgcgtggcagaaaggaataaaagacgaactttgcagaaggcagatatcgcagaggccctgcaaaagagtgacatgtttgactttctcatcgatgttgtgcctagaagacctcttccacaatga

SEQ ID NO: 78794 - DNA, 1572 bp, Saccharomyces pastorianus
atgaaacatccgtatgaggaattccccacaggttccaagtcaccatataacatgtctagaggagctcatccaggcgccgttttgctatcaccacaatcttctgccataaacaagaacaatccgggcagcaattctggcaataaccagggcaattcatccgtgaccgcgaatgttttgtcccctcaatcccatagtatgtcactcaatgacatgcttaatcagcaatcctttatgctagacactgcgggaaccagggctcagccgctccagcaacaacagcagcagcaacaacagcaacagcaggcgtcgttgccttcccttaatattcaaacagtttcgtctacagcagctggttctgctatcgtttcccccatgatacaatctccaaaggcgttgcaatctactttatcttcaacatctatgtatttggattcatttcagagatctccaaataatattttgggtattccatcgcagagtggttcaattcctttgccgcaatcccgtcaatcgcaacaacagtctcaatcccaaaaaaacgatccgaacatgggcaccaatttcagccaagacatcaatcaattatgttcttggatatccatgctgaacagcagtcaacaaaatactgtaatggacaatatccttttcattttgaatgatgatgttttgaaatatactaagttaaaaatagagactttgacaaacactcccttcatctccccaccgctacctgcaattgcatcacctatacctaatagggatgacacacaaattttgaatattgattcagtcttttcttcaagtcctataactaatgaccctgaaaataccgataacttgttgtatcaaaattggtcccctcagccacattcaataccaattagccaacccatatatgacaacatcaccgacgctagtcaaaggtccaagtcggctgagcctcatgttaattcaagcccaaatctcattcctgtccagaaacaattcaacaacggtaacagtaccaaatataaaaagttgccatcagagaatcccaactatctttctcactctctctcaagttcccattcttttttccaaccaaagaaaaggtctaacatgggaaatgagtacaattctcatcaccatcattcattgcatcatcctctgcataataccacctcatatttttcgaatacttcaagaccatcaggaactgatttgaataagtccaaccagaacgtgttcaataataccattacgcatcctaatgctggtcctacaagtgccacatcgacatctacatcatctaacggaaacactcctttatcgagtaactcttcgatgaatccaaagagtttgacagaccccaagctactaaaaaatatacccatgtggttaaaatcgttaagactacacaagtattcagatgccttaagcggaaccccgtggatcgaattgatttacttagatgacgagactttagaaaaaaaaggcgttcttgccttgggtgcaaggagaaaattgttgaaggcttttggaatcgttattgattacaaagaacgtgatttaattgatagatctgcttattaa

SEQ ID NO: 78795 - DNA, 1581 bp, Saccharomyces pastorianus
atgtccaccctttttctgattggaatacacgagattgagaaatctcaaacaattgtacagaatgaacactattttgatagagtgattgagcttcaagatttggattctctgatggtagcattgtataaggacagagtttcgccttttccaaacgtccataactttgaaacgggcgtatctatagttctttatgacccttcaaaatttcaattatctgtgcgacaattggatgttctattcaagcgatttttcccatctttcaatatttctgcgatagatcatacacgagaggaaaacttgcaacgtcttgaatgtgtcgagcgtgaaaatagcatctgtcgtaatagaataacgagaattaaccactggatgtatcaccatcatgatgatactccagacggtattaacaaaaacagctatggtactgtaaatgggaattctgtccccactcaagcatgtgaagcaaacatttacactttattattgcatttgaatgattccaaggcacaacatttacgaaaggcatcagtgccaaggctaattcgcaacatcgagtttatgtcttttttgtcagatccaatagaaaaaatttctcaagagggatctcattattggaacattctatcaacttgggacttttgtgctttatcattaagcactcaagaattgatttggtgcggtttcacgcttatcaaaaagttatctaaggatgcaaaagtactcattgcagataataagttactgctactactatttactttagaatcatcctatcatcaagttaacaaatttcacaattttaggcatgccatcgatgtcatgcaagccacatggcgattgtgtacatatcttcttaaagataatcctgtacaaacattactgttgtgtatggctgccataggtcatgatgtcggtcatcctgggactaacaatcaactattgtgcaactgtgaatcagaggttgctcaaaatttcaaaaatgtctctatcttggagaatgttcacagggaattatttcaacaattgctatcagagcattggcctcaattgctatctatctccaaaaaaaaatttgattttatttccgaggctattctggctacagatatggcattgcattctcagtatgaggatagattaatgcatgaaaacccaatgaaacaaatcactttgatatctctaattattaaagctgcagacatctctaatgtgacgagaaccttgtcaatatcagcacgttgggcatacctcattactctcgaatttaatgattgcgctcttttggaaacatttcataaagctcaccgcccagaacaagactgttttggcgattcatacaagaatgttgattctccgaaagaagatttggaatcaattcaaaatattttggtgaacgtaacagaccctgatgatattatcaaagaccatccgcatattccaaacggtcaaatatttttcattaatacgtttgctgaagtatttttcaacgcattgagtcaaaaattctcaggattaaaatttttaagcgataatgtcaaaatcaataaagaatactggatgaaacacaagaaaccacaatag

SEQ ID NO: 78796 - DNA, 369 bp, Saccharomyces pastorianus
atggtcttacaacctttcaaattccaaaatcagaagagattttgcaggaaggcaaaccctaccggacgtattagtcacgattttatttattcacatatacagatattcacagttcgaattttgtttacaaaggtcaatcttattgatctgcggcttttgaatactgttgcattcaagaacggctttcttcatttcgtgcagttccgggaccgattcgtaaaccgcatcatcatccatttcacccttcaaaaaggatcgtctttgatcatcaataggtttgtatcttgtatcagggtgtttgtagtatattgccatcgtaaagcatatcaatatgaaaatgaagagatacaaagaaaacgctgcatttag

SEQ ID NO: 78797 - DNA, 1206 bp, Saccharomyces pastorianus
atgcgaatcaacagtgagctagcgaacaagttttctgcctcaacggtgcacttagaacatatcacaactgctttaagttgtttaacaccttttggttctaaagacgatgtgcttatattcattgatgctgatggcctgtcatttgtcagggagaataatcatgtgataaaaatccaactactgttatctcgggagctatttatgtcttattcgtatagaaatgaaactgaggatcacatgaaactttgtgtgaaaataaatcatatcttagatagcgttagcgtgatgaacaggaattcggatgacattgttgagtgtactttatcttatgatggacatggatcaccacttgtactaatatttgaagactcgttcatttctgagagagtggagtactctacctacttaattaaggattttgatactaatggactagaactcgatagagaaaggataagctttgaggcaattattaagggcgaagcccttcattcagccttaaaggatctaaaagaaatcggatgcaaagagtgctatgtatatgcaaagaccgaggcgaatgatgagaatgtatttgccctgatatctaaatctcagctaggattttctaaaataaagttacccagtaacagatccatactagagaagttacaagtatttgacggagattccacaacagtaatagatggttttgctgtaattgggttcttcgatttcacctcgtttgataaaatcagaaagagtactaaaattgcaagcaaagtccttttcaggatggatgttcatggcgtattgagtgtaaatattctaagtcaaacagacgatgtcattatcactgatactacaagaccttcaaataatcgaccaggtagtattcgccaactgcagctacccaaggattatcccggtatagtaattgaggtttgcatgctagaaaaagaatccatagatgaggcagcacagacagaaatagaactcctgatggagactaatgaacttggcaatcgtaatagttttaaaaaatcaactataagaaaaagatatggtacagataaaggcaatgaaacttcaaatgacaacttgctgcaattgaatgggaaaaaaattaaactaccatctgaagaagaaaacaataaaaacagggaaagtgaggatgaagagaatcactgcaagtatccaacaaaggatattcctatatttttttaa

SEQ ID NO: 78798 - DNA, 432 bp, Saccharomyces pastorianus
atgtctgacgttgaagaagtcgttgaagttcaagaagaaactgttgttgaacaaactgccgaagttactatcgaagatgctttgaaggttgttttgagaaccgctttggttcacgatggtctagctagaggtttgagagaatctaccaaggctttaaccagaggtgaagctttattggttgttttggtcagctctgttactgaagctaacattatcaagttggttgaaggtttggctaacgacccagaaaacaaggttccattgatcaaggttgctgatgctaagcaattaggtgaatgggctggtttgggtaagatcgaccgtgaaggtaacgccagaaaggttgtcggtgcctccgttgttgttgtcaagaactggggtgctgaaactgatgaattgtccatgatcatggaacacttctcccaacaataa

SEQ ID NO: 78799 - DNA, 1812 bp, Saccharomyces pastorianus
atgttaagtcctgaacgtagaccatccatggcagaacgccgcccatcatttttcagttttactcaaaatccaagtcctctagttgtcccgcatttagccggtattgaagaccctttgccagccactacaccagataaagttgatgttttaatcgcagggactggtatggtagagagtgtattggctgctgcattagcttggcaaggttccaatgtccttcatattgataagaatgattattacggtgacacttcagccacactaactgtagaccaaatcaaaagatgggtaaatgaagttaatgaaggctcagtaagttgctataaaaatgcgaagttgtatgtatccacgctaatcggtagtggtaaatattcttcaagagatttcggtattgatctttccccgaagatcctatttgcaaaatctgatttattatccatcttaatcaaatcaagagttcaccagtatttagaattccaatctttatctaatttccatacttatgaaaatgattgtttcgaaaaactaacaaatacaaagcaagaaatattcacggatcaaaacctaccactaatgacaaagaggaacttaatgaaatttatcaaattcgtactcaactgggaagcacaaacggaaatatggcaaccctacgcggagaggaccatgtctgattttttagtggaaaagtttaaattagaaaaaccacaagtcttcgaattaatcttctcaattgggttatgttatgatctcaatgtaaaagtaccagaagctttacaaaggattcgtcgatatctaactagtttcgatgtttatggaccattccctgcactatgctccaagtatggtgggccaggagaattgtcgcaagggttttgtagatctgccgctgtaggtggcgctacttacaaactcaatgagaaattggtatccttcaaccctacaactaaagtggccacattccaagatggatccaaagttgaagtttcagagaaagtgataatatcacctacgcaagcacctaaagacaataagcatgtccctcaacaacagtaccaggttcatcgtttgacctgtatagttgaaaacccctgtactgaatggttcaatgagggtgaatcggccgccatggtagtcttccctcctggctctttgaaatctggtaataaggaagtagtacaagcctttattctcggtgctggcagcggaatttgtccagaaggaactattgtatggtatttatcgaccacagaacaaggcccacgtgctgaaatggacattgatgccgctctagaagctatggaaatggccctgctaagggaatcgtcttcaggtttagagaacgacgaagaaattgttcaactaacgggaaatggtcatacaatagtaaattcagttaagttaggccaatcttttaaggagtatgttcctagggaaagattacagttcttatttaaactttattatacccaatacacatccacgccaccctttggtgtagttaactcctccttctttgatgtaaatcaagatttggaaaaaaagtatatttccggtgcgagtgataatggcgtcatatatacaaccatgccttctgctgagatatcgtatgatgaagtagtcaccgcagccaaagttttatacgaaaagatagttggcagtgatgatgacttcttcgatttagattttgaagatgaggatgaaatacaggctagcggcgttgctaatgcggaacaatttgaaaatgccatagacgatgacgacgatgtcaatatggaaggttccggtgaatttgtaggtgaaatggagatatga

SEQ ID NO: 78800 - DNA, 2694 bp, Saccharomyces pastorianus
atgcctcaagcaagcacattcggatcgcacagtctagaagctcatcccttacacattcagccagctgttcatatcaaactcagtaaagaggaaaggtctcactacagggagcaatacgattcattaaagtatatttcaaattatgtttctgttttcgaccaagcgttaagcgacaatattgactctaggattagaaaagaaaatgaagccttactgaaaaaatattatgaatcaagaaaaccttttacttttaccagctttaggcaaggaagtgtaattagttcttctgattcttctacaggcttcactgagagaacaaagacctactgttttttgaacgatttcgtcagtaattgcgtaaatgaggtagatccatatacgctgaaaatgacagtaagaaatagaaacactgccttgaatatggagaacctcgatgatgaacgtaagagcaaagatgatatatacgattttgaagataatactgacgacgagtgtaatgccaagtgccatggtgctttccattattcgtcagaaagattggaaattcttcgctcacgttcgacaatatcgtactttaagtattataaaaagcttttgacggtagacctaagggacagtgatgttttaaaaaggcataatttatggatgccaatgatcactagaagatttagatttttattagtatcaagttcgaaaccggaagatgtaaggttaacaacgccgattccaacattctcggaatccgatttagacattttcaagaacaagacatgtccactctttatcaatggtacagactgtgttcctagaagttatgacacattttcgggttcttctgtaatcgcttcaatattttcagaatataaacttccatccctttcatatcattgttctgtcgagttgaacgaccaattatttattgtcggtggtttgatggcatgtcatagatatgatgaggaagcgcctgatctaaaggatttttacgtggatggcataaagaatttaccgccaccactaataccagagctaattaataacccatccatgattcctaatcctcacttgtactgtttttccttgacttcttccagactaacaagacctgatatttctggttacattccgcccccactggtgtgcacccagggctgtaaattaactgaaaggcatatctttttgtatggcgggtttgaaatcaagtcggaaacccaagttgatgataagggaagatattttataagaaaaagagcttttttgaacaatactggttacattctagatacagtgacgttcaatttctcaaagattgaattagtcgctcctccgtatcagtttgcaatttacaataatttctcgccaagatttggtcacatgcaggcatcaataagtaattccaacaataatgtatccaatgaaaataccacaacaagtgcgaaaggaagaaggtcgataagcccatatcgccaaggtaatggggatcacaaaatagatgatttggttggttcaccaggaagtacggactatttagaggatgatgcaattccacctgtaacaaacccaaggtctacagatagtctctcttccaaacattgtagcacagcaacacacatttgctcatctgttaataccattctgatctttggagggtatagtcagactggtgacgacaagtatgaagctatgaatgacatgtggaagataaatatccctgtagtttctcgtgggaaacgtaattattataaatttgcagatactgtaactgctactaagatccctattattgatgatccagaattatggccgagcagaagagccttttcagcgtgctgtgtaccagattattttaccaaggatgttgaacccatagaaacgagattactgaggaacttgaaaaatgacttctccatcgatttggtaatacgcccaggaaataagccttctcaaccactttttccgaatatcccacattcaaggaaggagaagaagagtggtcgcgatagtatgcatatttccaattctaataatagtactagtgaagacacttcttcaaagtctaccaggaataccacatccagtcctcccacaagccctaagcatacaccaccattgaatccatcaaaaaaatgtgcatcaatcggaagaactattgcgttccacggaggttcagatggctatgacgtttgcagcgatatgtggtggtttgacttcgattccgaaacctggactaaaatagacctttatgccaaaacacaagaggaatctgatggtttggtacctatcaacttatgtatggtaggacactcaatgacaactgtaggccacaaggttgtgcttatcgggggtctacgacaaggtgatgttgaccgaatataccgggacgaaactcttcctgaagaagtaatatcgggtgttccactcggaagtggcgttataaatgtcgtggatttaaatacacaatgccttcaaggttgcaagctaatacgaaatgatggagatactaaagaatctgtcattatggatcctcatgtcggcacaccccaccaagtattggccgtcgcaggtactatagaactggtcaaaggaaccatgaccttaataggaggtgtagtagccggtcgcgaagacatttcgagcctttacttgagaggagctgtcttacaattcattctaccaagcatgaatctagccaactaa

SEQ ID NO: 78801 - DNA, 1671 bp, Saccharomyces pastorianus
atggacagagatataagctaccagcaaaattatacctcaactggggcaactgcaacttcctcaagacagccctctacggacaataatgcagatacaaattttttgaaggtaatgtcagaattcaaatacaattttaacagtccgttacctacaacgactcaattccccacgccctattcttctaatcagtatcaacagactcaagatcattttgccaatacagacgctcacaacagttcgagcaacgaatcgtcgttggtagagaacagtatattaccgcatcatcagcagatacaacagcaacaacagcaacaacaacaacaacaacaacaacaacaacagcaagctctaggttcacttgtacctcctgctgtcacaaggacagatacaagtgaaactttggacgatatcaacgttcaaccttcttctgttttgcagttcggcaactctttacccagcgaatttttggttgcatccccagagcaagtcaaagaatttttgttggactctccgtccaccaatttcaatttctttcacaaaactccggcaaagacaccacttcgatttgtaacagattctaacggtgctcagcaaagcaccacagagaacccaggtcaacaacagaatgtttttagcaatgtcgatttgaacaatcttttgaagagtaatggaaaaacaccctcatcttcatgcaccggcgcattttcacgcactcctctgagtaagattgacatgaatctcatgttcaatcaaccgctgccgacatctccatcaaaaagattctcctccctgtcgttgacaccatatggaagaaaaattctaaatgacgtcggtacaccttatgcaaaagcattgatatcgtctaacagtgcgttagtggattttcagaaggcaagaaaggatattaccactaatgcaacatccatagggctggaaaatgccaacaacatcttacagagaacgccgctaagatctaacaataaaaaattatttattaaaaccccccaggataccatcaatagcactagcacactaactaaggacaacgaaaataaacaggacatatacggctcttcaccgactaccatccaattaaattcatcaataactaaatctatctccaaattggataactctagaattcccttgttagcttcgagatcagataacattctggattccaatgtggatgaccaattgtttgatttggggttgacaagattacctttatcaccaacaccaaattgtaattctttgcatagtacaaccacaggtacatctgccttacaaattcctgagctacccaagatggggtcttttagaagtgatacgggaatcaatccaattttaagttcaaacacagtttcttttaagagcaaatcaggcaataataattcaaagggtcgaatcaaaaaaaatgggaagaaaccttccaaatttcaaattattgtggcaaatattgatcaatttaaccaggatacatcatcgtcatctttatcatcatcattgaatgcaagttcgagtgcagggaattcaaattcaaacgtaacaaagaaaagagcaagtaaactcaaaagatcacagtctttactttctgattccggatcgaaatcacaagcaaggaaaagctgtaattctaaatctaatggaaatttattcaattcacagtaa

SEQ ID NO: 78802 - DNA, 1560 bp, Saccharomyces pastorianus
atgttcagtagatctacgctctgcttaaagacgtctgcatcctccattgggagacttcaattgagatatttctcacaccttcctatgacagtgcctatcaagctgcccaatgggttggaatatgagcaaccaacggggttgttcatcaacaacaagtttgttccttctaaacagaacaagaccttcgaagtcattaacccttccacggaagaagaaatatgtcatatttatgaaggtagagaggacgatgtggaagaggccgtgcaggccgccgaccgtgctttctctaatgggtcttggaacggtatcgaccctattgacaggggtaaggctttgtacaggttagccgaattaattgaacaggacaaggatgtcattgcttccatcgagactttggataacggtaaagctatctcttcctcgagaggagatgttgatttagtcatcaactatttgaaatcttctgctggctttgctgataaaattgatggtagaatgattgatactggtagaacccatttttcttacactaagagacagcctttgggtgtttgtgggcagattattccttggaatttcccactgttgatgtgggcctggaagattgcccctgctttggtcaccggtaacaccgtcgtgttgaagactgccgaatccaccccattgtccgctttgtatgcgtctaaatacatcccacaggcgggtattccacctggtgtgatcaacattgtatccgggtttggtaagattgtgggtgaggccattacaaaccatccaaaaatcaaaaaggttgccttcacagggtccacggctacgggtagacacatttaccagtccgcagccgcaggcttgaaaaaagtgactttggagctgggtggtaaatcaccaaacattgtcttcgcggacgccgagttgaaaaaagccgtgcaaaacattatccttggtatctactacaattctggtgaggtctgttgtgcgggttcaagggtgtatgttgaagaatctatttacgacaaattcattgaagagttcaaagccgcttctgaatccatcaaggtgggcgacccattcgatgaatctactttccaaggtgcacaaacctctcaaatgcaactaaacaaaatcttgaaatacgttgacattggtaagaatgaaggtgctactttgattaccggtggtgaaagattaggtagcaagggttacttcattaagccaactgtctttggtgacgttaaggaagacatgagaattgtcaaagaggaaatctttggccctgttgtcactgtaaccaaattcaaatctgccgacgaagtcattaacatggcgaacgattctgaatacgggttggctgctggtattcacacctctaatattaataccgccttaaaagtggctgatagagttaatgcgggtacggtctggataaacacttataacgatttccaccacgcagttcctttcggtgggttcaatgcatctggtttgggcagggaaatgtctgttgatgctttacaaaactacttgcaagttaaagcggtccgtgccaaattggacgagtaa

SEQ ID NO: 78803 - DNA, 1365 bp, Saccharomyces pastorianus
atgtcagagccagaatttcaacaagcttacgaagaagttgtctcctctttggaagactctactcttttcgaacaacacccagaatacagaaaggttttgccaattgtttctgttccagaaagaatcatacaattcagagtcacctgggaaaatgacaagggtgaacaagaagttgctcaaggttacagagtgcaatataactccgccaagggtccatacaagggtggtctacgtttccatccttccgtgaacttgtctatcttgaaattcttgggtttcgaacaaatcttcaagaactccttgaccggcctagacatgggtggtggtaaaggtggtctatgtgtggacttgaagggaagatctaataacgaaatcagaagaatctgttatgctttcatgagagaattgagcagacacattggtcaagacactgacgtgccagctggtgatatcggtgttggtggtcgtgaaattggttacctgttcggtgcttacagatcatacaagaactcctgggaaggtgtcttaaccggtaagggtttgaactggggtggttctttgatcagaccagaagccactggttacggtttagtttactatactcaagctatgatcgactatgccacaaacggtaaggaatctttcgaaggtaagcgcgtcaccatctctggtagtggtaacgttgctcaatacgctgccttgaaggttattgagctaggtggtactgtcgtttccctatctgactccaagggttgtatcatctctgaaactggtatcacctccgaacaagtcgctgatatttccagtgctaaggtcaacttcaagtccttggaacaaatcgtcaacgaatactctactttctccgaaaacaaagtgcaatacattgctggtgctcgtccatggacccacgtccaaaaggtcgacattgctttgccatgtgccacccaaaatgaagtcagcggtgaagaagccaaggccttggttgctcaaggtgtcaagtttattgccgaaggttccaacatgggttccactccagaagctattgccgtctttgaaactgctcgttccaccgccactggaccaagcgaagctgtttggtacggtccaccaaaggctgctaacttgggtggtgttgctgtttctggtttagaaatggcacaaaactctcaaagaatcacatggactagcgaaagagttgaccaagagttgaagagaattatgatcaactgtttcaatgaatgtatcgactatgccaagaagtacactaaggacggtaaggtcttgccatctttggtcaaaggtgctaatatcgcaagtttcatcaaggtctctgatgctatgtttgaccaaggtgatgtattttaa

SEQ ID NO: 78804 - DNA, 369 bp, Saccharomyces pastorianus
atgaaaaacagaaaattttccaatcttctcttacttagattacgtatactttgctttaacaagaagccggcctttgctgctacttcttacgctttcttcttccgcaatttttcagtgctgattttcattatggtacctgatgaaaaagaaaacggcgcagcagctgataacagcttctctctgctgattggacgtggggtcgtactatttcttttttattgccccaccgcactgaaaatgcatgggccggttccggcgcattggttctgcgataagaatatcgaggccatccaatcagatggtcagataaggttattaagatcaggcccgtttccatggagtcatggaacctgcataaggggagcctga

SEQ ID NO: 78805 - DNA, 156 bp, Saccharomyces pastorianus
atgacattccatcttgggtggacaattttatggtataatcaagcgtatttagaagtttgggcgacagtatttcaagacgagatgcataagtattctcttcatcctcaatcccgcgatgctaaaacaaagttttgttgttgcattccatttaagtag

SEQ ID NO: 78806 - DNA, 1548 bp, Saccharomyces pastorianus
atgtcaactagctcctccgtaacgcagaaaaacttggatacaaacgcggaagccttgaaaaaggagaatgaagtattatcagagtttgatattcaggatgagaggcctaaatcccttttatgggagagtgcctttgtcggagtgctgtgctctgcccagctaatgactcaggcaggacttggacaatcattagcgccgcttcacatcatcggtaacagttttggaacaacgaatgctgggcaacttagttggtttgcttccgcatattcgctaactgttggtacattcattttaattgctggaagactcggagatatcttcggacacaagaaattctttgtccttggcttcttttggtacgcactttggtccttacttgctgggtttagcgtctactctaatcagattttttttgactgctgtcgtgcatttcaaggcatgggtccggcctttttgttgccaaatgccattgcgattctcggacgcacatacaagccaggaagaagaaaaaacatggtctttagtctgtttggtgcttcagcacctggtggcttcgtccttggggctgttttctcatccatgttgggtcaactggcgtggtggccatgggcttactggataatgggtattgcatgctttgttttagctgtagcaggttactttgtaatccctcacacccccatgccaagccgcgatgcctcatctttcaagttgttggaacgaatcgattttgcagggtcagttaccggcgttgttggattaattctctttaatttcgcttggaaccaaggccccgttgtgggttggcaaactccatacacatatgctcttttgatagttggaacctttttcttggttatttttgcatatatcgagtcccgagcagctttccctctgctaccatttgctgctctttctagtgatactgcttttgtactcagctgcatagctgcgggatgggccagctttggtatttggatattctatacatggcagttcatggaagactcaaggggccaaaccccccttctttctagtgcacagttttcacctatagcaatcagtggattttgtgcagccgtgacgacaggtttccttctaagccatacacccccaagcacagttatgctttttgcgatgacagctttcacagtcggaactatattgattgctacggcccccgttcaccaaacgtattgggctcaaacgtttgtgtcaatcattgttatgccttggggaatggacatgtcctttccggccgctacaataatgcttagtgactcgatgccacacgaacaccaaggtcttgcagcctctttggttaatacggtggtaaactattcgatatcgataggtttgggtattgcaggtacaattgaatctagagtaaatgacggaggtgccaagcctttgaaaggatatcgttgttcgtggtacatgggcatcgggttgagcggacttggcatttttgtcgcagcaacgtatgcatggagcacttttatgaagtctaaaaaaaggatctccgaaaagcagcattttatagaataa

SEQ ID NO: 78807 - DNA, 339 bp, Saccharomyces pastorianus
atgaacttattctataaaatgctgcttttcggagatcctttttttagacttcataaaagtgctccatgcatacgttgctgcgacaaaaatgccaagtccgctcaacccgatgcccatgtaccacgaacaacgatatcctttcaaaggcttggcacctccgtcatttactctagattcaattgtacctgcaatacccaaacctatcgatatcgaatagtttaccaccgtattaaccaaagaggctgcaagaccttggtgttcgtgtggcatcgagtcactaagcattattgtagcggccggaaaggacatgtccattccccaaggcataacaatgattga

SEQ ID NO: 78808 - DNA, 1641 bp, Saccharomyces pastorianus
atggcatccccaggatcgacagcagtaccacacaagcgacaaagagtccgaaaggcttgcgtgccctgtagggaacgtaaaaggaaatgtaatggcaaatctccatgtgaaatgtgcgttgcctatggatatgtatgtcattatattgacagtcgtgtcccttcggcatcacctcaagtgcaacaagtaggtgaaacatctcctgatacggagagcagaccttttgttcttccgggtatacatagaaacgaacaaccgcagcctataaatacacagaacgttacaagtcaaaacattgtagatccaactaagtctagatacacgatccagcactctgcagttgctttcccccgctgtcttggtctcgaactccgatcaactaatcctccacgcctacattccttcgcttggcattgcggaatcagaccggaagaaaatccaaactcacatgcccttctttctgatttagttacaaaggaagagtattaccgtatctcaaaagtttatttttcagttgttcacccgatatttgatgttgttaatccagagcaactggcaaagaatgttgaaaaatactgggatggcgacgtaaaaaccttagagtatggggctgttattgcaggggtgatagctttaggatcattttttatgggaagtcttggccatccccgagagatggatatagtacaatatgccaaaggcatccttgatgacccgactttcagtcgcattcccacggtggagcaagtctccgcatgggttttgcgcaccatttacctgcgagccacttcgaggccccatgtagcatggttagctagctgcgtaaccatccatctttctgaggcaattggcctgcatcatgagattgacagagaggatatagcgatatcgaacaacgttccaccaaaaagaactactgtagtgagcgaacacactagaagattattttggtgtgcatggtcaatcaataccattctttcatatgactatgggcgctcaagtgttacgctgaatagaattacttgcaagccagttaaggagacggacggtaattttacagctcatttagtcgcgttagcacacctgattccccaagacagcgtgaacgcaaacgcagcgcaattgttgcaggccctggcggccgttcatgaatcaccaaacgcacatccgtttttgtcgttgaccaagggtgatatatgcctctctttgtatagaagacttcgtttgctgaatcatattcttgataaaaatgttgttttacaaataattgatatcggcaacactgcgctatcagcagcatacgctcttgtaaaactcgatcaagcatggtggaatgtgttgagcacctcattccagtacgtctgtgtccttcttgccatcgacacaccggaaagtctttcacatgttgctactgccatgaaaacgttagataatattactcaaattctcggtacacatattgcttttgaagcacaaaagaccgcaaaactgcttcttgaggattccatgaaaaaaaaaagacaagaaattcagcagcttgagcaggcaactcaccagagatctaatcttgaaactactcacctactcgatattgactgggatgctttgctagatccatcagacacgttaaactttatgtaa

SEQ ID NO: 78809 - DNA, 2136 bp, Saccharomyces pastorianus
atgtattgggtcctcctttgtggttctattttgttatgctgcttgtcaggagcaagcgcctcccctgctaagacaaaaatgtacggcaagttaccactggttttgacagatgcctgcatgggagttctcggcgaagtaacctgggagtatagtagtgacgatttatattcctcaccagcatgtacatatgaaccggcattacagtcaatgttgtattgtatttacgaatcattgaatgaaaagggttattccaatagaacctttgaaaaaacctttgctgctatcaaagaagactgcgcatattacactgataaccttcagaatatgactaatgcagatttctataatatgctgaataatggaacaacatacataatacagtattctgaaggtagcgcgaatcttacgtatccaatcgagattgatgcccaagtgagagaaaactattattattcttaccatggtttctacgccaactacgacattggtcatacttatggtggtattatttgcgcctattttgtaggtgttatgattcttgccagcatactccattatctaagttacactccgtttaaaactgccttatttaaacaaagacttgtaagatatgtgagaagatatttgacaatacctactatctggggtaaacatgcgtcgagcttttcttaccttaaaatttttacaggcttccttcccacacgatctgaaggcgtcattatacttggatacctcgtgcttcatacagtttttctggcatacgggtatcaatatgatccttacaacttaattttcgactctcgtagagaacagattgctcgatacgtggcagatagaagtggtgtcctggcatttgcacattttcccctaatagctcttttcgcaggaaggaacaattttctagaattcatttctggagtaaaatatacctctttcataatgtttcataagtggttgggaagaatgatgtttttagatgctgtgattcatggcgctgcttataccaattattccgtattctacaaagattgggcagcaagcaaggaagagacatattggcaatttggagtagctgctctttgtatagttggtgttatggtgtttttttctttggcaatgttcagaaagtttatctatgaagccttcttatttctccatattgtgcttggcgcattgttcttttatacgtgttgggagcacgtcgtagaattgagtgggattgagtggatatacgctgctattgctatctggactattgataggctaattcgaattgttagagtatcttatttcggtttccctaaggcttccttacagttagttggcgatgacatcattcgagtcacagtcaaacgaccagtaaggctatggaaagccaaaccaggacagtatgttttcgtttcattcctacaccacctgtatttttggcagtcacatcctttcacagtcttagattcaattatcaaagatggtgagctgactattatcctgaaggaaaaaaagggagtaacaaaacttgtcaaaaagtatgtgtgttgcaatggaggtaaggcatctatgagactagctatagaaggtccatatggttcttcatctccggtcaataattacaataatgtattgttactcactggaggtaccggtttgcctggacctattgcacatgcaattaaacttggaaagacgtcagcggctgctggaaaacaatctgtaaaattagtgattgcagttagaggattcgacgtactcgaggcttataagccggagttgatgtgtttagaaaatctgaatgtacagcttcacatctacaacacaatggaagtcccatcattaacccctagtgatagtttagatatttctcaacaggatgagaaggctgatgaaaaaggcactgttgtggcaactactttagaaaagtctgccaatccacttggttttgatggtgttgttttccattgcgggcggccaaatgttaaggaacttctacatgaagcggctgaattgagtggctcattatctgtggtttgctgtggacctcctatttttgttgacaaagtgaggaatgaaaccgcaaaaatagttttagataagtctgcaaaagccattgagtactttgaagagtatcaatgctggtga

SEQ ID NO: 78810 - DNA, 495 bp, Saccharomyces pastorianus
atgaccaatgaaggaataggtataaatagagatacttcaactatatgccttcgagaatatgtctttattcatttctttcctgttaagcttatatcagcactaacaaacaaaacaaatacaatggtcaaattaacttcaatcgctgctggtgttgccgccatcgctgccggtgttgccgctgctccagccactaccactctatctccatctgacgaaagagtcaacttggtcgaattgggtgtttacgtctccgatatcagagctcatttggctcaatactacttgtttcaagcagctcatccaactgagacctacccagttgagattgctgaagctgttttcaactatggtgacttcaccaccatgttgactggtattccagctgaacaagtcaccagagtcatcactggtgtcccatggtactctaccagattgagaccagctatctccagtgctctatctaaggacggtatctacactgctattccaaaatag

SEQ ID NO: 78811 - DNA, 714 bp, Saccharomyces pastorianus
atgactccaaaaagagcgctaatatctcttacttcataccacggtcccttctacaaagatggtgcgaaaacaggcgtttttgtagttgagattttgcgatcgttcgatacattcgaaaagcatggtttcgaagtggacttcgtttctgagactggtggatttggctgggatgaacattacttgccaaagagctttattggtggcgaagataagatgaactttgaaacgaaaaattccgccttcaataaggcgttagcgaggatcaagaccgcaaatgaagtcaacgccagcgactataaaatattctttgcatctgctggacatggtgctctatttgactatcccaaagctaaaaatctgcaagatattgcatccaagatatatgccaatgggggtgtgatcgctgccatctgtcatggaccgctccttttcgatggattaatagatatcaaaacaacaagaccattgatcgaaggcaaagctataacaggttttccactcgagggtgaaatcgccctgggagttgacgacatcttgaggagcagaaaattgacaacggttgaacgcgttgcaaacaagaatggagccaagtacttggcgccaatccatccctgggatgactactctattacagatggaaagctagttacgggtgttaacgcaaattcttcctattcgaccacaattagagctataaacgtattatatagctga

SEQ ID NO: 78812 - DNA, 1128 bp, Saccharomyces pastorianus
atgattttcaatccggtcatatcaaatcacaagttgagccattatattcatgttttttgtacattcaccacgttctgcatattaggtactgaaacacgtcaggctataacggcgctttccacctacactccggccttcgttactgctccgaccgttctctggtctaattgttcatcctgcatgctaatggggattatgcaatctttaaatgcttacacttggatgaaagatcaccaagtcttgtttttaggtgtaactactgggtactgtggtgccctgtcttccttttctagtatgctgctagagatgttcgaacactctacaaacttaactaacggtaatatcgctaaccacacaaaactgccgaacagagcttacggtataatggagtttttatctgtcttgctcgttcatcttatggtttccatgggtagtcttattttcggtaggcaacttggtaaggaggttattgttgcttatggatctagttcgttttcgaagccatatacccctccctcagacactgtaaaggaaaatgctggtgatgttgatacacaagaaatggaaaaaaatattctagagtttaaattcaaaactccagcaccattttttaagaaattttttgatattgtggataaactcgcgtacgcactagcttttccattaattattttgtttgtggtgctgtgtgcgtattatgagaactattcgaggggcaagtggacactaccatgtctatttggaattttcgctggtttcctaagatattggttggcagaaatgtttaataaaacaaacaaaaagtttccattgggtactttcttggcaaacgttttcgccactttattgattggcatatttaccatggtgcaacgtggtaaaaaacacttttctacggacgttccaattgtgaactcgttgaattcatgtcatattgtttctgcgttaatatccggattttgcggcactttgagtaccattagcacgtttatcaatgaagggtataagctatcatttattaacatgcttatttattatactgtttcgattgcaatttcatattgcttattggtgataactctcggatcctatgcttggactagaggattgaccaacccgatttgttag

SEQ ID NO: 78813 - DNA, 303 bp, Saccharomyces pastorianus
atgacagataacacaacttccagcgacttaataaagaatgtcgaaacggctcgctccactatcgatggtttaattgaatctctagggtggattgaactaaattaccgttgtgagaggcaatgcaattgggatgaagtttgttacactccttcctggggcccatctccaatgggtatgactgaaccaggttcccacaatgagggatttggaacccactttgatgaatctcgacaaaggttggttattaacagtaaactacagtgtatcaatataaatgatttgatggttaatcgtaatcattag

SEQ ID NO: 78814 - DNA, 1461 bp, Saccharomyces pastorianus
atgcgattccatcgtcaaggtatctcagccatcataggcgtactactcattgtactgcttggtttctgttggaagttatctggatcttacggcatagtatcaactgccctaccacacaatcaatctgcaattaaaagcacagacttaccttctatacgatgggataattaccatgagttcgtcagagacattgattttgataacagtacggctatctttaattccattcgggctgctttaagagagtctccatcggatatacatcctgtcggagtatcttattttcccgctgtaattcccaaaggaactttaatgtaccatgccggatcaaaagtgccaactaccttcgaatggctagctatggaccacgaattcagctactctttcggcttgaggtcaccatcctatgggagaaaatctttggaaagaaggcatgggaggttcggcaatggcaccaacggtgatcatccaaaagggccaccaccaccaccaccaccagacgaaaaaggtcggggttcacaaaaaatgcttacttatagagcagcacgggacctcaacaaatttctctatcttgatggggcttctgctgcgaaaactgactcaggagagatggacacgcagctaatgttgtcaaatgttattaaagagaaattgaaccttacagatgatggtgaaaacgaacgaatggccgaacgactctacgctgctagaatatgcaaatgggggaagccattcgggcttgacggaattatcagggtagaggttggatttgaggtcgttttgtgtgatttttcggctgataacgtcgaacttgtttcaatgttagaaatggtccagcctaaccagtacctaggcttaccagcacctaccgtaatatcgaaggaagaaggttggcctctggatgaaaatggaaacctagttgaagatcagctaacagatgaccaaaaggcgattctggaaagagaagatggttgggagaaggctttttctaatttcaacgcagttaaaagcttcaatcagttgagagcgggtgcagcgcatgacaacggggagcatcgaatccatatcgactataggtacctagtgagcgggataaacaggacttacattgctcctgatcctaacaacagaagattactcgatgaaggaatgacatgggaaaagcaattggacatggtagatgacttagaaaaggctctggaagtcggatttgatgccacgcaaagtatggattggcagttagcatttgatgagcttgtccttaaatttgctccattactaaaatctgttagtaacatactgaacagcgatggtgatattaatgagtcaattgccatcaatgcaacagcactcacattgaacttttgtctaccaatatgtgagcccataccaggccttaaaaacggatgcagactttttgatttggtcatctgctgtcagcgttgtcggagaaattgttga

SEQ ID NO: 78815 - DNA, 438 bp, Saccharomyces pastorianus
atgtcgaagggaaaggttttgctggttctttacgaaggtggtaagcatgctgaagagcaggaaaagttattggggtgtattgaaaatgaacttggtatcagaaatttcattgaagaacagggatacgagttggttactaccattgacaaggaccctgagccaacctcaacggtagacagggagttgaaagacgctgaaattgtcattactacgccctttttccccgcctacatctcgagaaacaggattgcagaagctcctaacctgaagctctgtgtaaccgctggcgtcggttcagaccatgtcgatttagaagctgcaaatgaacggaaaatcacggtcaccgaagttactggttctaacgtcgtttctgtcgcagagcacgttatggccacaattttggttttgataagaaactataatggtggtcatcaataa

SEQ ID NO: 78816 - DNA, 711 bp, Saccharomyces pastorianus
atggtggtcatcaataagcaattaatggtgagtgggatattgccggcgtggctaaaaaatgagtatgatctggaagacaaaataatttcaacggtaggtgccggtagaattggatatagggttctggaaagattggtcgcatttaatccgaagaagttactgtactacgactaccaggaactacctgcggaagcaatcaatagattgaacgaggccagcaagcttttcaatggcagaggtgatattgttcagagagtagagaaattggaggatatggttgctcagtcagatgttgttaccatcaactgtccattgcacaaggactcaaggggtttattcaataaaaagcttatttcccacatgaaagatggtgcatacttggtgaataccgctagaggtgctatttgtgtcgcagaagatgttgccgaggcagtcaagtctggtaaattggctggctatggtggtgatgtctgggataagcaaccagcaccaaaagaccatccctggaggactatggacaataaggaccacgtgggaaacgcaatgactgttcatatcagtggcacatctctggatgctcaaaagaggtacgctcagggagtaaagaacatcctaaatagttacttttccaaaaagtttgattaccgtccacaggatattattgtgcagaatggttcttatgccaccagagcttatggacagaagaaataa

SEQ ID NO: 78817 - DNA, 1764 bp, Saccharomyces pastorianus
atggatatgctcaaaagggaaaatgaatcggacaagtttacgataatagagacagaatctactacgataccaaatgactcggatagatctggttcactgatcagaagaatgaaggattccttcaagcaaagtaacctgcatgtcattccagaagaccttgaaaacagcgaacagacaaagcaggaaaaaatccaatggaaactagcttctcagccctaccaaaaagtcttgagccaaaggcacttgaccatgattgccataggtggtactttggggacgggactgttcattggtttaggttattctttggcatctgggccagccgctttgctaatcggttttttgttagttggtacttcaatgttctgtgtcgttcagagtgccgcagagctttcctgccaattcccggtttctggctcatatgccacacatgtcagtaggttcatagatgaatcggttggctttactgtggctacaaactatgctttggcttggctgatttcttttccaagcgaattaattggttgtgcacttactatttcatactggaaccaaacggttaatccggctgtttgggtggccattttttatgttttcattatggtactgaacttgtttggtgtgagaggctttgccgagactgagtttgctctgtcaatcattaaggttattgctatatttattttcatcattattggtatcgtccttattgccggaggggggcctaactctactggttatattggcgccaaatactggcacgacccaggtgccttcgcaaaacctgtcttcaagaatttgtgtaacacattcgtttctgctgctttttcctttggtggtagtgagttagtgctgttaactagtacagaatctaaaaatatttcagctatatcacgtgctgccaaaggtacgttctggagaatcgcgattttttacattactaccgttgtcattattggatgtctcgtaccttataacgaccccagactgctcagtggttcgaacagtgaggatgtatctgcctctccctttgttattgctttgagtaatacaggatcaatgggtgcaaaagtttccaactttatgaatgtcgttatccttgttgcggttgtgtcagtttgcaattcttgcgtttatgcttcttcaagactaattcaagctttaggtgcatctggccaacttccttcggtatgttcctacatggacagaaagggtaggcctttggttggcattgggattagtggtgcatttggtcttttaggttttcttgtggcctcgaaaaaggaggacgaggtcttcacttggcttttcgccctttgttccatttcatcattcttcacctggttctgtatttgtatgtcacaaattagatttaggatggctttgaaagctcaaggaagatccaatgacgaaatagcttacaaatccatactgggtgtttatggtggaattttggggtgtgtgctaaatgcattgctaattgcgggtgaaatatacgtatcggccgccccggtcggtagccctagctccgctaaagccttctttgaatactgtttgagtattccaatcatgattgttgtttattttgcacataggttttatcgaagagattggaaacacttctacatcaagaggagcgagatcgatctggatactgggtgttccgtggagaatctagagcttttcaaagcacaaaaagaagctgagaaacaactcattgcttctaagccattctattacaaaatctacagattttggtgttag

SEQ ID NO: 78818 - DNA, 978 bp, Saccharomyces pastorianus
atggcacgtcttcctctaaagcagttcttagcggataaccccaaaaaagttcttgttcttgacggtggtcaaggaacagaactggaaaacagaggtatcaaagttgcaaatcccgtgtggtctactattccatttattagcgaatcattttggtctgatgagtcatctgctaacagaaaaattgtcaaagaaatgttcaacgatttcttgaatgctggcgcagaaatattgatgactacaacatatcaaacgagttataaatcagtttctgaaaacaccccaatcagaactttatccgagtacaataaccttttaaacaggattgtcgatttttctcgtaattgtattggcgaagacaaatatttgattggctgtattggcccatggggtgctcatatttgtcgtgagtttacaggcgactatggtgctgagccagaaaatattgatttctaccaatacttcaagcctcagttggagaatttcaataaaaatgacaaattggatttgattgggtttgaaaccattcctaacatccatgaactgaaggctatcttatcttgggatgagagtatcctgtctagacccttctatatcgggttgtctgtgcatgagcacggtgtcttgagagacggcactaccatggaagaaatcgcacaagttattaaggacttgggcgacaaaataaatcctaacttttcgttcttaggaatcaactgcgtcagcttcaaccaatcacccgacattcttgagtctctacatcaagcactaccaaatatggccttgcttgcttatccaaacagtggtgaagtttatgatactgaaaagaagatatggttgccaaatagcgataagctgaacagttgggatacggttgttaaacagtacattagcagcggtgcccgtatcattggtggttgttgcagaacaagtccaaaagacatccaagagatttctgcagccgtcaagaaatacacgtaa

SEQ ID NO: 78819 - DNA, 1554 bp, Saccharomyces pastorianus
atgactacgtttaggccactatcaagttttgaaaaaaaaattctcactcaatctttgaatgaccaaagaaatggaactattttttcgagtacatattcaaaatctttaagtagagaaaatgacgctgactggcattctgatgaagtcacgctcagaacaaattcttccaaagatgattctcgtctgactctgcccctaatagcaacaactttgaagagattgattaaatcgcaaccggcattgtttgcaactgtaaacgaagaatgggaattcgagccattgaagcagctgaaaacttccgatattgttaatgtgattgagtttgaaaccataaaagataaggaggtcaattgccattggggtgttccacctccttatctcttgcgtcatgccttcaacaagactagatttgttcccggatcaaataaacctttatggacactatatgtaattgacgaagcgctattggtttttcatggtcacgacgtattgtttgatatattttcagcggctaactttcacaaattatttttaaaagagttaaacgaaatcagcacagtaacacactctgaagataggattttgtttgatgtcaatgacatcaatctctcagaattaaaacttcccaaatcgatatatgatagcgcaaaattacacctgcccgctatgacaccacaaatcttccacaagcaaactcagtcatttttcaaatcaatatactataacactttaaaaagacctttcggctatttaaccaatcaaacttccctcagctcgtcagtatctgcaacacagctgaaaaagtataatgatattctaaatgcgcacacctcattatgcgggacaacagtatttgggatagtaaacaaccaaaggtttaactatttaaagtcaatcgttaatcaagagcatatatgtctaagaagtttcatctgtggtattgtaatgatatgtttaaaacctctcgttaaggatttcagcggtacaatagtatttactattcccataaatttaagaaaccacttaggcttaggtgggtcattgggtctcttcttcaaagaactaagggtcgaatgtccactttctctaattgatgacgaactttccgccaacgaatttttgaccaacagtaacgataacgaggataatgatgatgagtttaatgaaagattgatggaatatcaatttaataaagttacaaagcacgttagcggttttattatggcaaaactgaggagttgggaaaagaatgggtttaatgatgacgatataaggaggatgaagtatgacaatgacgacgatttccatatccaaaattcaaggacaaaattgattcaaatcaatgatgtttccgacatatcgctatcgatgaacggcgatgacaaatctttcaaaattgtaagtacgggatttacaagttcgataaatcgccccacattaatgtctctttcctatacatactgtgaagagatgggcctgaatatctgtattcactaccctgattcgtataatttagaatcttttgtagaatgcttcgaatcctttattgaatag

SEQ ID NO: 78820 - DNA, 189 bp, Saccharomyces pastorianus
atgtctgcctggaggaaagctggtatatcatatgctgcatatttgaatgtggccgctcaggctatccgttcttcattgaaaactgaattacaaaccgctagtgttcttagcagatcgcaaacagatgctttttatacccaatataaaaatggcactgcagcttctgaacccactccaataacaaaatag

SEQ ID NO: 78821 - DNA, 2463 bp, Saccharomyces pastorianus
atgaaaacttacgtacttttatacgggaaactaataatgactacaatgatattgaatactggccgcttcgaagagtggtataaagtttgtatcattgcattaaaagaaaaagaaatatatgtcccatcatcgccaatcgcaatgttgaatggtcgtttaccacttttgcggctgggcatatgcagaaacatgctgtcccgtccccgactggctaaactgccatctataaggtttcggtctttggtcaccccttcttcatcgcagctcattcctctcagtcggttgtgtttaagttcacctgcagttggaaaatcactaattttacaaagttttagatgtaattcatccaaaacagttccagaaacttctctgccttcagcctctcccatatctaaaggatcagcaaggtcggcacatgcaaaggagcaatctaaaactgatgactataaagatataataaggttatttatgttggcgaaacgggattggaaactgcttcttacagccatacttcttttaaccatatcatgttccataggcatgtctattcctaaagtcataggtattgtccttgacacacttaagacgtcatctggatcagatttttttgatttgaagataccgattttttctttgcctttatatgagtttctttccttttttactgttgctttactgattggttgtgctgctaattttggtagatttatattattgaggatactaagtgagcgtgttgttgcacgcctaagggcaaatgtcattaaaaaaacgcttcatcaagacgcagaattcttcgacaaccataaagttggggatttaatttctcgtttaggatctgatgcttatgttgtttcaagatcaatgacccagaaggtctcggatggggtcaaagccctaatttgtggggttgttggcgtggggatgatgtgttctttgtcacctcaactatcaatattgttactattcttcactccacctgttctttttagtgcctcagtgttcgggaagcaaattagaaacacctctaaagaccttcaagaagctactggtcaattgactagagtcgctgaagaacaactctctggtatcaagacggttcagtcgtttgttgctgaaggtaatgaattgtctaggtataacgttgcaattagagatatttttcaggtgggaaaaactgcggcatttacaaacgcaaagttttttactacaactagtctcttaggtgacctaagttttttaaccgtccttgcgtatggctcctatcttgttttacaatcacagctctccattggtgatctgactgcatttatgctgtacacagaatatacggggaatgcggtattcggcctttctaccttctattcggaaattatgcagggtgctggggccgcttccaggttgtttgaattaacagataggaaaccttccatttcaccgactgtgggacacaagtataaaccagatcgtggtgttatcgaatttaaagatgtttcatttagctaccctacaaggccttctgttcaaatattcaagaatttaaattttaaaattgcgccaggatcgagtgtttgtattgtgggcccttcaggtcgtggtaaatctacaattgcactcttactgctaagatattataatcccactactgggactattacgatagataaccaagatatctctaaattgaattgtaaatccctaagaaggcatattggtatcgttcagcaagagccggtactgatgtcaggtactattagggataatatcacttatgggttgacatataccccaacaaaggaagaaatcaggtcagtagcaaagcagtgcttttgccataactttatcacaaaatttccgaacacatacgatacggtaattggtcctcacggcaccttactaagtggaggacaaaagcagcgtattgcgattgcaagggctctaatcaaaaagccaactattttgattcttgatgaagctacatcagctttagatgttgaaagtgaaggagccattaactatacgtttggtcaactaatgaaatcaaaatcgatgactattgttagcatcgcgcacaggctaagtacgatcagaagatcagagaatgttattgtccttggccatgatggatcagtggtagaaatgggcaaattcaaagaattgtatgcgaatccaacaagtgctttatcgcaattacttaatgagaaagcggctcctgggccatctgaccaacaactgcaaatagagaaggtcatcgaaaaggaagatttgaatgagagtaaggagcatgatgaccagaaaaaggacgataatgacgataatgataataatcatgataacgacagcaataaccagtctccagagacgaaagacaataattcagatgatattgaaaaatctgtcgaacatctcctgaaagacgcggcaaaggaggctaatccaattaagatcacaccacaaccgtga

SEQ ID NO: 78822 - DNA, 1935 bp, Saccharomyces pastorianus
atggataatgatggacccagatctatgaccattggggatgacttccaagagaacttttgtgaacgtttagaaagaattcacaatacattacattcaataaacgattgcaactcattgaatgagagtaccacaagtatatcagagacattgttagttcaattttatgatgatttggagaacgttgcctcggtaattcccgacttagtcaacaagaaaagactgggaaaagacgatattttgttgtttatggactggttattattgaaaaaatatatgctatatcaatttattagtgacgttcataatattgaggaaggttttgctcatttgttggatttactagaggatgaattctcgaaggacgatcaggatagcgacaaatacaatcgatttagcccgatgtttgacgtcatagaagaatctacacaaattaagactcagttggagccatggcttactaacttgaaggaattattggatacgtcattggaatttaacgaaatttcaaaggatcatatggatacattacataaaatcattaatagcaatatatcgtattgtctggaaattcaggaagaaaggttcgcgtccccgatacggcatactccatcatttaccctagaacaactagtcaagttattaggaacgcatacggagacaactgagccaaaggtaccaaaattttctccggcagaagatattttatcaagaaagttcttgaacctaaaaaaaaatatccccccaattgaaaaaagtttgactgatatcctacctcaaagaattgtgcaatttgggcaccggaatataacaaacataactactttgcaaacaatcttgcaaaaaaaatacgagctgataatgaaagattatagatttatgaattcagagtttagggaattgaaagtcgaactaatcgacaaacgttggaatatactctttattaatttaaatcatgaactattatacattcttgatgagatagaaaggttgcagtcgaaattactgacaacaaagtataccaaagatatcactataaggctcgagaggcaattggagagaaaatcaaaaactgtttctaagacattcaatattatttacagagcattggaattctcgcttttggacgctggcgtcgcatcgaagacaaatgaattagctcaaagatggctgaatatcaagcctacagcggataaaattctaatcaaatcctccgcttcaaacaaaatagctactagcaagaagaagattccaaaaccgaaatcattaggctttgggcgaccgaatagtgttattggaactataacccaggatttccaggagagagtcgccattaatgaaggtgacagtaataaaacaccggaaaattcaactacagtggctttgaaaggtaaaaagcttggtaaagcgttactgcagaagatgaatattaaacctgcaacaagcccaaattcatcaaatgcgattaatccattttttgatccggagtcgccaaacaaaggaaaactgatactaagtagtgttcctcccttaccttatgacgaaaccgatgaaaccaccctccgtgtttctcgtggggaaaatgaaaagtcaccagactccttcattacatctcggcatgaaaataaagtacagattacagaaactcctttgatggcaaagaataagtctgtgcttgacatcgaaaaagataaatggaatcattaccggtccttgccctctaggatccctatatacaaggataaagtggtgaaagtcaccgtagaaaacacaccgatagtaaaggttttccagactccgccaacaaaaatcacgacacctaatagtcaagtttgggtcccttcgacaagaagaagaacccgattgaggcctcccacccccttatcacagttactttcaccaagagaagggcgtttagataaaaccccaacttattga

SEQ ID NO: 78823 - DNA, 2610 bp, Saccharomyces pastorianus
atgactgaaagtgctatagatgaccaaaggtttaatcttacaaaggagttacaacgacactcatgcagagatcaagggaaaataacacaaaaggatgatgctttagattttataagttacagttcttttcaatcctcttttaatactgaccaaaaaagcgcgaacaatggaagtactgtgagaagaagcataaggtcgatttttagaagagcagccgaattgcccagagtccatatggggcctcttacttattcacatgggataaatgagcttgttaacaagaaattaagaaaagactgtgatctcagcacgctatgtcgcgtattgcaaagaggaatcaggatgattaggatgacaagaagaagaaggaagttctatgaatttaaattaatcaataacaacgggcaaataatatggaaagatggttcgaagtatctggaattagactccgttaaagacatcagaatcggtgatatggcgagtacttatcaagaggaagtagatccgaaaagattgagatcggacagtaaactttggattactattatttataaggtttccaacaaattgaaagcgttacacgtagttgctttgaatgaattggactttaacacattcttaagctgcatttgcggtttagtgaagttaaggagggaattaatggaaagcatacttttgcctgataattcgcaattcgctaggatacattggcaaattactgtttctgaaaaagaggaagatgagaaaaaggacacattgagctttgcagatgtgaagaaactatgtgataaatttcatatttatgtgtcaactggtcaattgttagagtttttccaattagcagacatcaatcataacggactattaaattattttgaatttgaaaagttcattaaaatcttaaagaataggaaagaggtaaatatgatttggtctaaatttacaaaacctccacactcccacttatcattcgaaaatttttttcaatttttaattacagagcagcatgagcaagtggatcgtcaaactgcatggtcatattttattaagtacagagaaccgactcagctgacgatggggcaagatggttttaccaagttcttgaaggagcaaccatatttggtggaggttaaagaggagttatattcaaagccattaaaccattattttattgcatcttcacataatacttatttattggggaaacaaattgcagaaactccatctgtggagggatatattcaagtcctacaacaaggttgtaggtgcgtagaaattgatatatgggatggtgaaaatgggccagtggtatgccatggatttttaacgtcagctattcccttaaaaacagttatacgcgtgataaagaagtacgcttttataacgtctccgtatcctttgattatttcactggaaataaactgtaacaaggataatcaaaaattggcaagcctgataatgagagaggttttagcagaacagctgtactttgttggcacaagaactgataaactgccatcaccaagggaattaaaacataaaatactgttgaaatccaagaagacgagtgaagcaactagaggtcttagcgttaatgagccatttccatcttcttttagttcttcttacgaatcagctaatgaacaggaattaagaatgaaagatgactccacgaacagtagtagcgcaacaaattcttctagtatgcaacgcatcaaaagaattggattaaaaaagcacgttgatataattaatgatgtttctaacatttctggaatacatggcatcaagttcaggaatttctctttaccagagtccaaaacgatagcgcattgtttttcactgaatgagcgcaaagtagaatacatgataaaagacaaacacttaaaattatcgttggataaacataatagaagatatttgatgagagtctatcctcacgttttacgatacaaatcatcaaattttaacccaatacctttttggaaggccggtgtacaaatggtggctacgaattggcaaactaatgatattggacagcaacttaatctggcaatgtttcaaatattagatcaccaacctgatggaagttttaaatcaggatacgtgctaaaaccaaaaaagttgctacctgtagtaacaaaggcgaaaatgattccattaatttacgaacattttgaaaatggtagtgatcctgttactgttaaaattcgaattttatctacacagttattgcccagattgaatgatacatcgccaagcagaaataacaccaattcctttgttaaagtggagtttcataccgatgacgagccgacaatgcccatctcaatcgataagggtacaaggatttctgccactgaagcatccactaagagttctcaagggaatggattcaacccaatatgggatgctgaagtttctatcacattgaaagatacagacctcacatttataaaattcatggttatctctgaagagacccagattgcatctgtttgccttaagctgaactatttgaggatgggatatcgtcacattccgttgtttaacatggagggggaacaatacatattttgcactttatttattcatacacaaattttatag

SEQ ID NO: 78824 - DNA, 630 bp, Saccharomyces pastorianus
atgatatcaccatcaaaaaagagaactattttatcaagcaagaatataaaccaaaaaccacgagcagtggtaaaaggcaatgaacttcgttcaccatcaaagagaaggtcacaaatagacacagactatgcactaaggcgaagtccaataaagacaatccaaatttctaaagctgcacaatttatgctgtatgaggaaacggctgaagaaagaaacatagctatccacagacataatgaaatatacaataataacaattctgtgagcaatgagaataatccttcccaagtaaaagaaaacctttcacccgctaaaatttgccctgatgaaagagcatttttaagggaaggaggaagaattgcattgaaggacttaagtgttgacgaattcaaaggttacatacaggatcctctcaccgatgagactataccactgacgttgccactgggtgataaaaaaatcagcctacccagttttataacgccgccaagaaattcgaagatatctattttcttcactagtaaacaccaaggacagaacccagagacaaagatatcccgttctaccgatgacgtcagtgaaaaaaaagtagtgagaaaactgtccttccacgtctatgaagatgagtaa

SEQ ID NO: 78825 - DNA, 957 bp, Saccharomyces pastorianus
atgggaaaggctgcgaaaaagaagtactccggagcaacttcgtccaaacaagtctctgccgagaaacatttgagttcagtatttaaattcaacacagatctaggtcagcatattttgaaaaatcctttggtggcgcaaggtattgttgataaggcacagattagaccctcagatgttgttttggaggttggtcctggtacaggtaacctaactgtaaggatcctcgaacaagcaaaaaacgtagtggcagtagaaatggatcccagaatggctgcagaattaactaagagggtacgtggcacacctgtggagaaaaagttagaaatcatgcttggagattttatgaagactgaattaccatactttgatatctgtattagtaacactccttaccagatctcatcgcctctggttttcaaattaattaaccaaccaagaccaccaagagtatctattcttatgtttcaaagagagtttgctttaagattactggcaagaccaggtgactcattatactgtagattatccgccaatgtacaaatgtgggctaatgttacacacatcatgaaagtgggtaagaataactttagaccgccaccacaagtggaatccagcgttgttagactagagattaaaaatccaagaccgcaagtggattacaacgaatgggatggtttgttgagaatcgtctttgtgaggaaaaacagaacgatttcagctggcttcaaatcgaccaccgtgatggacattctggagaagaattataagacatttttggcgatgaacaacgaaatggtggatgatacaaagggttctatgcacgatgtcgtcaaggaaaagattgacacagttctgaaggagaccgacttaggcgacaaaagagcgggtaaatgtgatcaaaatgatttcctaaggctattatatgcttttcaccaggttggtatccatttttcatga

SEQ ID NO: 78826 - DNA, 1827 bp, Saccharomyces pastorianus
atgaagatgcctctaaagaagatgtttaccagcacgtctcctcgtaactcttcttctcttgacagtgatcatgacgcttactattcgaaacaaaatcctgacaatttccctgtaaaggagcaagaaatctataacattgacctggaagaaaacaatgtgtcctctcgttcatccacctctacatcaccttcagcaagggacgactctttcgcagttccagatggtaaagacgaaaacacgcggttgaggaaagatttaaaggcaagacatatttctatgatcgccattggtggttcattaggtacaggtctgcttataggtacaggtaccgccttaatgacgggtggtccggttgcgatgttaattgcatatgcctttgtcggccttttagtcttttacaccatggcctgtcttggtgaaatggcttcttacattccattggatggttttacaagttatgcctcacgttacgtggatcctgcattaggttttgctattggttatacttaccttttcaaatatttcatcttacctcccaaccaacttactgctgctgctttggtcattcaatattggatcagcagagaccgtgttaaccctggtgtgtggattactatattcttggttgttattgtcgctatcaatgtcgtcggtgtaaaattctttggtgaatttgaattttggttgtccagtttcaaagtcatggtaatgttgggtctaatcctgttactatttattattatgcttggtggaggtcctaaccatgaccgcctagggtttagatactggcgtgatcctggtgcgttcaaagaatattcgacggctatcactggtggtaaaggtaaatttgtttcgttcgttgctgttttcgtttacagtcttttcagttacacgggtattgaattgacaggtatcgtttgttctgaagctgagaatccaagaaaaagtgttccaaaggcaattaaattgacagtttaccgtatcattgttttttacctatgcaccgttttccttttgggtatgtgcgttgcatacaatgaccctcgtttactttccacaaaaggtaagagtatgtctgctgctgcatctccattcgtggttgccattcaaaactcaggtattgaagtcttacctcatatcttcaatgcttgtgtcttggtcttcgttttcagtgcttgtaactcagatttgtacgtttcttccagaaatttatatgcgttggcaattgatggtaaagcgccaaagatcttcgctaagacaagtagatggggtgttccttacaatgctttaatactctccgtgctgttttgtggcttggcgtacatgaacgtgtcttcaggatcagcaaagattttcaactactttgttaacgttgtttctatgttcggaatcttgagttggatcaccattttaattgtttacatccacttcgataaagcctgccgtgctcaagggattgataaatcaaaatttgcttatgtcgctcctggacaacgttatggtgcttattttgctttattcttctgcattttgattgctttaatcaaaaacttcactgttttcctaggtcataaatttgattataaaacattcatcaccgggtatattggcctgcctgtctatatcatttcttgggcaggttacaaattgatatacaaaaccaaagtgataaagtctaccgacgtggatttgtacacatttaaggaaatatacgatagagaagaagaagagggaagaaggaaggaccaagaaaaggaagagcgtttaaaaagtaacggtaaaaatatggagtggttctatgaaaaatttttgggtaatatcttctag

SEQ ID NO: 78827 - DNA, 1062 bp, Saccharomyces pastorianus
atgacgctgcaaagaattagtaaagattatctaaagcctaattatggacttatcttacttatagtgtcttattttttcaattcttccatggtagtttctaccaaagtcctagaaaatgacccactggaaacttcgcaatcaagaattaatcctctgcaaatcctgctagtaaggatgtctatcacgtactgttgtacgctagtatacatgcattggaataaaaaaagtgttccagatattccatggggcccagcaccatgcaggaaatggttgatactccgaggtataatggggttttttggtgtttttggaatgtacttttctttaatgtatctaagtataagtgacgctgtcttaatcaccttcatgtcgccaaccctaaccattttcctttcatttttactgctgggtgagccatttagtaaacttgaagccttggggtccctaatttcattttctggagtggtgttaattattaggcctacatttttgtttggtgagcagacccaaggccagcaatctccacaagacgatattgttgaaactcaaaatcccaaattaagactcattgctatcggggtgagtttattaggggtttgcggattgagtagtgtttacattatcataagatatatcggtaacaaggcacatgccatcatgagtgtcagttatttctcgttggttactactgttgtggcagccctcggtgtgcttctaattccctcgatgtctttacaactgccccattcgtggaagcagtgggggctatttctgaacttgggtatttctggattcattcaccaaattctgttaacaatgggaatccagagggagcgtgcaggaaggggttcgttaatgacttatactcaagttatatatgctgttttctgggatgtcgtgctctttcaccactggccaaacatatggacgtggtgcggtatggcagttatcgttagttctactatatgggtcattaatatgagagcctccaaacaaaacgttgtggctactgccgagctactctccacatcggactttgaattagatgatttggaggattaa

SEQ ID NO: 78828 - DNA, 1956 bp, Saccharomyces pastorianus
atggcaaagaagaataagaaggataaagaggccaaaaaggcacgtgctgaactgaagaatcagaaaaaccaaaaaaagcaggagaaaaagtttcagaagaacaagaataagtctttaaacggcgaagaagatgatgaaagtgatcaagatctcgatgaaattctctctagctttagcaaaaagcaaattgaattagagcatgtagacatcacttctgtggaaaaaccctcttgtcgtactcatccgttgatgtttgcaaatccgcaacacaataaacatgaattgttcattttcggtggtgaatttacagatccagaaaccaaactaacacatttctataatgatttgtattcatactccataaagaacaactcttggaaaaaatacgtttcgcaaaatgcacctttgcccagatccagtgccgctgtcgctgtgcatccttccggaatagcactgttacacggtggtgaattttcgtccccaaaacaatctaaattctaccactattctgatacatggctgtttgactgcgttgaaaggaaattcactaagttggagtttggcggtagagactcttcacccagcgccagatcaggtcatagaattattgcttggaaaaaccatttcatattatttggtggatttagagatttggggaatggtcaaacttcttacctaaatgatttgtggtgttttgatatctcaacctacaaatggaccaaattggagacaaacagcaaacctgacgctagatcgggtcattgtttcattcctacagataattctgccatattaatgggtggttactgtaaaatcattgccaaaaataataaaaatttaatgaagggaaaaatcttgaatgatgcatggaaactgaacttaacgcctgatccaaagaagtggcagtgggaaaaattaaagaatttcaagaaccagccctcaccaagagtcgggtattcgttcaatctatggaagcaaaacaagtccgttgcttttggtggtgtctacgatttacaagagacagaggaatccttagagtccgttttctataacgacctatatatgttccacctagagttgaacaaatggtctaaacttagaattaaacctcagcgtcaaacgaatagtaaaaattcacccgccacaagtaaaagaaaatctaataaagatcaagaaaaggaactgcaggatttactaaattccattctggccaaatctaatctaaatgacgacgacgatgacaatgatgacaacagcacaacgggtcctaactctatcgatgacgacgaagataacgaagatgacagtgatttggacaaccaagaagatattaccatctcaaatcaattacctcacccaagatttaacgcagcaacttgtgtagtgggcgactcgttgttcatttacagtggtgtctgggaactgggcgaaaaagattatcctataaactcattttatagtatagatttgaacaagttggatggtgtcaaggtttactgggaagacctatctgccatcgaagaagcaaagagactaggtgatagagattcggacgaagatgagtttgaatacgaggacgatgaggaggatgaggacgacggcgaagaggaacaagatgcaggaccccttgaaggtgatgaagatgaggaaagcgagagcgacgatgacaaacaagtgcagatggagattccagacgaaaggtcttggctaccacacccaaaaccgttcgaaactttaagagcgttctacttgagggaaggtgcaaatttcttaacctggtctatttctaacaacagaaaccttaagggtaaacagttgaagacgaagtcatttgagttatgtgaagaccgttggtgggaaagaagagatcaggtgacccttgaggaagagcgtctggaggatacaggcggaatcattgaaagagatacgactactaaaccttccaaaagaaggtga

SEQ ID NO: 78829 - DNA, 1467 bp, Saccharomyces pastorianus
atgttgagatttaccaattgtagttgcaagactttcgtaaaatcgtcatataagcttaatataagaagaatgaactcctcgttcagaactgaaaccgatgcatttggtgagatacacgtgcctgctgataagtactggggtgcccaaactcaaagatcctttcaaaacttcaagattggtggcgctcgtgaaagaatgccattgcctttggtgcatgcatttggtgttttgaagaaatctgccgcgattgtgaatgagtctctggggggattggatcccaagatctccaaggctattcaacaggccgctgacgaagtggcttctggtaagctagacgaccactttccattggttgttttccaaacgggttccggtacccagtctaacatgaatgctaatgaagttatttccaatcgtgccattgagatcctaggaggcaagattggatctaaacaagtccatccaaacaatcattgcaaccaatctcaatcatccaatgatactttccccactgtcatgcatatcgctgccagtttgcaaattcaaaacgagttgatacctgagttgaccaatttaaagaacgcccttgaagccaaatccaaggaatttgaccatattgtgaagatcggtagaacacacttgcaagatgccacgcctttgacactaggtcaagagttttccggttacgtgcaacaagttgagaacggtatccaaagagtggcacattctttgaaaacattgagtttcctggcacaaggtggtactgccgttggcacagggttgaacaccaagcccggattcgatgtcaagatagccgagcaaatttccaaagaaactggactaaagtttcaaaccgcccctaataagttcgaggctttggctgctcacgacgccattgtcgaatgtagcggtgctctaaacacccttgcttgttctcttttcaaaatagcgcaagatataagatacttagggtccgggccacgttgcggctaccatgaactaatgctgccagagaatgaaccaggttcctcaatcatgcctggtaaagttaacccaacccaaaacgaggcattgactcaagtgtgtgtgcaagtcatgggtaacaatgcagctatcacgtttgccggctctcaaggtcaattcgagttaaatgtcttcaagccagtcatgatcgccaatctattgaattcgatcaggttaattactgatgccgcatattcatttagagtgcactgtgttgaaggtatcaaagccaatgagcctcgtattcatgagttgttgactaaatctttaatgttagtcaccgctttgaaccctaagatcggttatgatgccgcttccaaggtcgccaagaatgctcataagaagggcattaccttgaaggaaagtgcattggaattgggtgtattgactgaaaaggaatttgatgaatgggttgttcctgaacacatgctaggtcctaaataa

SEQ ID NO: 78830 - DNA, 309 bp, Saccharomyces pastorianus
atgctctttttagacagttattctcttctaatacaatttcagcgttttaaaaattgggaaagtcctcgaagatttagtagttcttttcctttgcttttgtttgtttttaaaccgatatttgctgctaaacttcttaaagagatttgctcttctggtgtactctcttattcgttatcatttctgaaaattcccctttccgtgatgcgggtaatactaggtcccttacccgacgacaagaaattaaaaaatgacgcaaaatattcatttatgaactattttattataacttgtataggaataataatgtag

SEQ ID NO: 78831 - DNA, 1656 bp, Saccharomyces pastorianus
atgtttgcatccgctggacaacaacaccctcaaattgttcctaaggaagaggaatccatattaaactacctccttgaagtgagatcctccttggctaaactcaagcaaaataggacccagtatttgaactctaaggatgtccaaactacttaccaacacgtcttgaccaaagtcagagagttggacgatattaggaagaatagtcatgagacgcccgctaagagcgccgccaccctgattcatagtactgaattgcataatagagttgactccgtactggatgatgtctttcaattgctctcgttgtgttttttaactgttgggctaaaaaattctgcacctgcgacttatgcatcgttatctactgtggagagtcttttggaacatttaaatgaatcaaacgtcttcacccatcacgatttgagtcctattaaggaaaggctggaagaaatcagcaagattgtcgaacaaaaaaattctagtcctgcgtacgatgaggatggaaatgatgaccgattaagggaaatcgacaacgaaaggaaaaagaataaaattgaggaagacctattactacgtgctaaattaaagcattgcaaggatgaatatgatatattggaaggcaaattggaggaaattgatccgtctttgtctactgtaatggaaaagttattccgaattagaagaggtttattgtcattagttgcatctgctaaaaaaacaatgtctaaatctgatattaataccaactctttattgcaggaacaaaatgatttgcaaacggacaatgaaagcttaacggatgacaaacatttagtatctcaagagtatgtccatgagaaattatcagttttgaagaacgaattaagtgaattagaatctaatcgtgacgattctggtaaattcaagtccttggaatctcatcaggtggcagaaaaaggccaaagtgtccttaatggtttattggatgattgccatgatttagttaacgatttatcacaccaaaaaaatggcgggttgactttagatccatatttacagccaatatatgaacagctgattgatataaagactaccttagaaaatttaatgatcacaagaagatggactttgagagaaaccgatttattttcttaccaaaaaaaattgaacgaaattgataacaaaagaatcaatggtaagtttccaacaaaatctcaggactctaaggggcaatcaatacttttatacctgttgcgtagatgttatgccataatttataaactgttggaaagttcagaacccgtatctgaagcgttgcagccaattcacaatcaactatctacagttcgtcgttgcctattagaattgaaaagaatgggaggtgtgaataatgaaagagagttgtacccttatcaaatgaaattggcttcattggacaacctgagaactgaaggtatattctatgactctgatggcaatatacctgaaggccaaggtatattgaatgctttattagcagaatgttttgatatcttgcatgaattaaaagtggaagccgaggaaagagcacagaactctacttcaagtgatgattctgacgacgatgacaacggagaatcaggcatagactcgaacacaaacgacagcgagcctgaatctgaatatcaacaggaatag

SEQ ID NO: 78832 - DNA, 1428 bp, Saccharomyces pastorianus
atggcttctgcagtgtatttttgcgatcataatgggaaaccactcctatcaagaaggtatagagatgatattccgctttctgcaattgacaaattccctatattactctcggatttagaggaacaatcaaatctgattcctccatgtttgaaccacaatggtctggaatatttatttatacagcataacgatctatacgtggtggcaattgtgacttctcttagtgccaatgcggcggccatttttacttttttgcacaaattagtggaggtattaagtgactacttaaaaaccgtggaagaagaatctattagagataattttgttataatatatgaattactggacgaagtgatggattatggtataccacagatcactgaaactaagatgctgaaacagtacataacacaaaaatccttcaaactagttaaatccgctaagaagaagaggaatgctactagaccacccgtcgcactaacaaattcagttagttggaggccagaaggcatcactcacaagaaaaatgaagcctttctggatatcgtcgaatctattaatatgctcatgactcaaaaaggtcaagttttgagatcagaaattattggcgatgttaaggttaactcaaaattgtctggtatgcctgatctaaaattaggtattaatgataaaggcattttctccaaatatttggatgatgatacaaatatcccatcagcgagcgcgacaacatccgataataacacagaaactgataaaaaaccatcaataacatcatcatcggccacaaacaagaagaaagttaatattgaattggaagatttgaaatttcatcaatgtgtccgattaagcaaattcgagaatgaaaaaattataacgtttatacctcctgatggaaagttcgatttaatgaactacagactatctactacgataaaaccattaatttggtgtgatgtaaacgttcaagttcattcgaattctagaattgaaattcactgtaaggccaaggcccaaattaaaagaaaatctactgcaactaatgtagagatattgataccggtcccggacgacgcggatacaccgacttttaaatattcacacgggtctctaaagtatgtccctgaaaaaagtgctatcttatggaaaataagaagttttcccggtggtaaagagtactcaatgtctgccgaattgggactgccttcaatatcaaataacgaggatggcaatagaacaataccaaaaagtaacgcggaaatcttgaaaggacctgtccaaatcaaatttcaaataccctactttactacttcaggtattcaagtacgttatcttaaaattaacgaacccaaattgcagtataagagttacccatgggtaagatatatcacgcaaagtggtgatgattatacaataaggctgacgtaa

SEQ ID NO: 78833 - DNA, 1656 bp, Saccharomyces pastorianus
atgacctattctacagttaatattaatacacctccaccatatctcgctttggccagcaatgaaaaattacccacggttttgtctattgctggaacagatccaagcggtggtgctggtgttgaagcagatgtgaaaactatcactgcacacagatgctatgctatgacatgcatcactgctttgaatgctcaaactccaattaaagtatacagcattaataacacgccaaaggaagtagtttcccaaattttggacgccaatttacaagacatgaaatgtgacgtcatcaagactggcatgcttacgacagctgctatcgaggttttgcacgaaaaactgctgcagctcggcgaaaatagacctaagctagtagttgacccagtccttgttgctacttcgggctcttctttagctggaaaggatatagctagtttaattacggagaaaatcgcaccttttgctgacattttgactcctaacattccggagtgtttcaaactgttaggtgaagacagagaaataagcaaattgcgagacattttcgaagtcgcaaaagaccttgccaaaatcaccaagtgttccaatattttggttaaaggtggtcacattccatggaatgatgaagaaggaaagtacatcactgatgtcctttacttaggggccgaacaaaggtttataaccttcaagggtaattttgttaatacaacccacactcatggtaccgggtgcaccctagcttccgccattgcatcaaatttggctcgcggttattcccttccccaatccgtttatggcggtattgagtacgtccaaaatgcggtggccattggctgcgatgtcacgaaagagactgttaaggacaacgggccaattaatcatgtctacgccatcgaaattccattagaaaaaatgctcagtgacgaatgtttcactgcatcagatgccgtacacaaaaagccagtcaaaagttctcttaacaaaatccctggaggaagtttctataaatatctgataaatcaccctaaagttaagcctcactgggactcctatgtgaaccatgattttgttagaaaagtagcagacggttccttagagcctaagaagttccaattttttatcgaacaagattacctgtacttagtcaattatgccaggatttcctgcatcgcgggtagtaaatccccgtgtcttgaagacctggagaaagaactagttattgtcgaatgcgttcgtaatgggctttgccaacatgaaaggagattaagggaggaatttggaattaaggaccccgactacttacaaaagattcaaagaggtcctgcattaagggcttactgtcgttactttaatgatgtttccagaagaggtaactggcaggagttagttatagctcttaatccttgcttaatgggctatgttcacgctttgaccaagatcaaggatgaagtaactgcagcagaaggctccgtttaccgtgaatggtgtgaaacttactcatcgtcatggtgccacgaagctatgcttgaaggcgaaaagctgttgaatcacatcttggaaacataccctccagaaaaacttgatacactggtcacaatatatgctgaagtttgtgaattggaagctaacttctggaccgccgctctagaatatgaatga

SEQ ID NO: 78834 - DNA, 582 bp, Saccharomyces pastorianus
atgacagctcatgcaaatgaaaggattagcgatgtatcccctagtgctgggggttcaagttcggaatcgaagtatgacaagctctgccgagttcttttcactattgcaattacaaaaagttcatttactccagagcatatattgtataagaattcaatatttactgataagccaatcttaactgatatagttacctttatgtatgcggcgtttgtttccattggatggtttctgatatggggggaaagagcatgcagaactcaagaaatgaatcaacctccaatgtgctcgaatataaactattctcttttaagttttaagaaaagacaccccaagagatttacgtgtacgttatggttggtatttttccttgcatatgcggttttgacagtttcaatttggatagttcagttgatttttcgaaaaggtaatgcttttcaaatgatatcgcaacttattgtattagatatcgccattgcattgatcaatgtagcaattgcattcggttttgaagtatatcttgcacacaaagctgcgatcgagaatagtgacaatgatttaaatgatcttagcagtgcttaa

SEQ ID NO: 78835 - DNA, 1638 bp, Saccharomyces pastorianus
atggctagtgctgaaccaagaccccgtatgggactcgtcatcaatgctaaaccggactactatccgattgagctatctaatgcagaactactttctcacttcgaaatgctgcaagaataccaccaagaaatctccaccaatgttattgctcaatcatgtaagttcaaacctaatccaaaactaatagaccagcagcctgaaatgaaccccgtggaaacaaggtccaacattatcacttttttgttcgagctgtctgtggtcactcgagtgacaaatggtattttttttcattcagttagattatatgaccgctattgttccaagagaatcgtgttacgggaccaagccaaattggttgtcgctacttgtctctggttagctgctaaaacttggggcggttgtaaccacatcatcaataatgtagtcatccctactggcggaagattttatggtcccaacccaagggcacgtatacctcgactctctgaactagttcattactgtggtgatggtcaggtctttgatgaatcaatgtttttacaaatggaaagacatatactagacactttaaattggaacatttatgaaccaatgatcaatgattacgttttaaatgttgatgaaaattgtttgatgcaatacgaactttatgaaaatcaagttacttatgacaaacaatgctctgaaaaacgtcagtctcaattatcccaggatagtgatgccactgtagacgaggggccctaccaaaacgaagaagaagaagaagaagacttaaaactaaagatcaagttgattaatttgaaaaaattcttgattgatgtatccgcgtggcagtacgacttacttagatatgaacttttcgaagtatcgcacggcatattctccattatcaatcaattcaccaatcaagaccacggtccttttttaatgactccaatgacatcagaaagcaaaaatggtgaaattttgagtaccttaatgaacggcattgtttccattcctaactccttgatggaagtgtataaaacggtcaatggtgttctacccttcattaatcaagtgaaagaatatcacttggatctacaaagaaaactgcaaattgcatccaacttgaacatttcgagaaagcttaccatatcaaccccatcatgctctttcgaaaattcaaatagcacatccattccttcgcccgcttcctcatctcaaagccacactccaatgagaaacatgagctcactctctgataacagcgttttcagccggaatatggaacaatcatcaccaatcactccaagtatgtaccaatttggtcagcagcagtcaaacagtatatgtggtagcaccgttagtgtgaatagtctggtgaatacaaataacaaacaaaggatctacgaacaaatcacgggtcctaacagcaataacgcaatcaatgattatattgatttgctaaacctaaatgagtctaacaaggaaaaccaaaatcccgcaacggcgcattacctcaatgggggcccacccaagacaagcttcattaaccatggaatgttcccctcgccaactgggaccataaatagcggtaaatctagcagtgcctcatctttaatttcttttggtatgggcaatacccaagtaatatag

SEQ ID NO: 78836 - DNA, 1467 bp, Saccharomyces pastorianus
atgtcagctatacaatcgccagcacctaaacctctgcagccaacttttccagctgcttcgccagcttccacgaatgcatatatgaagccgggcctaattggtagtcctgccgtcagtaatcataccgagcctaacaatggtaacaatgaaactgcggagcctcagggaccaaatcagagaattgatttgggtgccatgatcgaagaattaacctcactattgggaaaagaaagctggacgaaatatgctcagatcatcagtcttttcattttagggaagttatccagaaaggaactttctaatgaattagagctggtattttcaccaagcgctgcaagcttagaaaaatcaaatacaaatcatcaccatagtttagtacgacttcataaccaacttttattagggatttttgctaattcattacgtgaaaaccctcttgggagaaacggtaatgagagttcttggggatttggcaatggaagcaacaatccaaacaataaactaaaaagaatcaataagcataactctcaaattgaagtctataaaaaaattgtcatgtcgttacctctaaatgatcgaaatagacttaaaatgatcacgaaagaggccggcaaaagaggcttcattttttgctctgtatttcaagccagattaaataatatacccaaaattcccattgtaaccaatccagaaagtttgaagcgtgtcaagagcaataatttaaaaacgccgctggaatggtcacaagatataatgaatggattcaacgttcctttagcgagcgaaagccattctttaccagacacggattcgttttacttaagaatggttggtatagcaagagaacatgggttagtcggcacagtggacgcacgttgcgtagagcttatatcattggccctagatcaatatctaaagaatataatagagtttactattgatacagttcgttatagaaggaagaaatattcagattattatgatttgaatgagagtgggctttataaatccgtatcagaaatggctgctgataaacgcgatgccaaaattaagcagttagatgatgataaaaatgaggatgactgtgccgatgaagccaaaagtattaataacggcaataacagtagcaaggacgatattggcgacatatcaatgagcagcattacaaaggctggcgaagcagttaatgaggagttacatgaaaacagaacgatatcattaacgaatgaagacatatatgattcgttatctatatttccgaatttggttgaaccttcaggttcatactatgcgttaactaatttagggctagttaacgatgatgaactagtagatatgaagagcaatattgacgacttgccggacttcttaaatgaaaagccgactttcacgcctttggatgaaagaaacgttggtacaaggcatgaattaaattggttaattaaaggaatcttaacggaagattga

SEQ ID NO: 78837 - DNA, 1944 bp, Saccharomyces pastorianus
atggcgtcacagcaaaacaaacacgcttttctttcaaagaatagaatctttcacaatcccgataatgtgtcctcatcaaaatctcgaaaccttatggatatcacaaacacgacaaacaccataaatggctctaggccttcgtctatgaagagttcattggctcttccacccctaaaggattccttcccatctgtatctcgatctgcatcattaaacatcaacatgagcaaaattaaggacttaaaagaccgccaagacaaaataaggttccaaagacatactctcaggactcaattgattgagtgcgaaagagaaatcaaaaccatcaagtttcgagatctcaataagtccaggtttgaactttataagaaaaaatccaaacaagcaaagtatctcaaacaggttagagatttggcgcaaaatctgaactccaaggacggtgaacgcgctgatttaattaagaagaacaaatccgctttggcaaccttgcaggctgaactagaccagaatctgatcttgaaaaggcaggaatctcaagaattgtacaataataagcttatcttttgggaaaatgagctgcaaataatggaaaatgtcgagcctgaccacgaaatcacagaggaaatatctcagttgaagaaaacgctgcaagagctcaacataaattgggcgaatttacagaagcaaaacttggaaagacaagtaaaccacgaatcacaattgaggaagggttttattgcattcaaagaagctaagttaaaatccatggaaaatttgacaaacaaacatcgtgaattacttgatcagatagccactctacaatcggaaagtgagaagttacacaaggagatcatggatatagatagacaagctgaatattcggaacaaaacatctcagaaataaatgaaaatataaaacaattggaattggcaaacaacccactaataagcaaatccttacaaaactcgcaagatttggaacatttacaaaaccaaatggaaaatttgaaagaaatggcctctaaacaggaaaaattttataatgatacctataacactgtggaaaaagaactcctgcggagtaggagacttgaaaactctattattgaacaaaaaggcacgatgcgctgttacgcttacgtgatggagcaaaatttgcctgagaaccttttatttgattacgaaaatggcgtaataactcaaggtctaagcgaacatgtttacaaatttaatagggtgataccgcatttaaaagtttctgaagataaatttttcactcaagagtatagcgtttaccatgatatgtgcctgaaccaaaaaaaaaatttcaacttaatatctctaagcaccactccacatggctcattgagagagtctctaataaaatttttggccgaaaaggatacaatatatcaaaaacaatatgtgatcaccttacagtttgtatttttatcagatgacgaattttctcaggacatgctcttggattattcccacaatgataaagatagcataaagttgaaatttgaaaaacactcaatttctttggattccaaacttgtcatcatagaaaatggactcgaagatttgcccttaaattttagttgtgatgaacacccaaatttacctcattctgggatgggtataatcaaggtgcagttttttcctcgagattcaaaaagcgatggcaacaatgaccccgtaccggtggacttttattttatcgagttaaataatctgaagtccattgaacagtttgataaaagcatctttaagaaggaatcatgcgagacccctattgcacttgttctgaaaaaactaatttctgatactaaatcctttttcttgctaaacttgaacgattcaaaaaatgtcaataaattattaacgatttcagaagaagttcaaacacaactttgtaaaagaaagaaaaagctcacttaa

SEQ ID NO: 78838 - DNA, 411 bp, Saccharomyces pastorianus
atgtcctctgtggaatcttcccccatctcgcgctatgaagacgaggtcttccctctttcgttttcaaacgttgctttcgagccccctatgctctcgcatagcccggacagatcgacttatgccgatgacttttctcaatcttaccagcaagaattgctaacttttccgctatcgtacccgattgtcgatgagtcagaatgcacgcacactaaagataagacggacagcaacataataacgagtactgaagacgattgcattttcgatatggaatttaacggcaacgccgccagtgcagttgctgctgctagtaaggaatctaactctgcctctgggtttgcctttgcaagtaacgatgcctttgccaatgtcgcacaacagaactacagactatggttgtcatcggtatga

SEQ ID NO: 78839 - DNA, 288 bp, Saccharomyces pastorianus
atgacgacgagaggcagcaatgatgttgttcatttcttcgaccttagccttggctctggtgaaagaacccaatctcttcttggcgacctttctggctctcttttcaccggagtttctgatcaaatcgatcaatcttctttcatatggggacaaaccggcgatttctctaaccaaagatctgacgaacttggttctgttggaggcagcacccttcttgtaggagatctttggggctggagtcatttgggtgactttcttacccttgttcaaaccaatagcgatacctag

SEQ ID NO: 78840 - DNA, 2694 bp, Saccharomyces pastorianus
atgtcgtcagacaaatctattgagataaatacagatacgatcgcctctgaagttcacgaaggtgataatcattcgaataatttggtttcaatggaggaagagataaaatcaacgccatcagaccaatatgaagagatagctataattccaactgagcccctccattcggacgaagaactaaatgacaagcaacaaagtttagaccacgaggaaaatgaagcacccacaaatgtatcaagagaagaacctattgggatctctggtgatgaagacacccaaatcactgaacaaaacgttaatgaacaaaggcaagaaacgagagaacctagttctgaaattgatttaaatgagccattggatgttgaaaaagatgtgacaacggatgtgcaagccccaaatgggctgaatattgaaaaagaatatgatgcagtcaaagagaatgagaaggtttacgctgatacgaaagacgttgttagtagtccagaaaatagggaagtaactggaaaaaattctggaggtgagaaatcatcctcgagtaaatttctcgatgacgaatctggtactatgacagctgcaaatgcgaacgacatttctataagtagtgaagtaaccccagaaaggtcgtcagaaaatgataataaccagattcatattaccaatgaggtagccgctggaataaacttgaatgaaaacaaggaacaaaaagctgctatagaagatgggcccgtaacagcagagaatctttcctcagaaactgctaggaaagtaccacctatacccacacaaatcataaatgaaaaaggtgataactcaagcgagaacgaggtttccgcaattcccactacatcttcgccaccattaccacctagacaaaatgttgcgacatcaacgtcaccaaaattacctccaaggggcaaacaaagggaacaaccaccgaagacgaagaatgctgttccaccgccactagaggaagaaatgaagtcagagaagttccgtaaaaacttcgaagaaactaaaagaaatagttatcatcatgttcctctcactggttccaaaactgcgcaattagagtccactgcagaaattaatttgatcgctagtcgttaccgcaagaccagtcaccatttgaataaagagggggaagaaactagagagtcgttgcaggaaggtcaaagctttttgaaatcgacatttacgtcatttctggagaacttgtccgagtataacgaagtggagaatgttaatgaagaagatagagaaatgtttaaaattgattggtccttctggactcaagtagttaatgattatgctacagtggcaagcaacgaaccagaaaatttagaagcccatgttaccaatgggataccaccacaaattcgaggtatcatttggcagctgatggcgaattccaaatcaagagaaatggaagatatatatgaaactctattggataccgaatgtcttcatgaagcaacaatacgtagagatttaaggagaacgaagtttgtggccgaggacaaaatggagtcactatacaaggtaataaaggtgtattctgtttatgatccagatgttgggtacacgcaaggcatggggttcattgcagcgccgctattaataaactgtgaaaacgaggccgaatcttttggactactcgttggattaatgaagaattatggattaagagagcttttcttaccaggaatgcctgggctgatgttaatgctttatcaatttgatagattattagaggagcattcaccttctttgtacaatcgcttgatccgtgagggaattagctccacaatgtacgctacacaatggtttttgacatttttcgcatacaagtttccgttagagtttgtgttaagaatttttgatattgtattcgtagagggtattgaagtgcttttgaagtttgccgtaaatttaatgttaaagaatgaagaaactttagtaaaattgagattcgatgaactattggattttttaaaggacgaactcttcaattactatttaatgggaaaccaggatgacgcttctgtagtgcaaatgggattgtcaaatgggaactcatttaagggcaatgatgacggcactttttcctacaatgtcgatcttttcgttcatgatgcaatgacaggtgtatatatcacaccattaacattaagaagatacaggggagagtacgtagaaatccatgaaaaagagcaaaaaaaagaggaccactacgaatcgctaagaattcaaaaccaccaactacaaagagaggcgcagaagctagaacacgactattcaattttgaacaaagagaatatcagcgccgctaacgagctgattcagaacagattgaatatggagatgctgttggatgaaaaaaacgacctgataaatacaatcactgatatcaaaagccaaattgaggaagagattcgcaagcaaaatttaccgaacccggacgcgtcactaccaaaggcagatctgagagaagacttggaaaggaccatatccaggaacaatgaggtgatgagggagaacggccaattagaggaaagaatcactgaactgcaagcggaaatcgatgagttgattaacatcaataaggagcaagtgtccacggcatcgttattggaacgagattctaaggctaaagggaggaaaggctggactggttttaaaaaagtttttaaatag

SEQ ID NO: 78841 - DNA, 1572 bp, Saccharomyces pastorianus
atggatccctttcacaatggcaataagaggagctcaatatcgtttggctcatcgcagcggcagccatataacaagaacaattacttgagtggtactaatgggccttcctcggcggcacaagatcaaggtagaggcccatctccctttggaatgtctggcaacactaccaatggcggtaacagcaaaaggaatagtggctgtgacctaagtgccacgtactatgcaagtcgatcgccgatgtattcaccgttagatttctcgccaccagttttttcaccaaatcattctcagttacagcaggcgaggggctatgctgcaaatattccggttgtaagcaatctgatgaacccttccatggcctccgtgtgcgaatatcaatcacactatccactctttgggctcgattggagcgccgacgactacgtctgcttgggttcgtacaaagaggacagcagaaataagttgcaggttctgcactctaatgatctactgagctgggaaagcgtagtggacgcagatgtggtttatcctgtgagcaaaatccaatgggtcccctctcaattgtatccaaggaaactcgcgacgtgttctgactccttacagatttggagcgttagccctgaggaaagacagttccaagaacaaataaatctatctctgtgtaaatacaatagacagcaccccgccaatcccgcggccgcagatgacatgaaggtcataggcactttcccaccaataacatcatttgactggaacacggtcgatactaacttgataatctcaagttccatcgacaccacatgcattgtatgggatctgcaaagcagtcactacgttaagacccaattgatcgctcacgacagcgaagtttttgatgtaaggtttttgacaaaatcgacccaattatttgctagttgtggtggggacggtagtgtacgagtatttgatttaagatcgcttgcgcacagtacaattatttacgagcctccctcttcctcagtgtctggagccactgcggatactataacgccgtcgtcgaaaggttcggacgccttattgaggctggagccatcaccgtatgacccaaatgtgttggccacttttgcagctgactcgaataaaatcattattctagatatgaggaacccagaatcccctatactaaacttacaaggccacggttcttcggtaaacgggattaaatggcatcccacaaagcgcaatgttttgctctcgtgcggagatgactgccaggtgctctattgggacttgaacagctcctttatggaaattaatgctgcaggtagcaaatcccccagtattcatggaacttccttggaggaccctgacggcgacacagagatgacagatggtggcgctggatccggtttaaacgaggatcccttaagtttaaacaacaacagcaagcaggtgtgcaagacactagagactcctaacatgatgtatgccaataaaacacaagagataaacaacattgcatggaggccccagaggggcgattggtttgggtgcgtgagcggcaagaagtttcaaaacgtccgcgtcctttga

SEQ ID NO: 78842 - DNA, 789 bp, Saccharomyces pastorianus
atgaattggaagtcgtacgtttttcccggtggtcatccaccagctgcgttgaccacaggccttgtggtatttctaaccgctatttacctgttaagttttatttttgccctaagggaagacctgtcgttggcgccagagtcattgttcaagctgcaaatgagcaggctatcgctttatcctttaattcacctatcattgcctcatttactgttcaatgtgctagccatctgggcacccttgaatctcttcgaagaaacgcatgggactgtgtacacaggtgtttttttgaacctgagtgctctatttgccggaattctgtactgtttgttgggtaagttgctatatccagaagtattagttgcaggcgccagtgggtggtgtttcaccttattcgcatactatagttttaaagaatcacagatccgccctagaacaaggatctttcgcacagactactcaattccgacattatatacacccctagtactattagtcgcaattgccgtcgttatacctggctccagtttctggggtcattttttcggcttatgtgtcggttacgccataggctacaaggaatcgtggtttaacaagatcactccaccaggatggatcatcaccaaaatcgaaaaaagtttagacggtttaattcgattaataccttggggaattaagtattacagagatgaggatatcgacagaactaaagattacgaaccgttaatgtccacagaaacaccattgcctctccacaatgacaactccggcactgtcctagggactgcctag

SEQ ID NO: 78843 - DNA, 1365 bp, Saccharomyces pastorianus
atgcatgggcctacttcaaaagctatttcccgcaatgtgagaagcgtgaagagaccaagaagagcacctaggcccgtggtctccacgcaggctatgaacaagttgtctaacgtaacactctctgctgaacaagaaaagttgagagagcgcgttttgtcgttcatgcgttccaacttatctcagtacaagtctgactggaaacatccggccatgtttgtaatccaaggggacgcaggtacaggcaagtctgtgattctaaactccttgttcaatgaaattcagaaactatcccagttctcaccttcttctgaagatatcttacatgggacacataattatctggtagtcaaccatcccgagatgttaaagttatatatccggattagtgacagtttcaaatatatttctaaatcgtcactagaacggcccacttcgttgatcaacaatctacagaagagaaaagtcatggccgatgtagtcattgtagatgaagcacatttgttggccacttctaaggatgctttcaaaagattttatggcgaaaaccatctcaaagacttaatgtccctttgtaaagtgcttgtattggtttacgatgataagcaagctttaagaatgggttcctattgggatgaaggttctaataacggtgccactttaaaggacttttacaacgagattccaccaaaatccagagactggtacactttaaaacagcagtttagggtggctgccccacaaaacgtgttgaactggattgaccaaattagtgtcgcaggtaaaatcccaccaattgaatctgtgctatctaagggcaatgcagattgtgctgacgataaaattaagaattttgatttcaaaatttgggatgattgtggcgccatgtacgaggcaatcaaggagaaagaccgtcaacacggccaatgtaggatgctatctacttacgattttccctatcgcttggacggaaaagactattacgttgaatgtggtgacaatttcaaagttcgctgggatcgctatactccacgtgaagtgacgccttggagtgagcgttgcgacacgattgatgaggtaggtagtgtgtatactatccaagggtttgatctgaattatgctggtgtaattttgggccgttccattgggtatgatgcggctaatgactgcatcaaactaagaccagagctgtatgacgatagggccggtttcaccaaaaagaaaaacattcacaatgcagaggacgttaagcaaaagattattatgaatagcattaatgtcctcttaactcgtggcgtgcgtggtctgtatgtttatgcatacgatcctgaattaagagagagactgcttcgtccatcaaaaaaatag

SEQ ID NO: 78844 - DNA, 1020 bp, Saccharomyces pastorianus
atggcgggaagtacatccagtttggtgatctgtgcgattggtatatatgctacttttttgacgtgggcattagtacaggagcctttggccacaagaacctggccaaactccatgggaaagtttcaattccctaatgtaatatccctcatacaagcttctgtggcaatgatgatgggctacctgtacttaaactggaagaaggtggaatatccgcccagaaaaatgattaaagatcattggaaacaattgatgttgatatcatttacacagagtagttcaggcccgctggctacaacttctttaaagcacgtggattatctcacttacatgttagcaaagtcatgcaagatgatccccgtgttgttggtgcatttgcttttgtataggacgcccatagcaagccaaaaaaaagttgtagctctcttggtaagtctcggtgtcactattttcactataggtggcaacgatggtaaaaagttgaagagatcctttaatgagagcggaaatgataacaaattacaagggtttggactacttttctctagtttattccttgatggattgaccaacgccacccaagataagctactaaaggccaataaggccaaagaaaagggaaaacaaactttgataacaggtgcacacttgatgtttacactgaacctcttcgtgatattgtggaatattttgtattttattgtgatcgactgcaaacaatgggataatgccgtttctgtattgacgatggacccacaagtgtggggctatttaatgctttattcgttctgtggcgctatgggacaatgctttattttctatactctagaacaatttggctctttagttttgatcatgataacagtcaccaggaaaatggtctcgatgattttgagtattattgtcttcggtaagagtgtacgtttccagcaatgggtgggaatgtttatagtatttggtggaatcacttgggaagcaatcaacaagaagaaggctaatataccgaaggcaaaatctgcgtag

SEQ ID NO: 78845 - DNA, 1800 bp, Saccharomyces pastorianus
atggttgcctattctccaatcattgccacctatggtaatcgtgcagaacagtttttagaaacagactcagacttcgctaaataccatgcgaaattgaataaaaagttgcaacacttgaggagccgttgccatttggtcaccaaggatacaaagaaatactcaagtaaaaataagtatggcgaaattaactccgaggattatgataataaaactaaattgattggtgttttgattttactacacgctgaaagggacttggcattggctgaaactttgaaattgagagctcgtcaaagaggaaagttaaagaaaagtgaagaaaaggttttatccacaagattgaagaaggcctgcaagactgctgataaattggttaacgtcactcaaaatgaacagcaatggataactcgtgcccaatatttagcgttcgctaaattggtacattcagagtacctaattaatggaaaaaggttcaagaggaaggacaatgccaaaatttcgaacaacctagccctcgttttcgccgcattggaacacttgaagaatctaagcttattatctgaagaagttgtggataacattgtgaataaataccagtactctctcaagcagtacgcgggaaatttaattacaacgcccgaaataaataactttatcgtggaaagagttcaatctgatgagaacaaggacgatgagcttgtgaaattgttattagacaatggattcaatatgaaaaaaattacaacctcaactgaagatcaaaaggctaccactaacataaactggaggtctttcaacgccaagataatcgatgctgaagttgctcaatttttggaacaaggtctatctatccacccaactcagattactcaatatacacagaggctatcaaaattggagaaagctttagaccgtcatgaatttttcatcgcaaaccacgacgatcaagatgacatagacgagatggttgaaaatagttctgaaaacaatcagataattttagcctacattaaatataatattcttttgacctctatatctcgtgaaagagatttgtttactcatttatggaatcaatggctgaaattaaatacttcattaccatcgaagttaaccaaatataaagaaatggaacgtattgtgaagaatttgacaaaatatttatcggacataatggagctacctggtgtgtattcagatgacgagctgctaagccaattagacttatgcaagctgtatttccagttatttctgaatacgggctgcctgagtgttttatatcagtcgaaaggcagatatatggaggcgttagctctatatgtggacgcttaccgaagattagaaaacaaattatctgaaattgaatctctagacgaaatcttgcttccagcaaatcttttgtcattgaattctgtccgaagcttacaaaagagaatcgaaaacggtggtaatagtgtcattactttggcggaatacgaaaaaagaaatcatggtggcagcttagggaaatatgatttgacagtgattgaaaaattggatagtaaaaaaatactgccaacggacatacaattgaaaaatttattccctctcaagccaaaaatgctgcccattcctagtaaaccaacactttttgatttggccttcaactacataacatatgataagcaagagccctcagcttctcaagtgaaagattcagtcacagaaaccgagagcatctctcaaacaccaatttctaatgagcagacggaaggagagcctaaaaagaagcgtggtttcttgggcctatttggtcgttaa

SEQ ID NO: 78846 - DNA, 4488 bp, Saccharomyces pastorianus
atgacagcatattcaggctctccttcgaaaccaggcaataataattcttatctaaatcgttatgttgaaaacctaggcaccaatgtgactccacctctgagaccgcagtcaagttccaaaatcaactcttcgttaaacatagcgtcgccaagtcatttaaagactaagacgtcagctagcaacagttctgcgacaattttgtcaaaaaaagtagaaagttccgtatcaaagctgaagccatcccttcctaacaaactcgtaggaaaatataccgtagacttaagtaattattcgaaaatagaactgaggtactatgagtttttatgcagagtatcagaagtcaaaatatggattgaagctgttattgaggaagcactaccatcagaaatagagttatgtgttggagactcacttaggaatggtgtttttttggccaagctaacccagaggataaatccagatttgacaacggttatatttcctgcaggtgataaactacaatttaaacacactcagaacattaatgccttttttggtttggtagaacatgtcggtgttccggactcttttagatttgaattgcaagatctctataacaagaagaatatccctcaggttttcgaaaccctgcatattcttatatcaatgattaataagaaatggccaggcaaaacgcccgctttaacaaatgtatcaggccaaataagttttaccaaagaagaaatcgcagcttgtaaaaaggcatggcctagaattagagacttcaagtccttaggaactaatatcaatactgcaccagcttcccctgaggaaccaaaagaaaaaagaagcggattgataaaagactttaataaatttgaaaggccgaatataccggtggaagaaattttaattaccccaagaaagaatataacagatgctaattgctccgatttttctaatacaccttcaccttataatgaagctccaaaaatgtcaaatttggatgtcgttgttgagaagaggaaattcacacccattgagccgagtcttctgggccctacaccatctttagaatatagcccaataaaaaacaaaagtctgtcgtactattctcctaccatctcgaaatacctgacatatgatacagaattttatacgagaaggagtcgtgcaagagaggaagatttgaattattaccagacgttcaaatactcaccttctcattattctcccatgagaagagaaaggatgacagaggaacaatttttagagaaggtagttcaactacaaaatatttgtcgaggagttaatacccgttttaacctatacattcaaaaaaggttactgaacctttttgaacaggacatagtaaggtttcaagcatgcctaagaggaaataaatttagagtattgtcgtcaatgtatttgccaataagaagagcaaagattgatgttcctcatgtcgaggcgattcaatcgcgaattaagggaagcagaattcgatataaatacgataaattgaaatttacactctcaaggttttcgtgtactgtcgaacttttgcaagcatattgtcgttcaaaattgttgaagacaaccgttaacacaaaattaaatgatatcgagatatcacattatcctctgacaaaattgcagtcttatatgcgtgcttcttatgtgagaaagaaggtgatgtccctcaatacaaagttgaacgatgagcgagaaagtattatgaagttttcggcaatcatcagaggtaatgttgtgaggtgttcagaggacgcgatattaagtgctgtacatgatgtacataaggaaaatatctcaaaattgcaaagcttgattagaggaatatttacgcgttcgtgcctagcatcaataatatattcacttggaaaagaaaactgtaatattattcaattatcagcctgtatacgcggaaacgctgtaagacataaggtacagtcactgtttgcgcccgaaaataatctcagtgaaactgtgcacgacctccagggtttggttagaggtattctagtccgctacacattagacttagtcgatgacattgtggagtataataatttagcattatttcaagcattttctagaggcgctttagtacgtgaaagcttggaccaaaagtcgagtttttacaagagaaacgtaaggtcggttattatgattcaaagctggattaggaaaagtctgcaaagatcggcatatttggaacttctagactgtccaaatccaagtctttgggctgtcaaaaaattcgttcatttgctcaatggaacagcaaccattgaagaggtccaaaaccagttggagagttgccaagcctctcttgattccgaaaatatgaagaaggaacgattactgaagagcataagacaacaactaaatattaacggagtattggataagtttggactattaaaagataaagatcatgaactcggtatttccgattctacgattccgaagtctaaatatcaaaagtatgaaaaactgttctatatgttgcaagttgatccctcttattggaaattgctgtatttgaaagagccagaatttgttgcaaagaatgtttatatgacatttggaacagtgaatcaaaggatgaacgacagagagagatcctatttcacaaggtttgtttgtgaaatgttacaaaatgcgattaatgaagcaccgagtattgaaagctttcttgacaaccgatcacaattttggcaaaccattcttcaagattttttgagaagagagtctccagaattcttctctataatagtcccagttttggattacttgtcagatccagtagtggattttgaaagtgatccatacaaaatttatcaagaaatacacggctttagctctcctcagcattgttcgcctgtggatgatgcgagtaccaagaataagttcattgacaatttaaggtgcctatggcacgcgattgaaatggtcgctgaaatttataccagaaaggttcacactattcccgttgaaatcaggtacctctgcactaaaatcttctgctacgcggcagataagaatattgaggagattgactctttaagggccatatcaagtattctagtgaacgtttttgtgtctgagtatttggtcaaccgggaatattacggatacaaagacagcaacgttcaaaaaaataaccaaaaaattgacattctaatgaaatccttggcgactgtttttgaaatcaaaaattttgatggctttttggatccattgaaccagtacgctaacgaaataaagcctcatatcaaagatgtcctttataatgtgttagtagatccagagtatgaacaagagggagatagattgatttatttggatatggtatcgccaagccccaaattggaattgttaactgaaaaggttctggaaatcagtggtaaatttgaagagtatttaaatgaatttccggaagcagatattttgcatgatattttggaaaagaacttggacaattcatcctttccaagatcaggacgtgttaccttggaattggatgcatctgcatatcgatttctcgttagtgatgacaagatgagaaaaatctacgaccaagttaaaagggcatttgtgtacatgatgcaaattgaggatgtagataccaatttgtatgacctttcaattagtacaattctacctcaagatgaaccaaattttgcaaattttctggagcaaaatcctaaaatcagggatgatccaatgatacagaagctgaaaccattgaaatacttcacactcaaaaatgttactttgaaaaaaatacatgaactagaaagtacggggactttttgctcttctgataataagttacaaaatttcttaaacgatattgcgaacactattaaaaatcccaactatgccattgattatgtaacccaggaaatttacatcacaaaggaaacactcacaaaaatttcggaaatgaaccacagcttagatatagaattatcaaggcttaaaaaacatgttgatcatacgataaaagacttccagaaagccaaggatttttcgccggtgcacaaaagtaaatttggaaattttaagaatgcagtaaaaaaagttcaaggaagagaacgttctgaattgcagggaatgaagtttaaatggaacacaaagcagttgtatgaaagaggagtgcttaaaaccatcaggggtgaaaaactagctgaactgactgtaaaagtctttggttcgagcggtcctaaattcccagatataatattcaaaatttccacatcggatggttctagattcggtattcaaatgattgacaaaagaaaagggcccgataaacgatactcggatgatgtcgattctttctcatttaaagacttgataaagactcaagttgaaccaaaaatcgagacgtggaaattattccattccaacgttgttgttaacaatagccaattactacatttgattgtcagttttttctataaaaggaacgctttgtaa

SEQ ID NO: 78847 - DNA, 2124 bp, Saccharomyces pastorianus
atggctggtgaaacctttgaatttcaagcagaaatcactcagttgatgagtttgatcatcaacactgtctattctaacaaggagattttcttgagagaactgatatctaacgcctccgatgcgttggacaagatcagatataaggctttgtccgacccaaaggaattagaaactgaacctgaattgttcattagaatcactccaagaccggaagaaaaagtcttggaaatcagagattctggtattggtatgaccaaggcggaattgatcaacaacttgggtaccatcgctaagtctggtaccaaggcctttatggaggctctttctgctggtgccgatgtctccatgattggccaattcggtgttggtttctactctttattcttggtcgctgatagggtccaagttatctctaagaacaacgacgatgaacaatacatctgggagtccaacgcaggcggttctttcactgttactctagacgaagttaacgaaaagatcggtagaggtactgtcttgaggttattcatgaaggacgaccaattggaatacctggaggaaaagaagattaaggaagtcatcaagagacattctgaatttgttgcttacccaatccaattgctagtcaccaaggaagttgaaaaggaagttccaatcccagaagaagaagaagaaaagaaagacgaagaaaagaaggatgaagatgacaagaaaccaaaattggaagaagtcgatgaagaagaagaggaaaagaagccaaagaccaagaaagtcaaggaagaagttcaagaattagaagaactaaacaagactaagcctctatggaccagaaacccatccgaaatcaccgaagaagaatacaatgccttctacaaatccatctccaacgattgggaagacccactatatgttaagcacttctccgtcgaaggtcagttagaattcagagccatcttgtacattccaaagagagctccatttgacttattcgaaagtaagaagaagaagaacaacatcaagttgtatgttcgtcgtgttttcatcaccgacgaagctgaagacttgatcccagaatggatgtcctttgtcaagggtgttgttgactctgaagacttaccattgaacctgtccagagaaatgctacaacaaaacaagatcatgaaggttatcagaaagaacatcgtcaagaaggtaattgaagctttcaacgaaattgctgaagactctgaacaattcgaaaagttctactctgccttcgctaagaacatcaaattgggtgtccacgaagacactcaaaacagagctgccttggctaagttactacgttacaactccaccaagtccgtcgacgaattaacttctttgaccgattacatcaccagaatgccagaacaccaaaagaacatttactacatcacaggtgaatctctaaaggccgttgaaaaatccccattcttggacgctttgaaggctaagaactttgaagttttgttcttgactgatccaatcgatgaatacgctttcacccaattgaaggaattcgaaggtaagactttggtcgatatcaccaaggatttcgaactggaagaaactgacgaagaaaaagctgaaagagagaaggagatcaaagaatatgaaccattgaccaaggccttgaaagaaattttgggtgaccaagtggagaaagttgttgtttcttacaaattgttggatgccccagctgctatcagaactggtcaatttggttggtctgctaacatggaaagaatcatgaaggctcaagccttgagagactcttccatgtcctcctacatgtcttccaagaagactttcgaaatttctccaaaatctccaattatcaaggaattgaaaaagagagttgacgaaggtggtgctcaagacaagactgtcaaggacttgactaagttattatatgaaactgctttgttgacttccggcttcagtttggacgaaccaacttcctttgcatcaagaattaacagattgatctctttgggtttgaacattgatgaggatgaagaaacagagactgctccagaagcatccaccgcagctccggttgaagaggttccagctgacaccgaaatggaagaggtagattag

SEQ ID NO: 78848 - DNA, 390 bp, Saccharomyces pastorianus
atgctggaattagcacttggagtaccttctttgctttcagcatccacattatctagaccagctttagctagttctttctcaaacgcgtctacactgctgtcctttgtctttttctttttcttcttcaaggatagttcacccaaggcttctgctatgtcgtcagtaggctctttttcagcttcagcatcggcagaaacgctcttggacttcttctttttcttttttaatccggcaaataaatcatctcctgaaccattttctttgccgtttacggcagcatcaaaatcatctgggatcaccttcttagtcttctttttcttctttagtgtagggtcgaatcctaactcagcagctaaatcggaggacatctcgtgcgtgcttattatatga

SEQ ID NO: 78849 - DNA, 858 bp, Saccharomyces pastorianus
atgtcctccgatttagctgctgagttaggattcgaccctacactaaagaagaaaaagaagactaagaaggtgatcccagatgattttgatgctgccgtaaacggcaaagaaaatggttcaggagatgatttatttgccggattaaaaaagaaaaagaagaagtccaagagcgtttctgccgatgctgaagctgaaaaagagcctactgacgacatagcagaagccttgggtgaactatccttgaagaagaaaaagaaaaagacaaaggacagcagtgtagacgcgtttgagaaagaactagctaaagctggtctagataatgtggatgctgaaagcaaagaaggtactccaagtgctaattccagcattcaacaagaagttggcctaccttattcagagttattatctagatttttcaatattctaagaactaacaatccagaacttgctggtgatagaagtggtccaaagttcagaattcctcctcctgtttgtttgcgtgatggtaagaagactattttctcgaatatccaagatatcgccgaaaaattgcatagatctccggaacatttgattcaatatctcttcgcagaattaggtacgtccggttctgttgacggtcagaaaagattagtcattaagggtaagtttcaatccaaacaaatggagaatgtcttaagaagatacattttggagtatgtcacttgtaaaacttgtaagagtattaacaccgaattgaagagagaacagtcaaacagactgttctttatggtctgtaaaagttgtggttctaccagatccgtctcttctattaaaaccggtttccaagctaccgttggtaagagaaggagaatgtga

SEQ ID NO: 78850 - DNA, 1095 bp, Saccharomyces pastorianus
atgatttctattgtattggaattgttccagaacttgtgctgctgtcgcgggttttccgatgctactattagggtaaatgataaacgatataggattcaacgactacttggagaaggtggaatgtcctttgtgtatttggtacaactgtcaaagaatcctctgattatagacaacggcatcgcaacaccagaattatacgcactaaagaagattatttgtcctagtgtggaaagtatatccaatggtatgcgagaaattgaaaattacaaacggtttcaaagcccttatgttataaaaagtatcgactcacaagtaatgcaggaaaaagatggatcaaaaacaatttacatagtactaccatattattcattggggagtttacaagactctattaatcggaggttactcgagggcacctttgtatcagaggcagaatgcgtaaggataatgcttggagtgacaagaggtttactttgtttacatgatcctgcgtcaagacaagataacgctacttccagagtaaatgtcgatgcggtttctatgacttatagcgatgaaacggcgatgctcctagaagacactcccttagagatggacatgctttcctccaactcagcaggttcaatagcatatgcacatcgcgatattacaccttcaaacattttgttctcttcagacggtttaccagtaattggtgacctcggctcctgctctcaagctgatataacaattgaaaacaggcatcaactcagcgaactacaagaatgggtcaatgacaattgtacgttgccatatactccaccagaacttctaaacttgaaattaaatcaggttttgagctctaaggttgatatttggtctttgggttgtacgttctatactttaatgttcggtatctccccctttgagcgagaagagcaaatacatggagcttctttaacctacgccataaacactggtaagtacagtttcccgagaaattccagattttctgaggggcttttaagtgtaatcaagaaatacattcaagtggatcctatacaaaggcctactaccagccaattattaaatcttttacaagatttagacacttga

SEQ ID NO: 78851 - DNA, 1416 bp, Saccharomyces pastorianus
atgtcgattcaaactagtgatccaaatgaaacatcagatttaaagtcgttatctttaattgctgcccactcccatattacaggtttaggtctagatgaaaacttgcaaccacgtcccacatccgaaggtatggttgggcaattgcaagcccgtcgtgctgctggtgtgatattgaaaatggttcaaaatggcaccatagcaggtagggctgttttggtagcgggccccccttcaactggtaagaccgctcttgccatgggtgtttcccagtctctgggtaaagatgtaccattcactgccattgcaggctcagaaatcttttctttagaattgagtaaaactgaagcactaactcaagcttttaggaaatccatcggtattaaaatcaaggaggagacagaattgattgaaggtgaagtcgtggaaattcaaattgatagatctattactggtggacacaaacaaggaaaattgactattaaaactaccgatatggaaacaatttatgaattaggcaataaaatgattgatggcctaactaaagaaaaggtattggctggcgatgttatttctattgataaagctagtgggaagattaccaagctaggcagatcctttgctagatctagggattatgatgccatgggtgctgataccagatttgttcaatgtccggaaggcgaactgcaaaaaaggaaaacagtggttcatacggtgtcactgcatgaaattgatgttattaattcaagaacacaaggatttttggcattatttactggtgacaccggtgaaattaggtcagaggtaagagaccaaataaacacaaaagtggcagaatggaaagaagaaggtaaagcagaaattgttcctggtgtattatttatcgacgaagtccacatgttggatatagaatgtttttcctttataaatagggctttggaagatgagtttgccccaatcgtcatgatggccacaaatagaggagtttccaaaaccagagggactaattacaaatctccacatgggttacctctcgatcttttggataggtcgattattattacaactaaaagctataatgagcaggagattaagacaattttatctataagagcacaagaggaggaagttgaactgtcatccgatgccttagatctattgaccaaaacaggtgtggaaactagtttgcgttacagtagtaatttaatctccgttgctcagcaaattgcaatgaagagaaaaaacaacactgttgaagtggaagatgtcaaaagggcttatttgctatttttggacagcgctagatctgttaagtatgttcaagagaacgagtcacaatatattgatgatcagggcaacgttcaaatatccattgctaaatcagcagaccctgatgccatggatactacggaataa

SEQ ID NO: 78852 - DNA, 651 bp, Saccharomyces pastorianus
atgtcacaaggtcagtccaaaaaactggacgtaactgttgagcagcttcgaagtatataccaccagtttcatgatatcttggaagaaaaaactgatttgcatctaccgaagaaagaatacgacgatgacgctgttaggagagaggttcagatacagttacaagaatttcttttgagcgccatgacgatggcttcgaagtcactagaagttgtcaacgccgacacagtaggaaagacggtaaagcaattgatcatggagtcacaagagaagtacatggaaccctttgaccttgacctgaatgagcaagttagaaagatgtaccaagagtgggaagacgaaaccgttaaggtggcccagttgaggcaaacggggcctgcaaaaatcaacgaagtttacaacaactcaaaggatgagtatttggcacaattagatgggagaatcggcgttcttcaagctagaatgatgcagcaacaatctgccgaccatgatgatagtactgacgatgccgatgatcacatcaactgggagcacatcaagcaggattacgttgcctcactcaatgaattgtatcaaacacagcaagacctacccaaggtaagatataacgttgaaaaggtcaagcgcttaatggacttcctggaggaggattga

SEQ ID NO: 78853 - DNA, 1179 bp, Saccharomyces pastorianus
atggaaaataccacgaatcgtaatactgcaggcgttcttacgagcaacaatggtaactttgccaccaatagtgtagcggcatcaactccgaagaggtccaaaagtgctcgaaggaaaacgttcaaatgcaccggatatgacggttgtacgatgtccttcactagagcggaacatcttgcacgtcatataagaaagcacactggtgaaaagccgttccagtgtcctgcatgtttgaaattcttcagtagagttgataatttgaaacagcatcgggaatcggtccatgcacataaaaaccaccattctaccagctcgcaccagcgtaagccttcctcttcatctttatcctcctcttcttctgcatcttcttcgtcttctgcttcatcatctacatcatatagtgatccttacaggaaaactaatattaatagcgggaacatgccgatgatggcagaaaacgaaaaagcgccccatataatacattcttcgccggagttcattactagcacgagaagcatcccacccatctctccaaggtccatttataatacccaacgacagcaacaacaccaacaacaacaacagcatcaacaggctccctattattttccttcccatccaatcactgatagttactaccagtatcctcttcccagtaataataacaccatcaattatttaccatcagtagatgtgcagtatcctttgaatgtgagcccctcctcaatgagccatccggcctctgaggtaatcatatcgtcctttcctccgagatccatgccaagtacttccttcaaatataaagattctgctgactttcaagcacggacaactatgaacaaatacaatattagaccaagcaatatcaatgtcaatactagtaatatcaataacaatcttgattcattctccccgccgttttctccgtcaacgacagttgctgaagcaaaaccagttattttaccacagtatcagcaggcatttagccaaccaccaaatggaaataaaaacaataatatgtcttcctcgaagaatggcggcaaagggggagaaaatttcaagaatactgatgatcgcaatgataataataacaaaaagaggtcggaaactttatcagagtctgatatttcggtcaacaccaataagaaaaggcttagtgttgattacatattgacttga

SEQ ID NO: 78854 - DNA, 645 bp, Saccharomyces pastorianus
atgatgccctacaacacccctccaaatatccaagaacctatgaacttcgcaagcagcaacccctttggtattattccagatgcgctcagtttccagaatttcaaatatgatcgtcttcagcagcagcaacagcaacagcaacagcaacaacaacagcacctacaacagcagcaacaaaatcgcactgcgtcatcgttacagcagccgcaacagcaacaaccaataagcccgcctttgtttttagtaggggccggtgccagcgaaaactcaaaccttaacaagaatgccaacactagtactatccctcctttactctttagcagatcgtctcagcattatgttgtcccagatatagaccactcctccataatatacaagaacaacatctgcaaatctttcaaagatgacttatttttctgtccaagatctttactttctctcgaagaacaacaagcatgcgagaaaatggataggctgaccgctgaacaaatgtcattgtatcatcagaacacgcaatccagttctaatcctggttctatgtcttcttcacctccaaattctgcttcttctatattcaactctaggccgaagttcaatccttatacatctcaaagttttaatcctttggaaagtgttcaagaatga

SEQ ID NO: 78855 - DNA, 441 bp, Saccharomyces pastorianus
atgtctacttttaatgcagaaaccgctgataacttggaagatatcgagaaacaattcgctgttgttgctgttgaacaagcggaaacatactggaaactattaacaagtgttcccggttccaagttacgtttgactaagtttgatgacgaaatatacgagaattttatggagagattcccagaatacaaagatgttgaaagggtcaaaaagtttacggaggaagaattaaaaacaaaagaagccaaggaaagatggagaaagttcttcacaatttttgagaaaaaaatcgaagactataactttggtactttgttgaggacagacgcttctgccgagtatggtcaatttactacttgttttgtcgtgagactacaattttacgcttttgaaattgctagaaataaacacggcttgaacgattggattgtcggtcagaaatga

SEQ ID NO: 78856 - DNA, 507 bp, Saccharomyces pastorianus
atgtccaatctattaaacaagtttgctgataagttgcacggcaacgatcatgatgaacgttacgaagacgacaatgacgaccagactagacaacagcgtcatgaaaaacaccaacagagggaattcaggaatcaaggatccaaggccgatccctacggcgaagaaaaccaagggaatttccctcaacgccagcagccacagtctaatctaggcggtaacacgcagtttggcggtaacgacttccagcaacaaactactgactacactgccggcactggtggtggcacttatacccaaacttaccgcgaaactaacactcaaggtcagttggacgacgatgaagacgatgacttcttgacttcgggccaacagcaaaaacaaggtcgtacaagaggtgctcaaagtaaccgctaccaatcctctaatatcggcagcggtagacgcgatctgtctgggtcaggaaacgatgaatatgatgatgatagtgggaaccaaggcgtctggtag

SEQ ID NO: 78857 - DNA, 2067 bp, Saccharomyces pastorianus
  modified_base (2035)..(2035): a, c, g, t, unknown, or other
atgggggaaaaaaggacaataatcaatgcgctgaaaaactctgcagcgtcccacttcatcaagaagttgaccgcagatacttccctgtcgtccatacaagaggcaataaacgtcgtgcagcagtacaatgcaacggatcccgtgagattaaagcttttccatacgcctcggatggtttcgcagggggctcattttgcattttgtttgcccactaagaaaccacattacaagccattactgctttcgcaaaacgcacttgatgagtttaatttggtgcaggatcaggacttggagaaaatactatccggtgagaaagtatattattccgatagtatctttccctatagtacagtgtactccggatttcaattcggctcatttgctgcacagctgggagacggacgtgtggtaaacttgtttgatcttaaggacaagtgtagcggacaatggcaaacgtttcagttgaaaggtgccggtatgacgccattttctcggtttgcagatgggaaagctgtgttaagatcaagcatacgtgaattcataatgagcgaggcgttgcacagtattggaattccatccacaagagctatgcaattaactctgttaccggggacgaaggcgcaaaggcgcactcaagaaccgtgcgctgttgtatgccgttttgcgcccagctggatccgcttgggtaacttcaacctattcagatggcggcacgacttgaaagggttgatccaactatcagattattgcattgaggaattgtttgctggggggacccaatttgaggggaaacccgactttaatatattcaaaagggatttttttcctgacactgagacgaagattgatgagcaggtggaaaaggatgaaactgaggtgagtaccatgaccggagataacatttccacattgagcaaatatgatgagtttttcagacatgtagttagcttgaatgcaaacacagtggcccattggcaagcgtatggggttgctaacggtgttttgaatacggataacacctccattatgggcctgacaattgattatggcccctttgccttcctggacaagtttgaaccaagctttaccccgaaccatgatgacacagcgaagagatattcgtttgccaaccagccaagcattatatggtggaacttgcaacaatttgccaaggatctcgcatgtctgctgggtcctgaggcccgtgaccttgaattgttacttaagggcgaactgaattctgttgatgacgccctagagaaaaccatgattgaaagggtccagaagttggtagagctcagtgctaatgagtacaagtatgtgtttacgacaaggtacgcgcagataatgtctcaaagactcggtgtagatctggatctggaaaagtgcatgtcttctacaaacctcaaagatatcgaacatgcagccgagaaggctaaagagttctgcgatgttatcgtcaaaccattgctagatattctgcaggccacaaaagtcgactataacaatttttttatccatctacaaaattacaaggggcccttcttcatcaaagataaaagtgacaccgcaacactttttggagcattcgacgaagagtacttgggtatgttcttcaactccaagcaactgcagcaaatggcagaaactgaagaggccttcgcggctggtgagaaggtctttgacgctaacggcgaattgcgtttgctcaacgaaaaattgcaagaaatacgcaattggacccaagactatttgaccttggtcccacccacggaaactgctgcaagagcgtcgcttgccaagaaagccaacccgttgtttgtccccagaagttgggtactggaggaagtagtcgacgatttaatgtacagtcaaagggatggcctacaagatcccagttcggagctagatacatctgcgttgaagaagctatacctaatgagcgtaaacccatacgaccgcacgaaatgggatgtcactctgcggccagaactggagacaaaatgggctgacctttcccaccaagatgacgctnagtttatgatgcaagcttcctgcagtagctaa

SEQ ID NO: 78858 - DNA, 246 bp, Saccharomyces pastorianus
atgggtttacgctcattaggtatagcttcttcaacgcagatgtatctagctccgaactgggatcttgtaggccatccctttgactgtacattaaatcgtcgactacttcctccagtacccaacttctggggacaaacaacgggttggctttcttggcaagcgacgctcttgcagcagtttccgtgggtgggaccaaggtcaaatagtcttgggtccaattgcgtatttcttgcaatttttcgttga

SEQ ID NO: 78859 - DNA, 654 bp, Saccharomyces pastorianus
atgtccaagatcacttcttctcaagtcagagaacacgtcaaggaattgttgaagtattccaacgaaaccaagaagagaaacttcttggaaaccgtcgaactacaagtcggtttgaagaactatgaccctcaaagagacaagcgtttctctggttctttgaagttgccaaactgtccaagaccaaacatgtccatctgtatcttcggtgatgctttcgatgttgacagagctaagtcttgcggtgttgacgctatgtccgtcgatgacttgaagaagttgaacaagaacaagaagttaatcaagaagttgtctaagaagtacaacgctttcattgcttccgaagttttgatcaagcaagttccaagactattgggtcctcaattgtccaaggctggtaagttcccaaccccagtttctcacaacgatgacttgtacggtaaggtcactgatgtcagatctaccatcaagttccaattgaagaaggtcttgtgtttggctgttgccgttggtaacgttgaaatggaagaagacgttttggttaaccaaatcttgatgtctgttaacttctttgtttctttgttgaagaagaactggcaaaatgttggttccttggttgttaagtcctccatgggtccagctttcagattgtactaa

SEQ ID NO: 78860 - DNA, 1479 bp, Saccharomyces pastorianus
atggctaatgatcaagatcccaacaagtctctcattaatgacgctttgactcggagtatgtccgaattttatgatgatgatgatgataacgacagtgacatgtgtagggcaaatgatgagggagaagacgtttttgaccttccacttaaggtaggcgtttctcaaagcaggaacttttcagaagtaaatgacgtgttagacccgctttctagtttgcatggtccgtccaagaaggtgagatttgaacagcaaaagcagcaacagcaacatcagcaacttcacaatgacttcaatacagatttcaacctgaaaagcccgtccagtaaaaaaatgggggtagaacagctgatccagtcagccaatgaaatcaacgattacctcgctaacaacattgacaaggtaaatagctttaactcagagctattgagcggcagtggcaagttacctgggagagtaaagagtgacacagcaactcaaggtaccggacgcttagattccatgtccaactttgctcttagcgatacggagttggacaatgatgacgataattatctcctggatccccttgcaaatgctagctctactacacccactgtggaacaccacggttacagcttattagacaaggctttatccacgtctgataaggaaaaaatatatacgaataaagtgaattcgaatagtcagatagatactgataatcactctcacgaaagtggaaacactaccaataacgaaacagatgaaaatgagagttcggagatcctggactacacaaaatttgattctttcccctatcccccgtcttctgcccccaatggggaaccaccagatttgaaagtgctaagcattgaatgtgagcaggaaaatgaaaaagagctacgacgaatatctttattattggatcattacgaatcaataccgaaaataccagaattgtcagacgatgaagcactatctaagttccgtgagaatatcgaattaattttacaactatctaagaaaattaacgataatgcgaacactttagcgatttcctccgaagatcctcaaaaatttgttaattttgtgatgaagaacccaccttccttatcattcagagattttatcgacagaatccagaataaatgcatgtttggtgccgtagtctatcttggagccacctatctacttcaacttgtgtttcttacgagagacgaaatggacggtcccataaagttgaaggctaaattacaggaggaccaagcccataggatcatcatatctacaataagaattgccaccaagctattagaagactttgtccactcacaaaactacatttgcaaagtcttcggtatttcaaaaagactgctgactaaactggaaatttctttcatggcgagtgttaatttcgatggattaatgattacttgtgaaaaattagaaaaaacattgcatatccttgatgatacaagacaggcattaggaaacacatga

SEQ ID NO: 78861 - DNA, 1623 bp, Saccharomyces pastorianus
atggtatttactaaggaagaagttgattactcattatatctggttacagattctaccatgcttccaccgggaactactttatgttctcaggttgaagctgggttgaaaaatggtgtaacgctagttcaaatccgtgaaaaggatattgaaacaaaaaatttcgttgcagaggctttagaagttcaaaaaatatgtaagaagtacaatgttccacttattatcaatgaccgtatagacgtcgctatggcaatggacgccgatggggttcatgtgggccaggacgatatgccaatcccaatggtaagaaaacttttgggcccttctaaaattcttggatggagtgttggtaaaccttcggaggtagagacattggctaaatgggggccagatatggtagattatattggtgttggtactcttttccctacatcaacaaagaaaaatcctaagaaatcacccatgggtcctcaaggcgccattgccattttggatgctttggaggaatttaaagctacatggtgtagaaccgttggtattggtggtcttcatcctgacaatattcaacgtgtgctttgtcaatgtgttgcttcaaatggaaagagatcgttggatggtatctctctagtcagcgatattatggccgctccagatgcatgtgcagcaaccaagaggttgagaggcttgttagatgctaccagataccaatttgttgagtgcgagttaaataatacatttccgaccacaacttcaattcaaaacgttatatctcaagtatcaaacaatcgtccattagtgcaacatatcaccaataaggttcatcaaaattttggtgccaatgtcactctagctttaggctcatctcctatcatgtctgaaattgaaagtgaagtatctgaactagcaagaatcccaaatgcttctttactgttaaataccggatcagtggcacctattgaaatgctaaaagccgcaattaatgcttataatgaagtaaatagacccatcacctttgacccggtcgggtacagcgccactgaaacaaggctctgtctaaacaacactttgctcacttacggccaatttgcttgtataaagggcaattgcagtgaaatactgtctctagccaagttaaataaccataaaatgaagggcgtcgactctagcagcggcaaaacgaacatcgacacacttgtgcgcgctacacaaattgtggcattccaatacaggactgttgctgtttgcacgggtgagtttgattgcgttgctgatggtacttttggaggcgaatacaaactttcatcaggaacagaaggaataaccgctgaagatcttccatgtgtaataattgaagatggcccaattcctatcatgggtgacatcactgcaagtggatgttcacttggttctacaattgcttcctttatcggtgggttagattccactggaaaactgtttgatgctgtggttggtgctgtcctattatacaaatcagctggtaagttggcttccacccgttgtcaaggaagtggttcattccatgtcgaattgattgacgcattatatcaattattccatgaaaataaaccagaaaagtggtccgcttctttgaagaaattcaaataa

SEQ ID NO: 78862 - DNA, 966 bp, Saccharomyces pastorianus
atggttgaaattgtgggccacagagcttttaaagcaagatatcctgaaaatacgctactagcatttgagaaggcttatgcagcaggtgctgatgtaatagaaacggatttacaaatgactagcgatggtatgatggtggtaaaccatgactcagacactggtcggatgtgggataagaacttggtgattggcgagtcgacttgggaggaggttaagcgattgcgctgcaaagaggatggttccttagcaatgatgacattgaaggaaattctaacatgggcagtgtgccatccaggtgctaaattgatgttggacatcaaatttaccaacgagaaaatcatcatgatcaagacctttgctatcatgttagaggttaagaatgatcttaaattttggcaggagaggatcacgtgggggctttggttgctggattggtacgatttcggtattgaaactggtgttctgaaggatttcaaagttattgtgataagtctgtctttagatatcgcctcgcaatttgtgaagcgctctttgacactgaatgatcctcactataaactttttggtatcagtgttcattttgtctcctcgtggacaagccaatttagattgagattactacctgtgcttatgaagaatgatatcaaggtctatttatggactgtcaacaaacctatagatttcaaatatctgtgcgaattgcctatccatggtgctatcacggatgatccgatcaaggcaagaaagttatgcgatggtcataccgtggcgaagaagcctactgctgaaaaaaagtttgttgcgcccagtctggcatctgtagatgggctaagattccatgcttttatcaaagtttataacatcctttgcacgcttctatattccaaatgggtccatattaagttgtgcggttggtctattgcttatgtgatttttttgttccttcgaaccattcattttctttga

SEQ ID NO: 78863 - DNA, 1485 bp, Saccharomyces pastorianus
atggacttaagagtaggaaggaaatttcgtatgggcaggaagattgggagtggtccctttggtgacatttaccacggcacgaacttaattagtggtgaagaagtagccatcaagctggaatcgatcaggtccagacatcctcaattggactatgagtcccgcgtctacagatacttaagcggtggtgtgggaatcccgttcatcagatggtttggcagagagggtgaatataatgctatggtcatcgatcttctaggcccatctttggaagatttattcaactactgtcacagaaggttctcctttaagacggttatcatgctggctttgcaaatgttttgccgtattcagtatatacatggaaggtcgttcattcatagagatatcaaaccagacaactttttaatgggggtaggacgccgtggtagcaccgttcatgttattgatttcggtctatcaaagaagtaccgagatttcaacacacatcgtcatattccttacagggagaacaagtccttgacaggtacagctcgttatgcaagtgtcaatacgcatcttggaatagagcagagtagaagagatgacttagaatcactaggttatgtcttgatctatttttgtaagggttctttgccatggcagggtttgaaagcaaccaccaagaaacaaaagtatgatcgtatcatggaaaagaaattaaacgttagcgtggaaactctatgttcaggtttaccattagagtttcaagaatatatggcttactgtaagaatttgaaattcgatgagaagccagattatttgttcttggcaaggctgtttaaagatctgagtattaaactagagtatcacaacgaccacttgttcgattggacaatgttgcgttacacaaaggcgatggtggagaagcaaagggacctcctcatcgaaaaaggtgattcgaacgcaaatagcaatgcagcaagtgcaagcaacagcacagacaacaagtctgaaactttcaacaagattaaactgttagccatgaagaaattccccacccatttccactattacaagaatgaagacaaacataatccttcaccagaagagatcaaacaacaaactatcttgaataataatgcagcctcttctttaccagaggaattattgaacgcactagataaaggtatggaaaacttgagacaacagcagccgcagcagcaggtccaaagttcgcagccacaaccacagccccaacagctacagcagcaaccaaatggccaaagaccaaattattatcctgaaccgttactacagcagcaacaaagagattctcaggagcaacagcagcaagttccgatggctacaaccagggctactcagtatcccccacaaataaacagcaataattttaatactaatcaagcatctgtacctccacaaatgagatctaatccacaacagccgcctcaagataaaccagctggccagtcaatttggttgtaa

SEQ ID NO: 78864 - DNA, 1251 bp, Saccharomyces pastorianus
atgaaagcaaagtcgatgaagagcataatatctgtgccaatatcagtgtctaaaacagggaaaatgaagttaacagcatctcccgataatctagcatctatgatgtctaaagaccaaaataaacttattcatttagacccagttccgtcttttgaggacaggcacgagattaaaccgtggctacagaaaatattctatcctcaaggaatagatatagtcatcgaaagatcagatagtagcaaagttacttttaagtgtaggtcagtacgatcgaaagtagggttgaaccctaaatccaaaggttcctcttcaagatcccatgcatgtccatttagaattagagcagcctactctgtgcggttacagaagtggaacgtggttgttatgaataacatacattcacatgagctgagatttgatttgattactaaaacggatgactataaaaagtttaaggaaaatcttcgtcagaagaacgacgaaaaagccatcaaaacatttgatgaattagaatataaagcaagtctaaacttaccactcgtcacaccaattatttcttgtgactgtgggttaaccaaggaaattgaagctttcaataacatttttctcccactatcaaacccccctttgacgtctaaaaaaaatttgctcaaaacaaataaaaactccgtttctaaaataaaatccagacagatggataattcgaaacctaggccaaggttgaaaacgaagttggatgcggatctacatgataccggatttttagacaatttcaaaacgcggaattcctgtgtaaagatagagaaagaagattctttaacgaacttaaacgaaattgattttacgaacatgttttgcaacgacaatttcatccaaaattacaaccaaggcctgatggaacttttgacagaacctacaccaggtccttcgtcctcttcttgtatacttccttcaacaccaacgaggcccttgtcacaaagcaaaatggatatagccctgtcagaatcaacaacatcttcaccaaattttatggaaacagacgctccttatggagatgagatcattaaagtttacaaagataccaaaagcaacgcaccaactgctgatacagatattgctacgaacttaggcaaagagagaaacgaaaattttggcatgttaaactacaactacgaagcgttgcttcatttcaacgatgagcattttaatgaattaaattctattgacccagccttaatatcaaaatattaa

SEQ ID NO: 78865 - DNA, 1386 bp, Saccharomyces pastorianus
atgggtatacctatgcaaatataccaggatgggaagggggtgcaattttaccacacgagatatcagaacgtatttgacgaacgggcgagcaagtatggcaactacacggtgaataatgattacccacagcttccagatacgataaaggaacatatcgaccagcttacctttagcaatgtcggagaggatggtggagatgttggaaactattctgaagaagacgatgatggtgacgaagaaaaggaacttgaagatgtttttcgaagtaaccgtgggttggaatttgtacggattaataactattttactacccacgatttacaaagtttcaaaagttttagaaatttcaatagcaagtactggattttttattctaatcaagcagaggacaaaaaattactgctgtatgactttaacggccaacatttgatttttatcaagcagcaattttacgggcagttgaatttactgctatcggacgcaataatatgtatggactgcaattttggttataattcaaacaccattcaaattttagttggatttcagaatggaaagttgttaaagctaaactgcgacttgaacggaaacgtaaacaatcacttgcttttgaaggatccttcaacttcctctcatcaaagccacctatctatattaaatgtctgggcaggtttgttgccacatttcgttgtttcttttagtttgaaagatgggctgctaataacttctttagatcaccaacaaagcaatggaagttttcaaagtttccataccaacattgatttgcctgtagatctacgcacgaccacaaatgtcaagtccgttttaaatttccctcagtttactttatacaaaggaaatgatatgattttccactgcaagaatctattaggatcggatgcttccacgctaaacaaggaaataaactttatgcttaaaatagacgaagacgttcaaaagatcgactatctttctattacgaatcacattttactcgaaaccaacatgagatatctgtccattccaacaagagaccccatagagaattcaaattcttctccacccgtctcagacagcgaggtttatccaatattttacaagacacaagaacttcatgtccatgcttcaggaacaggacgtcagatagcaaacaatgggaagtatatttttataaccgagcaacatctctacggaacagcgttatcggtatacaagtactctatatctttcaaacggtggctgttcgtgggctactcagacattagggccaaatacggtataaggagtgtcaaagatctctttgttggtaactgtccctctgtaaatagcccagtgctgacaattcttactgatgacaataacattcaaacaattcttcttaaataa

SEQ ID NO: 78866 - DNA, 471 bp, Saccharomyces pastorianus
atgatggatggttccataacaaggaaggtaacatcaacgttgtccaaccaattggcgacctggaaatggaaactgcagttatcgttattggaaagaaaattagcgacaataaacaatgattattttctcctgcaatgggaactcctttttataactaatgaagtgatgaaatggaaagaaatgattgcctttttggaaagccagttattttgcacaacgcaaaatttcgtggcacaagagacacatgacagggaaacctttccaagcctggtagatgattataacaaacagttgagcgaaaataacctgattatttctgtattgaaaagtagaccacagctatcatcatttcctatatatttgagcgatgaggtgtgttcacaccttaaattcgtcatcgcggaactaaattcattgataatagttttttttatttctttagtatttttgtgggtatcgatagaagtttaa

SEQ ID NO: 78867 - DNA, 723 bp, Saccharomyces pastorianus
atgaaaggaacaggtggagtagtagtcggaactcagaatcctgtaagggactacaatcatagcactgatgaagagtatcaaagattgagaagattagcagatgaagcgtataagaaaagagaccaactcagccatgaatcgcaaaccgcttatcaacaaggtgacaagaagctagctcatgaactaagcgagaaaagtaaggcacaactgaaaaccgctgaagattttaacatgcaagcggcagaatatgtgtttgtagagaacaatgctgattcttccagtaatgaaattgacttacatggattatacgtaaaagaggccctatttattctccaaaaaagaatcaaattcgctattgatcataatgaaccacaactgaacgttattgttggaaaagggttgcattctcaaaacggtatagcgaaactcaaaccgtcaattgaggagttctgtgctaagcatggtatcagaaaccatttggaaaaaggaaattcaggagtcttggtgcttgagttgcaaggtgtgcaaatgcagatggatggccccgcagtgaatgcccccactaatcagtacaatgcacaaccacatcctcaatataacaacaatggaggacaacctcaaggtcaagcccagaattataataacagtggcaatgacaacaaagatagtactttgactagtatattcaaaatcttttgtaattgtatacaaagtttggcgtga

SEQ ID NO: 78868 - DNA, 822 bp, Saccharomyces pastorianus
atgtttggagtcaaggatgctatattcaagattaaacgttccattgcaggcacagattcttctgattccactgcttacacaacggcaagtgaatcttcacctcaattaaaagattcccataacccctttcgaaataaaacgacatccgagagaactatagttgaggagggctctctaccaccggtgagattgaatggctacttgccctcaactaaaaataaacttcttactcctgaaatgtgcgatgaaataagaacattaatgcccacaaggatacagttgtacaccgaatggaaccttctatatagccttgagcaacatgggtcttcattacactccctgtatagtaacgttgctccagatagcaaggaatttagaagagtggggtatgtattagtaataaaggatcgtaaaaacggaatctttggagcttacagcaacgaagcttttcatcctaacgaacataggcaatacacaggaaacggggaatgttttctatggaagctggataaagtacctgatgttaatatatccgaaaaagaagaatctgagcaagaaggtaaagaaggtaaggaggaaggggataaagaggagagatggaggttttcaggttatccttacactggagttaacgaatttgctatatactgtacatctgaatttctttcaatgggtgcaggtgatggtcattatggtcttttatgcgatgacggcctactccatggtgtttcaaacccttgtcaaacatatggcaatgaagttttgagtaaggagggcaaaaaattttctatagtagctttggaagtatggcgtgtaggatag

SEQ ID NO: 78869 - DNA, 402 bp, Saccharomyces pastorianus
atgacagcaatgaaagaagacaacgctgcattgattacactgaagaaaaacaacgaccaagaaaaacttagagtgcataaactgacagatgcaagttcaaactctgctgatggcttcgttataaataaagccaaaaacggtggtccgcttaataaaaagtcattagttaataatgaacaacacattaagaaggctgtgtcgcctggtagagtcaggaagcacaaaacgacaacatcttccacaaaatcgcgaacgaaaagtaagaaaaaagacgcttctgaaagtaaagtacagagagagaataagggttcattttaccaaggtgccattttcggttcgttccttggtgctgctgtaactactgttttaagtaacctagcagttaaagctcttcaaaattag

SEQ ID NO: 78870 - DNA, 1083 bp, Saccharomyces pastorianus
atggatttaagtttcacgactaaaagtgtcaaaattaatggtcaaaaccatcgaatattactgcaaaacgaaaacggaccttgtgccttgttagcacttgcaaatattctaatactttcaccagatcatacacgtttttccaatgagttaataaggttggtaaataagggaagtcaaatatctttaaaagaacttattgaagtcttagcagatattgctttacaagttacagataaacctagtactgatataagtgagttactaagtttgttacctagattacatgaaggtttaaatattaaccctgagtttaatgggtcttttgaaaatactaaagagatgtcaatatttcgattgtttaacgttgatgttgtccatggctgggttatcaacagtttcataaatgaaaacattgatgagaaactatctcattattcttatgaatctgcgcagagaatcttaacacaagcagctgatataaattgtggaatttcccaagatgaaaactcggacgaagttttacgtgatgccatgcatttgggtctgtttttgaacgaatcaccgactcagttgaccgcctttggactcctacgattgagagaaaagctgctacacaacaaattctcgattttattcagaaatgaccatttttctacattgttcaaatacgaagatcgattatacacattggttacggactttggttataaaaattgtaaagatattgtatggcaatccctagattcggtggacggctcctgcgatgctttttttgccggtaactttagtgcagcagaggtaaatggacagcaattgtcaactgacattgaacgtgattttggaactggaaatttgctacttgaagaaattcagcaaattgaaaacgataaagaactagccaaacagttacaggaacaagaacaagaacgtgttacgaaatttgaagcaaaaaggaaaatccattctcacaaaaaaaactcagaaatacacgcaccagtcaaaaaagacaagtttaagcgaagaagcagccttctcaatgcaaaagcttctgaaaaagagaaaagtgagtgcgttgttatgtaa

SEQ ID NO: 78871 - DNA, 207 bp, Saccharomyces pastorianus
atgagagcagtcactagaaacaaaatagtcaataacctatacttttctacatttctcattgcattcgcatcagtggccatcggttctgtgctgccatgtccagcacattcagtggattctgattcaccagctgtacagcaacacaagcttcagcttgctcatgagcaggagttaaagaggaaggatgctttaagtaaaaagatttaa

SEQ ID NO: 78872 - DNA, 1245 bp, Saccharomyces pastorianus
atgtttgtcagggttaaattgaataaaccagtaaaatggtataggttctatagtacgttggattcacattccctaaagttacagagcggctcgaagtttgtaaaaataaagccagtaaataacttgaggagtagttcatcagcagatttcgtgtccccaccaaattccaaattacaatctttaatctggcagaaccctttacaaaatgtttatataactaaaaaaccatggactccatccacaagagaagcgatggttgaattcataactcatttacatgagtcataccccgaggtgaacgtcattgttcaacccgatgtggcagaagaaatttcccaggatttcaaatctcctttggagaatgatcccaaccgacctcatatactttatactggtcctgaacaagatatcgtaaacagaacagacttattggtgacattgggaggtgatgggactattttacacggcgtatcaatgttcggaaatacgcaagttcctccggttttagcatttgctctgggcactctgggctttctattaccgtttgattttaaggagcataaaaaggtctttcaggaagtaatcagctctagagccaaatgtttgcatagaacacggctagaatgtcatttgaaaaagaaggatagcaactcatctattgtgacccatgctatgaatgacatattcttacataggggtaattcccctcatctcactaacctggacattttcattgatggggaatttttgacaagaacgacagcagatggtgttgcattggccactccaacgggttccacagcatattcattatcagcaggtggatctattgtttccccattagtccctgctattttaatgacaccaatttgtcctcgctctttgtcattccgaccactgattttgcctcattcatcccacattaggataaagataggttccaaattgaaccaaaaaccagtcaacagtgtggtaaaactttctgttgatggtattcctcaacaggatttagatgttggtgatgaaatttatgttataaatgaggtcggcactatatacatagatggtactcagcttccgacgacaagaaaaactgaaaatgactttaataattcaaaaaagcctaaaaggtcagggatttattgtgtcgccaagaccgagaatgactggattagaggaatcaatgaacttttaggattcaattctagctttaggctgaccaagagacagactgataatgattaa

SEQ ID NO: 78873 - DNA, 915 bp, Saccharomyces pastorianus
atggtcaccattgtatttgatcatccggcggaagactttccagagttgaagatcgctggggagtttaccaattgggaaggtgtacccatgaaaataaataccagtagcgggaaatgggaatacaaatttgatgaatcttcggtaaccaaacataatgataaagataaggtacatttcaaatttatagatcagaacggtaactggtttgccgatgatgagtatccaaaggaggtggacgagcacagcaatgaaaacaatgttgctactttaaatagcgaagaggacggcggaagcgctggtgaagaaaaggacgagggcgacaaaactgcacacaatacaaatgaaaatgggtcagagttgtactatgagggccctgagacgccaactccttctttaaaaggtaatgtaacgtttccttcccctaaaacagctatttcgcaagatggttctgcttttgcaaaagagactaccaggaaagaaagaaagtatgaacatgctccattgaacgaagttccagtagaaagagatccaaaagaagagaataaggagctctctccaaacttttctcaggaacagacagagaataaacaggacgaaggtttagacaatctatctgaaggtaatgataatgataacacaagagttaatgaagatacagacgtcaccgacacgcaagaatcagaacatgagatcaacggttctgatactgaaaatacggatatgtccgaacaagaagaaatacagaaaatagataaacccgccgatcaaaacgctaagtcaattgtaaaagaaggcgatgccaatactgaagattatgaaagtgttttgaaaaagctactgggagcgttaggacgcttttttggctcatggttttcttggttgacaacgaaaatgtcaagctcagaggcatcataa

SEQ ID NO: 78874 - DNA, 1851 bp, Saccharomyces pastorianus
  modified_base (62)..(93): a, c, g, t, unknown, or other
atggtggtttcttataacaataacaataataataacaataacaataacaataacaataacannnnnnnnnnnnnnnnnnnnnnnnnnnnnnnnaacatgttccctccttttccttcttccgatgactttgcaatgtatcaacagtccagttcttctggcccttaccaagaaacttatgcgagtggccctcaaaactttggcgatgctgtgtatcctatgaatggtaattttactcttttaccatccgactttacacgagagcctaatgattcgttcttttacgagaatgacggaatttttgattatcagcgtattcaacagcaaccaactcaattccagacaaagcagcgaaatgattcacaacaacaacggttttcacaggaacaaaatttcgaaattgataacgaagttgtccacaataacaatcgttattatgaatatgaaaggtcatctaatgaagtctctccttttgatgatgagaatccaaatgtgttatctgatggcatgtcacccactattatggcaactgcaactgcagtaaccaacgcaaatgcgcctttaccagttaatgcacaagccaataatcctttgaattttacatcggccccaagtagaactgtttatttgggtaatgtgccaccaaacctaagcgttaaagagttattggatcatgtcagaagtggtgtcgttgaagacgtcaaaatcatacctgaaaagatgtgtgcattcgtttcgtttatagatgaaagtgctgcactattgttccattcagacgcaattttaaagcgcttgaacatcggtgacagggatatcaaaatcgggtgggggaaaccaactcgaattgatcctattgtagcggctagaatctctacggacggtgccactagaaatgtatacattggccgtatgacgattgaaggcgaagaatcacatttatctgaggagcaattgagggttgatttagaagaatatggtgaaattgactgtataaaaattatcaaggaaaagggaatcgcctttattcattttgcgtctattttaaatgctataaaagtggttacgaatctgccaattagaaatccatactatcaaaataagagaatattttatggaaaggacagatgtgcatttattaccaaaactcaacaacataatgcggctcaatttctaggtgtacaacctggtatggaacatatgatagagttttctgatcgtgaatttatatctaacgctttgttacaacagtctgctgctgctgctgcaattgctacatctgcgggcggccccaataacttgggtaacaggactgtttacctgggcagcttgcctaaggatgttaaaattgaagaaatatgtaatgcagttcgtggaggtttattacaaagtataaaactattgaacgatcgatacgtctgttttgtaacattcattgatcctactgctgctgcgcagttttatgcaatgagttctttgtatggattcacagtccagaaaaaacgttgcaaagtcggctggggtaaacactccggcccattaccaaatgcgctcgccttggcagtcagtaatggtgcctcaagaaatgtttatgtgggtaatattgattttgtcggcgattccctaagagatgaacgtgtcttcaccgaaagcaacttaagacatatctttcagcaatatggggaagtggaacaaatcaatttcttgcctgagaagaactgttgtttcatcaattatactaacatcagtaatgctattttagccttagacaagattaagtctaacccctatttcaaagatctcaaaataaactttggcaaggatagatgtggtaacgtcccccaccaatcacgttaa

SEQ ID NO: 78875 - DNA, 282 bp, Saccharomyces pastorianus
atgtttttacagactctccgcctaactatgccaaggatgtttttgcacatgaaaccgtcccccataacgataacaagggcctgcacagtgcccagcctcctatctgttgcagctccgcaaccagctcttgttgcagctaacagacctttggtttttaacagaggtttcaaggtcagaacatctgtcaaaaagttctgcagtgattgctatttggtaagaagaaagggaagagtatacatttattgcaagtcgaataaaaaacacaaacagcgtcaaggctga

SEQ ID NO: 78876 - DNA, 384 bp, Saccharomyces pastorianus
atgaaaaatccggagtcatctggagtatcgagctctccacagatacagcgagtttcgccttcctcttcctcgacttccccctctccaccttccataggaacatcttcttgttttacactttcttcctgtacacttccaatcgccgccgttgttgtcgctgttgatgttgttgatataatgtctgtggacccactagcaatgacttccgctttctccatatcttcactgcccacaacagggcctttaggcactattgctgtcgattccattactcttctctttactcctatatgtttatgctatcttttagtaaggttacgcaaagtaaacttcgaaggaaacaaactattgatggtctctgttgtgaactttgtacccctgtaa

SEQ ID NO: 78877 - DNA, 1521 bp, Saccharomyces pastorianus
atggaatcgacagcaatagtgcctaaaggccctgttgtgggcagtgaagatatggagaaagcggaagtcattgctagtgggtccacagacattatatcaacaacatcaacagcgacaacaacggcggcgattggaagtgtacaggaagaaagtgtaaaacaagaagatgttcctatggaaggtggagagggggaagtcgaggaagaggaaggcgaaactcgctgtatctgtggagagctcgatactccagatgactccggatttttcattcaatgtgagcagtgcagttcctggcagcacggttattgtgtgagtattactcaagacaacgcacctgataaatattggtgcgagcaatgcagaccagagttacatcagctctttaccacagatactggcgaagcaaggttaatctataaacctgtgcaagagaaaaggaggcaatcaagaaggaaggcacgaagtgcagctgcaagtaaatctcatgccgccaatgaagcagagaaaagtcccagaaataccagcaataccgatgataacgtcgacgatatcggcgacgaagaagatgaagtagaagatgaagcttcggctgtagcattagccaaggacggcaacacgaggtcaagtagaaggaggaggaggaattcaatggatgatgcttctaccgatcagtattcactggatcctggagatagtgataagaagctactggatagaacaagggcaactttcatggcaagagaagaaaagcaatatcaaagaatgcttgaaaaagccttgaaagaaagcaggaggacatcacatcaagaagatcctgaaagttatgaaaatgatgctgatatataccaaggtgataccgacaatcacaacggcaccactcgattacaaacggatgttatgctaacggaaggcaaaccggactcggtaacaaatgatgatatgaaagaaagcctacgaccatcgaaagagcaatcaatggaaaaaacaaatgatgtggaaaaagaagctagtcaagaaaaggaatcttctacgggttcggcgcaagacactgagaaaactgatgaacccatcctacccctaacctcaatatcttcttctgaggatgattcaaggaaagctagttcgaggggttctaaaagagtttccaaaccagcaagaaagggcaacagaactcgtcgaagcaatacaagttcagacaccaaccaaaatagaaggagtgctgatataggtaccgacaaaccagtaaagcccagattaccccctcaaaggacctcattaaacgaaatgagaagaagggtatctgctattttggagttcatttctagaactcaatgggaattgagtgaagatcagtctgatcgagaagaatttgtacgattcgtggaaaaccagcatttcgtagaaaaagttgatacgatttacaacggttataaggaaagtctatcaatgatggacgacctgactagagagttactactatgggagaaaaaatattcaaataacactaatgccattcaataa

SEQ ID NO: 78878 - DNA, 1650 bp, Saccharomyces pastorianus
atgagaagaagcccgtccagatcaaataataactttgcagtaccgaattgctcaactaattcaaactctagtcagcaacaattaactacaccttcagatgatctcaacagtaacgaacctaatgacccagatgatagtaggtctctacctactatcaagaaattcaataataaacattctataaacaattacaacactttagcatcggccgggaaaaacaacaacaataaacgagctagcaatgataatttgctcattcctggtgagaatgcccataaacagaaaatatacactaaggatgaaaacttgaagagcttgtacctagatatcgatgttcctgtcgctaaagccctatcctcatcagcaactgctccgaagctgatcaataccgcaagaacttcctctactaccactgccactacctcaaataatatcctgacatcaccctcttatcgtgaatcaaattattcttctccatcctcatattctttttcctcctactactcatccgctacgtctgcttcttcatcgacctcatcatttttaaaatcttcagggttatcgtccagagttaagtctccttcatcttcggttaaggcaggttcttttggtgcgccttcgtccccaacatctgggatacctaatcctaaaagtagcaaaaagcctatatttttgagacggtattcccatgatacctcttcaaatgaaggtcttgatatcgatgttgcgatcgaaaaattactacaagtgggtgagtcaagagaaattacaaaaacgtccaaaaaaaagaactttccattccattcttgggaaattcaactcatttgctatcatgcaagagaaatttttttgaatcaacctactcttttgagattacaagcgcctatcaaagttgtcggtgatgttcatggacaatttaatgatttattgagaattttgaagttgtctggtgtgccatctgatactaattatctgttcttgggtgattatgtggaccgtggtaagaactcattggaaacaatactattgttattatgttacaaaataaagtacaaagacaacttttttatgttaaggggtaatcacgaatctgctaatgtcacaaagatgtacggtttctatgatgaatgcaaaaggcgattgagctcgaaagtatggaaaatgttcgttgacgtatttaatactttgccattagcagcaattattcaagataagatcttttgcgttcatggaggtatatcgcccgatttacatgacatgaagcaaatcgaaaaagtcgcaagaccaacggatattcctgaaagcgggctggttacagacttactgtggagtgacccagaccctcaagtaactgattggtcagaaaatgatcgtggtgtttcatacacattttctaagaggaacgttcttgatttttgtgctaagtttaaattcgatttaatacttaggggacatatggtcgtagaagatggttatgaattctttgccaggaaaaagtttgtcacaatcttttcagcaccaaattattgtggagaatttcataattggggggcagtaatgagcgttacaacgggtatgatgtgtagctttgaactgttaaagccgcgtgcattgaaaaataaaaagaagttatacaaaaccaaagtgtag

SEQ ID NO: 78879 - DNA, 627 bp, Saccharomyces pastorianus
atgtccctggaagaatttgacgaagttaaatatgatcattcaactaaacgcctagatacaccatcaaggtacctgctgcgcaaggctagaagaaaccctaacgggctacaagaactgcgtgagtcgatgaagtcatcaacaatttatgtaggaaatctttccttttatacatcagaagaacaaatttacgaattgttcagtaaatgtggcacgataaaaagaataattatgggtttggaccgttttaagttcacgccatgtggcttctgttttattatatatagttgtccagatgaagcattgaatgccttaaaatatttgtccgatacaaagttagacgaaaagacaattaccattgatctagatcctggttttgaagatggaagacagtttggtcgtggtaagagcggtggtcaagtcagcgatgaattgaggttcgattttgatgcatccagaggtggcttcgccattccatttgcagagcgtgtcggcgtaccacattccagatttgataacagtagctcacaatctaatacgaataattatatccctcctcctgatgcaatgggtactttcagaccaggtttcgatgaagaaagagaagatgataactacatacctcagtag

SEQ ID NO: 78880 - DNA, 894 bp, Saccharomyces pastorianus
atgtctggaagctatcaacatttatcaaacgttggatcgcgtgttatgaaaagattggggaatcgacccaaaaactttcttcctcatagtgaaaagttcattaaaaaatctacgcctgagttcatgaagtcagatttaaaggaagtagatgagaaaactagtttcaagagtgaaaaagaatggaagtttatacctggcgacagagtagtagtaatgagcggggcttccaaaggaaatatagctgtaattaaatctttcgataaaagaacaaattcattcatattagatgagaatgggcccacaaagactgttccagttcctaaacaattctggcttgaaggccaaacatctcacatgataacaattccagtttcaattttgggaaaggatttaaggctagttgctgatattgacgatgaaaagaccccaggaaagacaagaacggtggcagtaagggatgtttccttcaatggttcctactatgatgcagactacaaaaaggtaatgccatatagatgcgtaaagggtcaaccagacttgatcattccatggcctaaaccagatccaattgatgtgcaaacgaacttggctaccgatcctgtatttgctagagaacaaacattttgggtcgattccgtagtgagaaaccctattccaaaaaaggctataccaagtattcgctatcctcattctaagtacaaaaggggtaccttgacagcgaaagatatagctaagctagtagcacctgagatgcccctaacagaggtaagaaaaagccatttggcagaaaaaaaggagttggctgagagagaggtaccaaaactaactgaagaggacatggaagctattggggcgagggtttttgaatttttggaaaaacaaaaaagagaataa

SEQ ID NO: 78881 - DNA, 1389 bp, Saccharomyces pastorianus
atgagttactttcctcgaacatatgctcacttgatgagaaatgttcttgctcataataaagggaatatatacttacaaattggtacacagctgcacgatactcaaataaaaattcgatttaatggagttcgttatattagtcggaatcatggcgggaaacagcaacatataaacactgcgccgatagaattcactcccaattttggatatggtgatagaacctctaattgcaataaaaaggttgaatcgactgccttgaaaacgctaagatgcacagatgatatatcaaattcaagtggaagcgaagctactaccgatgcaaacacacaacttccatttaatgtcaaacttgtagacccgatggtaagaaaatctaagaaaccatctcacgcaatcagcgaagggctgaatatgaaaactttaaagaagaaggtgattatgccatatcttcagttgaccaagccccgactcaccattctagtgatgttaagtgccatttgttcgtatgctttatctccatatccagcctccgtcagtgaattgttatgtttaacagtaggcactactttatgttccggttctgcaaacgctataaatatgggcagagagccagaatttgatagacaaatggtgagaacgcaggcgaggcccgttgttagaggtgatgttacacctacccaggcattcgagtttgccgcacttatcggaacattaggagtatctatcttgtactttggtgttaatcctaccgttgctattcttggtgcttcaaatatcgcgttatatggctgggcctatacgtctatgaaaagaaagcatatcattaacacatggttaggtgccctagtaggaatggtacctcctctaatgggatgggcagccgcaagtccgctctcacatccgggatcttggtgccttgctggtctgttgtttgcttggcaattcccacactttaatacgttgagtcataacattagaaatgaatacaaaaatgccggatacgttatgactgcatggaaaaatccgctcctaaacgcccgtgtgtcgttgagatactctatcctaatgttccctttatgtttcggattgtcttattttaatatcacagattggtactaccaaatagattccggatttataaatgcctggctaacgttctgggctttcaaattttattggcaacaaagaatcaactattctgcaaaaacattaaaagataacgtcaagtttaataaaggtctaagtgtagccaacatttatgcaaggaaaacttttatggctagtgtattgcacctaccggcaattttaatcctagccattatacataaaaaaggccgctgggattggatatatcctggtgaagcaaagcgaccacaggaacgattttag

SEQ ID NO: 78882 - DNA, 459 bp, Saccharomyces pastorianus
atgtccttcattaaaaacttgttatttggaggtgttaaaacaagtgaggatccaaccgggctcacaggtaacggggcctcaaacacaaacgattctaataaaggtagtgaaccggtagtagcgggtaatttctttcctaggacgctttccaaatttaacggccacgacgatgaaaaaatatttattgctattaggggcaaagtatacgactgcacaagagggaggcagttttacggtccaagcgggccatacactaactttgcaggccatgatgcgtcgcgtggtcttgcattgaactccttcgatctggacgttattaaagattgggatcagcctatcgatcccttggatgatctgacaaaagaacagattgacgcactggatgagtggcaagagcattttgagaataagtacccatgcattggtaatctgattccggagcctggcgtgaacgtatga

SEQ ID NO: 78883 - DNA, 1293 bp, Saccharomyces pastorianus
atgacagttttatacacatctgcatcgctgaaaaaaatgaagtgcttggcattcaacatgggcatgaattgcgtgcgaacagtatctcatgcaagaagtggaggtgcaaaatttggaggacggaatgtatttaatatatttgactcaaaaactcctgattcagtgcgtataaaggccttcaaaaacacaatataccagtctgccatgggcaaaggtaagaccaagttttctgcaatggaaattaatctcataacaagtctagtgcgcggatataaaggagaaggtaagaagaacgcgataaatcctctccaaactaacgtgcaaattcttaacaaattattactaacacatcgattaacagacaaagacatattagaaggaatgaacctggcagccggtcctgtcaatgttgctattcctcgagacataacaccgcaggaagaaaagaagaaagttgaactaagaaatcgaaaagcagagaatatggatcttcacccgagcaggaagatgcatattaaggaacttctacactctttgaacttagatatgtgtaatgatgaggaggtttatcagaaaatatcactttacttacagaaaaatgaggaaagcaggacttcagtgggtgcctcgcaacaaaaccacgtagatatcgatataaactccctaaaacgctatctacaaaatattgaaaagaaggcacgtcaaaaaagtgccatcgataaacaaaaaaagaatcaagctcgtatatatcaatggaatactcaatccttctccgaaatagtacccttatcagctggaaatatcttattcaaaagggaacccaatcgcttatggaaacgtttacaaaatggaataagtgtatttttaggttcaaacggaggaggaaaaaagagtaaaactactaaaaaagtacttcaagggaataacatattgttacactcattagaaaacaataaggatatgaccctgtcaaacaactttgatcacagtgtctttaacatcaattttacggacttatttggcgttattaatgcatctgggtccccaccagatagagttttgaacgaaattaatgagatcgaattaaaaggttggaaatgtgtggggaacttatacgataataataaaattgtagtttttcaaagtagcaatccactcttagaggatacgaagattcctcaaaagtctttcactaattcaaagagattccttatttcactctcagcattgctggcctccttttttgcatattatagataccgtctatctcaacgtcaagaatcaaagaaatga

SEQ ID NO: 78884 - DNA, 822 bp, Saccharomyces pastorianus
atgtatgtttctaatgggaaagacacttgccagttgttggggcccgtgtctctttttgtccagacattgatgggtatgacagccgtgattgtgttattggtgaaaagaaactatgagcatccaaggagaaaaatgattgtgtggagttatgacattggaaaacaaatcatcggctctcttggaatccattttttgaatctaggcatcagcatactgaagaaaagacgaaggtcactcttcgcaatcactgcaaaaggcaatgatgatgaggatcaatgcgattggtattttcttaacttactcctggatactactgttgggattcccattctttggttgtgcttatacataattgaaaaagtgctaaaatccttacacttccaaaacattgaaagtggtaattattttccatctaaaaccgttgggagccaccccagaaaacccttattctctgccttcgtgaaacagctgcttatattcattgttgggctgggcgtgatgaagttctgcgtgtttctaatactaaactacttagaagacttggcatactggttcgccgatcttatccttggctggtcagattcatggccaaactttcaagtttttctggtcatgtttgtctttcctatcttactgaattgcttccagtacttttgtgtcgacaatgtcatcaggttacattctgagagcctaacgataaccaatgcagagaattttgaaacgaacacattcctaaatgacgaaattcctgatttatcggaagtctcaaatgaagtgcctaacaaggataacaacatttccagctatggtagcataatatag

SEQ ID NO: 78885 - DNA, 1902 bp, Saccharomyces pastorianus
atggattacgaagaaattttatttggtctgcaaccgatcctcaatgcgtcttcaataaaggatgttccgatgaacgatgtctacttaggaagctacctagcggtaatggaccaattggctgtttcgttgagagaaccaagtaatagagatattgttggtaaaactgggctgctactgaacctagtaagagtattagaacaagcgcttgatatctgctttcatgatacgagcatttcaattaatgataaaatagcgttttatgagatcagttctgaagtgattagatgtatcgctaacgcaataattgataatgatgataatcgggaaattctcttggattctggaggtaaaaagcttcttaattattatataggcggggttcttcagctggacgaaatttcttctgacaagagtgaggatagcttagtggataaattacagatgcggtcagttgtgctactaaggaatttttgcattggaaatctcaagtatacagaaaatttggctcccttcattagaggtccattatttgttttgttgaaaaccacacaatatagctatttgtcatctcccgaaaaagttgttttaggttcagatttattgaacgatattttaaaagtcaattactcaaatgttcaaataagcgatctctttttcttaagccagtacatcaaaaaaatctcttcaaatgtgcaaaataaagaattgcaggcaatggaagatggagcagtcgaagcatattcaaatactgaaactcagaagttcgctggccaaggaaatcaagagtacatcgaaaaagaggaagaagatgatgaggaggacgttaattgtgaattgctattaaatctgtcaacatgtcttgaaactattgtagccaaggatgaaactataaactttaccaatgaggagcagcttgtgctaagcatgcaaaaaaatttaatattgtccttagtttgcttagaatcaaaaaccttcaataataagctaattgtaatgagaagactcatatcgtgcgcaggcaacatctccgccaacctaacaaactctaacaaacgagagcaatcattatgtatcgaaactattaagagttccgcaagtagttatgccctagccgcagctttgatgatattatgtaactcagttgcatccaaaagtgacgctgtcgcgctactgaagctcatatctcttagtgaatttattcaagttggtagcttgctacaagacccactacaatatcaaggattcctagatttactgaggaagctgttaaatctggaaaataccatgtggctagatatcaaggacctcttcaccctatttcagattatgagaagatgtcacgagcaaactaaatattataacaacctgagatcgttattaacaaatttattaaacaaaactttaacggtgcttccaagttcaaaaatacacaatttaataagcagtgatccaacaattatctcttttatagcagagcatggaacgttaacgtcctgtattgcgatggataagctgcttgtgtccaagaaagcccttcctaaagaagctattacatccctatgggattcgatcttcaaattccaaaatttaggtcaagcagaacaactaagcatctcagatttatttcatatcacaaaaacggttggaatttatttaaaagattcaagtgtaacagctgacgtgaatccgattgaaaatatactattcaaggattacattcaaaagttaaccctgatattagagaccatactttcatttaaagaaaataaagataagggtagcgagagttgtttcaacaatgggaaatttatagcgggcataatactaaacattgtgaaaaatacgaaatgcttaacgccagaggaacaaaatttagaagcgcttgcaaaatcgttcttttag

SEQ ID NO: 78886 - DNA, 762 bp, Saccharomyces pastorianus
atgttgaagctagctcgtccatttattccgcctttatcaaggaacaatgccatttcttcaggaatagttctcacttctagaagatttcagtcttcctttacgttcttaagtaaccagtctttactatctaaaaatcaaatgaaatccaaaagaaaaaagggcagtaaaaaggcagcgtaccatcgtcaacccccggaacacgaacatactgcaccacttataaagcaaaacaagacaatcacaaagaaagaacatagcgatgtgagaggttctcatttaaaaaagaaaagaagcgatttttcgtggctaccaagagtaccatccacctcacatttaaagcagagtgacatgaccacaaatgtactctattctggatatagacccttattcatcaatcccaatgacccgaagctaaaggaagacaccggaagtacgttatacgaatttgcgatgaagcttgaagatttaaatgaacctctatcaccatggatttcctctgccactggacttgaattcttttcagagtgggagaatatacctagtgaactactgaaaaatttgaagccttttcatccacctaaggaaaaatcaatgaacacaaatgagcttattcatgtaagtgctaagagaaatacattagttgacaataaaacaagtgagacgcttcagcggaaaatggatgaattttcaaagagaagaggaaaggggagaaaaaagtcagtagtgacgttgctccaaatgaagaaaaaacttgagggatga

SEQ ID NO: 78887 - DNA, 2244 bp, Saccharomyces pastorianus
atgatcatcagagctccaataaggacaaaaaccaagtcgtttagaggcgatcaaatggattttaaattcccgtctaacgaaagtttaccaagaggaacgctagaagagtaccatttgaataatcatcatcttttaaatgatgtgtttgcagcagaaaatggagtttctcgcgatgaagacggaaactctcaaatattatcagactatacgtccacttccaatacaaatacaaattccggttattcatcaaatggatattattcatttgctaacatttctgacaatactacatcttcaccacgtattgtaatcaatcaaaatgaaaccgctagattaacttcctcagactcgaacaaaagtgacttttttgcttctcatgacttcccaggaaatgactctcttcattatagcagctcaagtgtagttaaaaaccagttacattcaatggaagctattccagagggaaacgtaactggctcaatctcaacggcattccagactatcccaacagcagataatgtttcctacgatatcgcgccgtcatcagcatcatcgttattaccaaggaaatcgacatctaaaagcgccattctgccgtcgacccaagaagccaaaccgatgaccaaattaaatttggaaaaggatataaaaactaccgaattaaacaatagcgtagtaccgaaacctaaaaaaaagctaaacagagttccgaccataagacgagttgaatcctcgaggttttccaattccaggtatagttcaagtgtcagcagtaaatcaagtagcagtcgttgttctctaaaacgatcaaaagctattagatgtaagggcggactcttatattatttcacctcattgggaatcaagataaagaaaaagttacggaaattacggctagttttaagaagaagactgttttcatataatgttcaaaaagtcccctccgccacgaattccaaaaccactaaatctaaagcaaacattaacaacaagtcaaaaaaaagagggacgaatctagtcaacagtaacagcaactctactccgcgtcaaaaaaaatcgcagagatacgtctctaatttacaacggtcgatctcatcaaaatccttagtacctgtattggctccacaaaaaaagactaaacctttgacagttgatacgaaatttaaagcaaaccatccccaatctgaagattccaaagttggatcaaacaccccaaggagtcctttggtaagctatactccatcattgagaagaacaaattcctctattagaagggctgcatccatcctaaccgcatctgccactatgacaccggcaaataataaaaactccttcatttctgtaccggataatgttagtcatgccgtcactcgcaacagcagcatgtactcgaggtcaagattggtaaggtcaaaaccatcgacggccctaaatgcaattgcaagacagccatcaattgtggtagaaaataaagttattccgttatccatgaatcgatattctattaaagaggaagacgaatatgtaattgatactagttctatgagagaattatctcccgttaatagcgtttgctcatctgattatgacagagaatcatctgaaagctactctaattatgcggatgcaatggagacaacggaagtagataataaggacagagttgaatgcaacaatgaaattcaaaatgtgaatgcaaataatgaggaaacttcaaatgaagaaagttacagtttgatgaaacattatttaagcaccgtaattgctcaaagaattatgctcagggtacaaattgctcgtatacaaaatcataagagcaacgttgtttatatgaataaatcagcagaaacaaactcaactatctacgaagatcttgtcgattctctattaactgaatatgaggctgatggtagctcctcccaaatatttgatggcgtttcagtaagggtcgacgaggaagaagaagaagaagaagatgatgatgaagaagatgaagaagatgaagaagatgatgaagatgatgaagaagaagaagaaaaaagaaaagaaggagaaggaagaaatttggcaaaagaggtagacgaattagcggaattaagtccgatgagaaaacaaagcgatttgagtattacgttaagatctccatttgctatgctaaattctgcctactcaaacagcattatatcgctaccaacaggtgtggtcaagaggtcattgactcttcctgtcggtatgaaaatttaa

SEQ ID NO: 78888 - DNA, 948 bp, Saccharomyces pastorianus
atgggaagaacatttattcatgcttcgaaaataaaacatgcggcacgcaaaagaaaacatcattccaactttagaactctgatcaaattattgaacaatgatgcctataagatagaatcatcaaaaccgttgaaaaatggtaaacttttcaaatactggagaaataggcgtagattgttttcaaagatagattcggcgtcgatatatatgactgatgagctgtggttcagtgtgacgcccgaaagaattgcctgcttcctggcaaattttgttaaggcatgcatgccaaatgccgaaagaatactggatgttttctgtggtgggggcgggaacaccatacaatttgccatgcaatttccttacgtctatggagtggactacagtattgaacacatatattgtactgcgaaaaacgcccaaagctacggtgtggacgacagaatatggctgaagcggggatcctggaaaaagctagtctctaagcagaaactttccaaaataaagtacgactgtgtatttggatcacccccgtggggtggtccagaatacttaagaaacgatgtgtatgacttagagcaacatctaaagcctatggggattaccaagatgttgaaaagttttcttaaactaagccctaatgtgattatgtttttgccaaggaactctgatttgaaccagctttctcgagctacgaggaaagtactaggtccatttgccaaatgtaaagtattatatgtaaaggagaatggatatatgaaaggaatattttgcatgtggggggaatgcttttttaactatgaaccagcaagtacggagaatagtcgaagggagtcgtccgaaaaggaagagctgagttctgaaaacgaagagctctcgaaaagagaaaagcatgaatccacaacaacgaccaaagataatactgtagacatttacgacgtaaatggttaa

SEQ ID NO: 78889 - DNA, 855 bp, Saccharomyces pastorianus
atgatagcggattcatcagttttgaaaaagcacacagcaatcaagagaagtacgagaataatatcgctaacactcgttttgcttggcgtatttagcttcttactacttacatggaatgactccttggaattctacaactctgctgaccctagcgaaaacaaaaaaaatagtgaggaagaaagtgaaaagaagttcgtttacaagttgccaaacttattaaagacagcagacagttttctaagtaatgaaaatgaactaaatttccaaaaagtcaaagaagaaatttcaaatattcaaagcgaggttgaagtcgacatcccagaaccctcatccaaagctacatcaaagttttcttcaagatcgttccaaactgataatgtcgtgacggcgacgaccacaacaacactacatccacggtcatcttctctggccttgcagaaaaactgcgatcacaaaaaattcgaccctagaacagattttctagatataataagaacctctccagcggtattattcattaaatcatcacaagcagactccattttcttaaaaaatctattacaaagagaatttgagatttcacccgaattggccactgttgatttggaaaaacactctcatggctatgaattagaaaagtatatcaaacaaaataaactaaatatcgatactagtgctgccttggaatccattcagtcgccttatttatttttgaatggtatttccgtgataaatcgtggaatggtgagagatataatcgaacctcattcgaagggattgctactacctcttctaaagtctgaagcgcgtggcaacttgctggtagaaaaaaaagacatcccttctaattcttaa

SEQ ID NO: 78890 - DNA, 1218 bp, Saccharomyces pastorianus
atgttcagcttgaaagcattattgccattggccttgttgttggtcagcgccaaccaagttgctgcaaaagtccacaaggctaaaatttataaacacgagttgtccgatgagatgaaagaagtcactttcgagcaacatttagctcatttaggccaaaagtacttgactcaatttgagaaagctaaccccgaagttgttttttctagggagcatcctttcttcactgaaggtggtcacgatgttccattgacaaattacttgaacgcacaatattacactgacattactttgggtactccacctcaaaacttcaaggttattttggatactggttcttcaaacctttgggttccaagtaacgaatgtggttccttggcttgtttcctacattctaaatacgatcatgaagcttcatcaagctacaaagctaatggtactgaatttgccattcaatatggtactggttctttggaaggttacatttctcaagacactttgtccatcggggatttgaccattccaaaacaagacttcgctgaggctaccagcgagccgggcttaacatttgcatttggcaagttcgatggtattttgggtttgggttacgataccatttctgttgataaggtggtccctccattttacaacgccattcaacaagatttgttggacgaaaagagatttgccttttatttgggagacacttcaaaggatactgaaaatggcggtgaagccacctttggtggtattgacgagtctaagttcaagggcgatatcacttggttacctgttcgtcgtaaggcttactgggaagtcaagtttgaaggtatcggtttaggcgacgagtacgccgaattggagagccatggtgccgccatcgatactggtacttctttgattaccttgccatcaggattagctgaaatgattaatgctgaaattggggccaagaagggttggaccggtcaatatactctagactgtaacaccagagacaatctacctgatctaattttcaacttcaatggctacaacttcactattgggccatacgattacacgcttgaagtttcaggctcctgtatctctgcaattacaccaatggatttcccagaacctgttggcccactggccatcgttggtgatgccttcttgcgtaaatactattctatttacgatttgggcaacaatgcggttggtttggccaaagcaatttga

SEQ ID NO: 78891 - DNA, 99 bp, Saccharomyces pastorianus
atgatggttcacctcacgctgaaatctcatctaataaaggaagaattactttggcatgctttatctccgtcctatagttgccgataccgcggtagataa

SEQ ID NO: 78892 - DNA, 2706 bp, Saccharomyces pastorianus
atggttaatcctgttggatcttcgaaattggaacaaaacaatataaaaagcattataggatcatcgtacaatcgactatacagccaatttacttctgatgagttgacagaagtgggaaactacaagattttaaaacaaataggtgaaggaagttttggaaaagtatatttagcgctccatagaccaacacatcgtaaagtctgcctaaagacgagtgataagaatgatcccaatatcgttagagaggtattttaccatagacagttcgattttccttatattacaaagctttatgaagtgatagtgacagaatcaaaagtgtggatggcattagaacattgcccagggaaggaattatatgaccacttactttctctgcgtagaatatcgttattggaatgcggagagttgtttgcacaaatttcaggtgctgtttactatgcacactcaatgcattgtgttcatagagatttgaagttagagaatattttattagacaaaaatggaaatgcaaaattgacggattttggttttacgagagaatgtatgacaaagacgacattagaaacggtttgcggtaccacagtttatatggcacctgaattgatagaaagaaggacttatgatggattcaagattgatatatggtcattgggagtgatactatacacattaattacgggatatttgccatttgatgatgacgatgaggcaaaaacgaaatggaaaatcgtcaatgaagaaccgaaatacgatgctaaagttattccggacgatgctagggatttgatctcacgattattggctaaaaatccgggagagcgtccatcgttgtcacaagttttacgccacccttttttacagccttacggttcagtggttttagatcagactcagaaaattttgtgcagacagcgcagtggagggactcagtttaaaagtaaattagaaaggcgattgctgaagcgtcttaaacaatcaggggttgatacgcaagcaataaaacaatcaattttgaaaaaaaagtgcgattcactctcgggtctatggttattgttgttagcccaagggaaaaagcaagaaaattgcaaatatccaaaaagaagcaggtccgttttatcagtcaaaaaagttattgaaagtgctacgcataacgacactaatggcattagcgaagatgttttgaaaccctcgcttgaactttctagagctgcttcattgagtaaaatgctcaataaaggctcagattttgtaacatcgatgactccggttagcagaaagaagtctaaagattcagcaaaagttctgaatcctactctctctaaaatatcctcacaaagggcttatagtcactctattgcaggttctcctcgcaagtccaataatttcttacaaaaagtttctagttttttcaagtcaaaaaaaagctctaacagcaatagcaacaatagtattcacacaaatgttagtgaaagcttgattgcaagcaatagaggagccccatcttcagggtcgtttctcaaaaaaaacagtggttctattcagaaatcaagaactgacactgttgcaaatccttcaaggacggagtctataggatcgttaaacgaaaatgttgtcggtgccattgtgccacggagtgctaataatactacattagaaaataagaaaacttctgggaatgaaataggcttaaaagtagctccagaactattattaaatgaacatatccgaatagaggaacctcgcctcaagcgcttcaaatcgtccatatcaagtgaaatatctcaaacttctactggtaattatgatagcgaatctgcggaaaattctaggtctatatcttttgatggaaaagtttccccgccaccgatacgaaatcggccattgtcagagatatcgcaaatttctaatgacacttatatatcagagtactccactgatggtaataattcgtcattcaaaatttcagatactatcaagccgagctatatacgaaaaggctctgaaactacctcgcagtattcagcttcatccgaaaaaatgacaaatggctacggtagaaaatttgtcaggagggatttaagcattgtatcgactgcgtcgagcacctctgaaagaagttcaagaacagattccttttacgatatcactacagctacaccagttgtgaccactgataataggcgcaataaaaacaataatctgaaagagtctgttttgcccagatttgggactcaaaggccatggactggcaaaaggacgtataccacgtcctgccatggcaagaatgctaggcgttcgtctaaaagaggtctgttcaaaataacttcttcaaatacagactctattattcaagaagtaagctcatcagaagaagaagatcataatgttatctatagcaagggaaagggtcttccaacaccagttttgcaaactaaaggactaatagaaaatgggttgaacgaacgcgatgaagaaggagatgacgagtatgcaattcacactgacggagaattttctatcaaaccgcagttttccgatgacgttatcgacaaacagaatcatttgcccagcgtgaaggctgtggcaactaaacgttcgttgagcgaaggaagtaattggtctagtagctatttggattcggacaataatcggcgaagggtatcttcattgctagtagaggatggggggaatcctacagcgtag

SEQ ID NO: 78893 - DNA, 885 bp, Saccharomyces pastorianus
atgaatgacattaaacaattactttggaatggtgagcttaatgtgctggtatcgatcgatccttcatttttgatgaaaggaagtccaagagaaattgcggtgctacgaataagggtaccaagggaaacatatttagtcaattatatgcccttcatttggaacaagattaaaagctttctttcttttgacccattgaccgacagtgagaagtatttctggtttgagcataataagacgcctattccatggaattacccagtaggtgttttgtttgactgcctagccggaaaaagcgctacttttaccacctcttttgagaaccaggtaaaggatgttctcacttttttgagaattcatttggttatgggcgattcgttgccaccaactatcattcccatcgcatctagcaaaacgcaagcggaaaagttttggtttcaccaatggaaacaagtttgcttcatactgaatggttcctcaaaagctattatgtctttatcggtcaacgaagctcgaaaattttggggcagtgttattacgagaaatttccaagatttcattgaaatatctaacaagataagttcatcaagaccgcgacatataccgctcatcattcaaacctcaaggacatcaggaacttttcgaatatcacaaccaactatcagtatgactggagtcaatcctacgttgaaggatattgaaggcgatattctggacgtaaaggaaggaatcaatggtaatgatgtcatggttatttgtcaaggaattgaaattccttggcatatgctcctgtatgatttgtattctaaattgcgaagttttgatggctttttgtacataactcttgttcctataaaaggcggcgataaagcttcctctgagctctaa

SEQ ID NO: 78894 - DNA, 534 bp, Saccharomyces pastorianus
atgcctccagtgatgagttttgcatcgaggaatattggacgtaagatagcaggagtgggagttgacattgtatacttgccaagatttgcacatatactagagaaatattccccattcgacccatgtggccgttctaccttgaataaaataacacggaagttcatgcatgaaaaggaaagatttcatttcagtaatcttctcatcgaagaaaactgcttaactccacgattgcatgaatatatagcgggagtttgggctttgaaggaatgctcattgaaagcgttgtgttgctgtgttccaaagcatgatctacctcctgcccaagtactgtacgctggaatgctatataaaacacaaaccgatacaggtgtacctcagttagagtttgataagatgtttggaaaaaagtatccaaagtatcaacagctctcgaaaaactacgattctctcttttccactcatgagtttttagtttcgctatcccatgataaagattatttaattgcagtaacaaacttggtagaaagagagtaa

SEQ ID NO: 78895 - DNA, 2598 bp, Saccharomyces pastorianus
atgtcgtacaccaataaacgtcatacatactacggagggtttactaacgatttgtctgacacatttcagtaccctcaaagaacagatgagcaaaggcggaaacatgtaacgtttggtccttatatcctagggtcgacgttaggagaaggagagttcggaaaagtgaagctaggctggccaaagaatttttcaaacaactctaattcaacttttgacttcccaaaacaagtagcaattaaacttatcaaacgtgatagcatatcgaatgattacaggaaagaagttaaaatatacagagaaatcaacgccttaaaacacttatcacatccgaatatcgtaaaattagaagaagtgttgcaaaattctaggtacattggtattgtcctagagtacgcatgcgggggggaattctataaatatattcaaaaaaaaaggaggcttaaggaaatgaatgcatgcaggttattttctcagctaataagtggagtacattacatacattctaagggacttgttcacagagatctcaaattggaaaatctattactagacaagaatgagaacctagttattacagattttgggtttgtcaatgagttttgctcacgaaacgaattaatgaagacgtcgtgtggctctccatgctacgcagcgcctgaactagtgataagcgccgaaccatacgaggctagaaaagcagatatatggtcatgtggagttatactttacgctatgctagctggatatttaccgtgggatgatgatccaaataatcctgaaggcagcgatataggaagactttataattatattaactccacaccattaaagttccctgattatattcttcctatacctcgggacttattaagacgcatgctggtctcagacccaaagaaaagaataaacctgaaacagatcaagaaacatgaatggctaaagcctcattcttcattcttatccataacacctgatgagtgggacaaactaaacaatactcaatccgtgttcagattagcaaaaccaagaagaagatatggatctagaccacaatccagttgttctacctcatctcttggctcaaggagtgataaaagggattcactggtcattgattcaactttaattactttcccggctccgcctcaagaatcacaaaatcatattataaccagaccggcttctattgcatctgaccagcggctgtcacctataagaagatctaataggcacaatagaagtaactctgctgcatccgttgccttgcaggcagtggtgaacgcagatagggagtatgtgttaagtcatgaacaatcattatccccagtacaaaacattagacaaactacgggaaacatgactgccagtctttcacctccaccagccataagtccaggcgacattataatcgaaaccacacctattaaaagaaatacaatttctgggagtagtattgtaccaagtttagaaaaagagtcgtctaccacaatgcaaacaagcaagattcaaccaaataacatggcttcatcacaaaatcatcaatacaataaaaataagacccaaaatagtctccaatctgctaaaactttctaccgtacgtcttcctcatcccatacaaagccacggccaacttcataccatcctggctcatacacaacgcctccctacaattcgaatacgctctccatatatgagatcaacgaaaaagctaaaagtagcgcttcatcacaaacgctgaatcaaagagacacatccccatttgattccacaccataccttgccctagatacatgcataacctcatcctcttccatcgaaagctctccaaagttaattacgcacggccaattttcagtagcaaaaccctctgttgatttgcaaagcgtatctggtgacttgatcaagtataagagggacgcagatgtagtaacgagaatctatgatgaaaaatacaaacagaaacgcaaaagtttgagatatagcggcatattcagtgacatctcatgcgatacggtcaccgaagagtctgatgaattgaggccaccagaatctccttttcaacaacatgaaggacaagaatcaattgataaggcgaaaacggaggacacaagtgaaaagggtagtagaaatagcaacatcgcgaaagctacagcacaaaaacacgtcaataaccatctagaaagatcacttaacgaagcagagtcaacaaagaaaagatttagctttctttccttgtactcttatgatacttccaaatctagtttatactcatcaatggattccaaacggaaaccttctccaccttcccaaagacgcccaaaaaaggatgacagttatcaaacaaattcaaagaatcattatatcactgcttcaaatatgcaaacatcccatcaagtctcaaaaaacctgcctgcaccaacgatggtgcaaaataaatgtactttagaaactaaaaaagcggtccgaagcaacaggtcctccataatggtatctgaggtcaacaaggcaagcgtagacaataaagcagcccaaagtccagaacattcaaccgcaaaaagagtattagggtttttcaaaagaagaagtatgaaaatctag

SEQ ID NO: 78896 - DNA, 174 bp, Saccharomyces pastorianus
atggcggagccacatcctaaagtcttgaatttgacatcttcaataacgccagtagagtcgttgactttgatctgcaacctcatcacatcaccgcacgctggcgcacccactagaccagtgccgactttgggcaattttttatctaatgagccgacgtttcttggatgtgtataa

SEQ ID NO: 78897 - DNA, 933 bp, Saccharomyces pastorianus
atgacatctatagataatagacctttgccgttcatataccagttcacagccggtgccattgccggcgtctcggagctattggtgatgtatccattggacgtggtgaagacaagaatgcaattacaagtgacaaccaaaggtcatcccgctgttgttgcagcgaaagcagcagtagatcactacacgggcgtgatggattgtcttacaaaaattgtgaagaaggaaggattttcgcatctttacaagggtatcacatcgcctatattaatggaggctccgaaaagagcaattaagttctccggaaacgatacattccaaacgttttataaaaagattttccccacgcccaatggggagatgactcaaaaaatcgccatatacagtggtgcgtccgctggcgccgtggaagcctttgtcgtcgcgccttttgaactagtgaagattagattacaggatgtgaattcacagttcaagacacccattgaagttgtaaagaatagtgttgtgaaaggtggtgttttgtcacttttcaatgggttggaagccactatctggagacacgttctttggaatgccggttatttcggtataatattccaaattcggaagcttttgccggcggctaaaacaagcacggaaaagaccagaaatgatttgatcgcaggtgctattggtggcactgtcgggtgcttgttgaatacaccatttgacgtggtaaaatctaggatccaaagaagttccgggccgctgaggaagtacaactggtccctgccttcagtgctgttagtttaccgtgaggaagggtttaaagcattgtataagggatttgcgccaaaggtcatgagacttgcccccggtggtgggttattgttggtagttttcacgaacgtcatggattttttcagagaagtcaagtatggtaaaaaacaatga

SEQ ID NO: 78898 - DNA, 1341 bp, Saccharomyces pastorianus
atgtcagcaaacagtggtgtaaaacgagccagtaaggctttcaaaacatgtttattttgtaaacggtcacatgttgtatgtgataagcaacgtccatgttctaggtgtgtcaagagggatattgcccatttatgcagggaagatgatattgcggttccaaatgagatgccatcacagcacgaaagttctccgaatgataataatatacagggcaaatatgcaaataaagcacacactggaattccgtctgactatcagaatgaaccagtcaataaaagtggatccacatatggagaggaactgtcaccgaaactagactcctctcttgtaaatgatacaaccagcttgctgcttccgcaacaacctgtatttgtgtccgagaatgttggttcggaattcagttctttgaatgaatttctttctatgctagaaaatcctctattgactcaaacatcactaagttccagcagtgcgagcaatgttcatttggaaaatggctcacaaaccacacaatcgccattagagtaccaaaacgacaatcgtagggatgaaataggagtggcaagacaagaaaataggtcgcctactattatgtcaggttcttccaatagtatctcgaaaggggataaacaagatcaagaaaaggaagagtctcgaattctagcgaatgcaaacgaaaacagtgcaccgacaccgaaggaacaattctttttaacagcggcggatccgtcaacagagatgacaccagaagaccggctgaaattggtcataaatgcgaagcttgaagcaggattattgaagccgtataattatgccaaggggtatgcgagactacaagactacatggacaaatatatgaatcagtcttccaagcaaaggattctgaaaccactatccaccattagaccggcgtttagaaccattgcgcgttcattgaaggatgttgacttagttttagtggaggagagcttcgagaggatgttattatcttatgatcgtgttttcacctctatgagcatgccagcgtgcttgtgtaggcgtaccggtgagatttacagagccaataaagagtttgcttcactggttgactgcacagtcgatgatttacgcgatggaaagcttgcgatctacgagttgatgacagaagaaagcgctgtaaatttctgggaaaaatacgggtccatagcgtttgataagggtcagaaggctgttttaacaagttgtagtcttcgaaccaaagatggaatccgcaaacggccatgctgttttagtttcactatcagaagggataggtacaacatcccaatttgcatcgtcgggaatttcatccctttgtcataa

SEQ ID NO: 78899 - DNA, 903 bp, Saccharomyces pastorianus
atgataagaatatgtcccattgttagatctaaggttccactgttaggaacttttcttagatccgactcatggttggcacctcatgcgctagctctaaggcgggccatatgcaaaaacgttgcattgagaagttattcagtgaacagcgaacaaccaaaacatacatttgatatttcaaaacttactagaaatgaaatccagcaattgcgagagttgaaaagagcaagggagagaaagtttaaagatcgtacggttgcattttatttcagcagcgtcgcggtacttttcttgggtttggcatatgcagcggtaccactctatagagccatttgtgctcgtactggttttggtgggattcccataacagatagaagaaaatttaccgacgataaactcattcctgtagatactgagaagagaattcgtatctcattcaccagtgaagtatcacaaattttaccgtggaaattcgttcctcaacaacgtgaggtttacgttctgcctggtgaaacagccctcgctttttataaagccaagaattacagcgataaagatattattggtatggctacttatagcatagcgcctggtgaagcagctcaatactttaataaaatccagtgtttttgctttgaagaacaaaagctagctgccggtgaagaaatagatatgcctgtcttcttttttatcgatccagattttgctagcgatccagcgatgcgaaatatcgatgatattattttacattacacattcttcagagctcattatggtgatggtacagctgtaagtgactctaaaaaggagcctgagatgaatgcagatgaaaaagcagcgtcattggctaatgctgctattttatccccagaagttatagacacaaggaaagacaactcaaattaa

SEQ ID NO: 78900 - DNA, 672 bp, Saccharomyces pastorianus
atgaagaaacaaatattaatagttgctgcacaaagtattttatgttctactgtttttggcgagcgaagtaatgtaggcctttccactgaagagctaggaggtgactcaattttatacttcaatgaagaccctatagtgattgaaatcgataagaaagctattgacaagaagactctggaacagttggcaagcacaagagatgttgttcttactgatttaccggacactcttgagtttatagacttcaatgagtacgcgaaaatgaagtcaaaatcagatatgctactagagtatatcaacgaatacgaatttgatgattttgaaagaagttctgaaggcggtcttgatgaagaagaagaagaggatttaatttatgacttcaatgcccaagctgaagatttgggtaagcttggttcaaatatatatgaagtagtcgaagaaaaggatattgttaatacttacgatggaaaccttatcaatgcaagtacaactgaatcaacgactactactcggcctttcgtgacttctcactcctacgttgcttcttctacaccttattcgaatatttcagcattgaatgaggactacgataatgcgggcaactttttgactcctacaacagtggctcttgcggtacttttaaccattttattatttatacaggcgtattaa

SEQ ID NO: 78901 - DNA, 1689 bp, Saccharomyces pastorianus
atggattcgcaagtgcccaataataacgaaagcttaaaccgcttcaatgacatcatccaaagcctgcctgcaagaactaggctgaccatatgctcattatgtctgctggacaatatctccactcaactactgaggtttcttgtccttaatgccaactctcccaatattatagcggttttgacggaccagacggctttcctaagctcaggcgaaacagaaatttttcaaacgttagtcaagctctttaagcagatcagaatgatttaccacaccagatctccgttactgtctgttcacgacgtggcgcctggtttatggtttcccaactcccctcccccccttatattgagaggccacgaagcgtttattattaccgccataagaaaggcgaatctgctaacatttctattgacgtcgctgaactgccttaattacgggtttgagctgctacagtcgatatttctcgatattttctgtccaaatacaaacactgtcggtaacaactccctggaacaaagcggaaagtttttgaaatcacaggctatcctatatcttgatctgaaaacacaggcttacattgccggcttgaaagagtttcaggacgagacgaacgaaatttctttagaaaagaaacaagagctactagacttaatcttcccatccaatctggctgatattctcgtgcagagaagaaccggcgattctggagacattacacttttgactccatcggagaaggacttcgtcgaaaggtgcgatcgtcggagagaaaatttaaagatcgtccaagattttaactctctgacccagagctacgaatgggctcaatttatcagagagttgctggattattgtaataaaaatatgggtctcatcatatggggcagaaagggtcgcggaaaatcaccattatatgactttgatgtcaacgagtttgatcctcaagtactcttttctacagggaccaggaccgtagaattcatggacgaccaaaatcagccaagcagtgcgtctgcttttttgtcaactgctcgtccgaatcattacagcacacatacacctaccacagatgtgtcttccaaaaaccccgctatcacacaatccattgtggatgccgctgttgcggcctcgatgagcaacagcagctctggtcctcattcctctcataacaacagcagtaacagcaacaataatggtagtatcggattaagaaaaccaaaggcgaaaagaacttggtccaaagaggaagaagaagcattagtggaaggcctgaaagaggttggcccatcgtggtctaagattctagatttatatggtcccggtggtaaaatcacggaaaatttgaagaacaggacgcaggtacaactgaaagataaagcccgtaattggaaattacaatacttgaagagtggcaaaccattgcctgactatttgataaaagtgaccggtaacttggagaaaatctacaaggcaaagaaaaaattctctcaatctccaaattcgtcaactattatggaacaaaacttatctcagcatccttcatcagctgcatctgctactgaagacactcaaactcatcaagaggattcacatgggcaaaatagtgataatatgccatctaacggactttttggcaatagtacatcggacaatacaggttttgatcctcatttagaagatgggatgtag

SEQ ID NO: 78902 - DNA, 2691 bp, Saccharomyces pastorianus
atgacgcaatccctaggtatcgaacagtataaactgtcagtcgtatctggtgggaaacccgctttgaataatctcagttcagtaaccggcaataagaatatcgcccgcctatcacaagaccaacgaaactatattataccctttaacaatcagatcaaggtgtattctgtggaaactagacaatgtgttaagactctaaagtttgcaaataactccttgttatccggaatatttctgcaagaagaagagaataatgaatcgattgtaaagattctgctgggtgatataaccgttccgcaacaagaagacgctcatctgattaccgtattcaccaataatggtcatgtaattgttttaaattataaggggaagctggtcgagtcccctaagcatttcaaaatctctttggcagatgaaaagcttgcaaatgttttccatagcgagggcaactatagaattttgacaacgttcaaggaccctagtcaaaaggcacacaactctttgcaatcgtacaggttatatgcattaacctttgacgatgctaaaaagcaatttgaagtggctcatcaggcagaatggtacaacattatcttgtcaaatatttcttccaatggtaaactgctagcgcatatgtgcaaagacgtctcaacaaaagatcacgaacacaaatccatctcagttgtttcgctttttgatgattctgtaaatctaagctttcccctcggttccatcctttcttcacagactcaatccctatcctctaacacaaggtacgtttctagcatggccatagacaatatgggtcaacaactggctgttggatttgcctccggagttataagtatcgtaaacctggccgatctacaaataagactgctcaaatggcatatagactctgtgctgtcactctcattctctcacgatggatcctatttgctatctggtggttgggaaaaagttatgagtttatggcaattggaaacaaactctcaacaattcctgcctcgtttgaacggtattataatcgactgtcaggtattgggacctcaagggaactactactctttaatcctacaaatgactgaaaacaattcaaattctgactaccaatttttacttttgaatgcttctgatttgacctccaaattgtcgattaacgggccattaccggtgttcaatagcaccataaaacacattcagcaaccaatctcggccataaataccaagaactctaactcaattacctctctcaatcactctaagaagaaacaatctagaaaactaattaaatcgagaagacaagatttcaccactaatgtagaaataaaccctattaacaagaacttgtatttcccacacatttctgctgttcaaatttttgacttctataaaaatgagcaagttaactatcagtatttaacatcaggtgtcaacaattctatgggtaaagttagatttgaactgaatttacaagacccaataataactgatttgaagttcaccaaagatgggcaatggatgattacatacgaaattgagtatccgccaaatgacctcttatcttccaaggacttaactcatatcttgaaattttggaccaaaaacgataatgagacaaattggaatttgaaaacgaaagtaataaatccacacgggataagtgtcccaattaccaagatattgccttcaccaagatcagttaataatagtcaaggctgtttaacggcagacaacaacggtggactgaaattttggtccttcgactctcatgagagcaactggtgcttgaaaaaaatttctttaccaaactttaatcatttcagtaactccgtttctttagcttggtctcaagacgggtctctaatattccatggtttcgatgacaagttgcaaattttagatttcgacacttttaaaaagtttgaatcattggaaaatacaaagacggtcagtgagttcacgttagactctgaaatccaaaccgtcaagttgattaatgacacaaatttaatagtggccaccaggactacattaaacgccatcaacttattgcggggtcaagtcataaatagttttgacttatatccgtttgttaacggagtgtataaaaatggtcacatggataggcttattacttgtgacgaaaggacaggcaacattgccctggttataaatcaacaactaactgatctcgacggcgtaccaactatcaattacaaatcccgtattattatattcgattctgacttatctacaaaattgggtaattttacgcatcatgaatacatatcttggattggttggaattatgatactgatttcatatttttggacatagaatcaacactaggtgttgtcggaaccactgtgaatactcaactatctgatgaagttaataacgaaggaatattggatggcctggtaagtaacaccatcacaacttcggcttccaatagcgatatttttgcagaacaattgcataaactgtcgtctaggggcaaaaaaagtgacactagagataaaaataccaatgataacgacgaagatgaagaagatatcgctttggaatttataaatggcgaaaagaaagataagctagtcaatatgaatagttttacgagcatgtttgacaacattcaaaacgtgcaaatggatacatttttcgatcgtgtgatgaaagtaataacatag

SEQ ID NO: 78903 - DNA, 1305 bp, Saccharomyces pastorianus
atgttactgaaaaacttacacagtctcttacaactaccaattttttcgaatggagcagataagggtatagaaccaaactgccctataaacattccattatcatgttccaataaaactgatatagacaactcgtgttgttttgaatatccaggtggaatatttttacaaacccaattctggaattactttccaagcaaaaacgatttaaatgaaactgaattagtgaaggagttagggcctctagattcatttacaattcacggattatggccagataattgtcatggtggctaccaacaattctgtaataggtccttacaaattgacgatgtttactacttattgcatgacaagaaatttaataataatgatacatccctgcaaatatcgggcgaaaagctgcttgaatacctagacttatattggaagagtaataacgggaatcatgagtccttatggatacacgagtttaataaacatggcacgtgcattagcacaattagaccagagtgctatactgagtggggtgctaatagtgttgacagaaaaagagcggtctatgattattttagaataacttataatctattcaagaaattggacacattttcaacactagaaaaaaataatattgtcccaagtgtggacaattcctattctttggagcagatagaggcagcactaagtaaagagtttgaaggaaaaaaagtcttcataggctgtgatagacataattccttaaacgaagtatggtattataaccacttgaagggttcccttttgagcgaaatgtttgtgcccatggactcacttgccattcgaacaaattgtaaaaaagatggtattaagttttttccaaaaggttatgtcccacctttcaggaggagacctaataaaggagcaagatacagaggagtcgttcgtctatcaaatattaataatggagatcagatgcaaggctttctaatcaagaatggacactggatgagtcaaggtacaccagcgaattacgagttgattaaatctccctatgggaattactacttgagaactaaccaagggttttgtgacattatttcgtcttcatctaatgaattggtctgcaaattcaggaacattaaggatgcaggtcaattcgattttgatccaacgaaaggaggagacggatatattggttattctggtaactacaactggggcggtgacacctatccaaggagaaggaatcaaagccccattttctctgtagacgatgaacaaaattccaagaaatataagtttaaattaaaattcatcaaaaattaa

SEQ ID NO: 78904 - DNA, 1542 bp, Saccharomyces pastorianus
atgagtgactattccctgaagcattcggtcactcagtatttggaagaaattcctcaacaagttcaaaataggctttatacctcaccagctacatgtctggctatctatagaattttaccaccactagctaaattttttatcatggcaatggttttcaacgaaaatgaagtacctttgttggatttagataaatgggttaactctaatggtaaattgcagtttcagaatgcaatcaaatcgatgaagtctttgcatcttcttataccaaataaatcatctggtactttgatgatcaacctaaacccaacattcaaaatcagcctgaggaacgcattaacgggtggggaagttcaaaactcattcggtgtggttgtagaggaaaacgtagttagcctggacttgttggatgaatattcagctaataaatgggaaactatattacatttcatggttggcactcccctcgctaaaatcccatctgaaaaagtactgaaccttttaaaacacagtaaactaatggaagaggtaaactctactggagagttcaaaatcactaatgaaggcttccaatttcttttacaagaaatcaactcccaattatggacattattattgcaatatttaaaaatgatcgaaacgtccaaaatggatttagtcgatgttttacattttattttcatgttaggcgcattggaagttggcaaagcctataaaatcgatgcattaagcgaaacacaaagaattatgttacaagatatgcgagactatggtttggtattccagaagcattcaaatgatagcattttttatccaacaaaattagctttgatgctgacttccgataccaagacaatcagatctgcctccaatgcgatggatagtgtactgagacagaatagagaagagccgtcagtaaatgaagacggcgccaacgggaaatccacaacagatatcactacatcagatgatttgaacaaagcaggtctaaaaaatcaagatatacccgatggctcattgattgtagaaacaaatttcaaaatctattcatattctaattcacctctgcaaattgctgttttgtctctttttgttcatttaaaggcaagatttgtgaatatggtattgggtcaaataacaagggaatccataagaagagcattgaccaatggtatcactgccgaccaaatcattgcctatctggagacacatgcacatcctcaaatgagaaggttggcagaagagaaactagaaaaaaaattagagctggaccccaactgtaaggagcctttacaagttttgcctcctaccgtcgtagatcaaatcagattatggcaattagagttagatagagtcattacatatgaaggttccttatattctgattttgagactagtcaagaatacaacttactaagtaagtacgctcaagatatcggtgttttgttgtggaaagacgacaaaaagaagaaatttttcatctcaaaggaaggtaattctcaagtacttgatttcgctaaaagaaagttgaaaaagaaacaataa

SEQ ID NO: 78905 - DNA, 1674 bp, Saccharomyces pastorianus
atgaagtgccaaacatgtcacttacccctgcaactagacccatctttagaaggtcttagtttaacccaaagaaatttgctactttcaaataattcaattatcactgcaacgaatgaaaatgtcatcagcaacaagggcatcgaagccgcagataattgtgggcctcaaataccgaaggagaggctgaggcgattaggggagattcagaacataaaagacttgaatttaaaagatgataaattaatcactgattcgtttgtttttcttaatcacgatgatgatgataatgctaatattacgagtaatagcagagaggaccagcgttatggaaatgccaacggaaatgataataaaaaagctaatagtgatacttccgatggaaccagtacctttcgagatcatgacgaagaggaacaagaagctacggatgaggacgaaaaccaacaaatacaattgaattccaagactttgtccacacaagtcaacgcaatgactaatgtatttaacattctatcttctcaaacaaacatagactttcctatctgtcaggactgctgtaacatcttgataaacagactaaaaagtgagtatgatgatgcaataaaagagagagatacttacgctcaatttttatcgaagttagagagtcaaaacaaagaaatatcagaaagcaataaagaaaagcagtattcccataatctttcggaaaaagaaaatttgaaaaaggaagaggaaagactcttggatcaattattacgtttggaaatgacagatgatgacttagatggagaactagttcgtttacaagaaaagaaagttcaactggaaaatgagaaactccaaaaactgagtgatcagaatttaatggatttaaataacattcaattcaacaaaaatttacagtcattaaaactgcaatacgaattatccttgaatcaattagataagttgaggaaaatcaatattttcaatgctacattcaaaatctcacatagcggcccctttgccactataaatggattgagattaggcagtataccagaatcagtggtaccttggaaggaaatcaatgcagcactgggccaattgattcttttgctggctaccataaacaaaaacctgaagataaatttagtagactacgaattacaaccgatgggttcattttccaaaatcaagaaaagaatggttaacagtgtcgaatataataattccactacgaacgctcccggtgattggttgattctgcctgtctactatgatgagaatttcaatttggggagaatcttccgcaaggaaacgaagtttgataaatcattagaaacaacattagaaataataagcgaaatcactcggcagctttctacgatagcgtcatcatattcatctcaaacactcgcaacaagccaagatgaatcttcaatgaataacgcaaatgacgttgaaaatagtacttccattctcgagctaccctatatcatgaataaggacaagattaatggattatccgtcaaattgcatggtagcagtcccaaccttgaatggacaacggctatgaaatttttattaaccaatgtaaagtggttgttagcgttttcttccaatttactatccaagtcaattaccttaagccctacagtgaatcacaatgataagaccatcagcggaaactaa

SEQ ID NO: 78906 - DNA, 1035 bp, Saccharomyces pastorianus
atgacattggcagagttgcttggacggtcgagaatagctcaagtagctaacaatcataaaccattgacatacactggcaaaaaatttcatccaacacatcaaatcatcgaaactaagccatcgacattatacagacaagaatgggggttgaaatccgctattccttcgaaaattaaatctcgatatttggtgtacaacgatttggatacgttggaaagaattaccacattcgaacctagaggcggtacgcaatggaataggctaagatttcaagaaatgggagtaccaattgtgtctaatataggcagacaaaatccatttttcaaggacatatctcgtcctgaggatgagtctcatgctaaattgtccttattcaaagaaatgaaaggaggtacagataattcgcctgctgctatggagaagcgtttgaagaagataacagcactaattagatcgtttcaagatgaatttaaagagtggctggtggaaaatcatccggatgaattgaaattgaattctaataagctggaagactatgtagtgaagtttctaaacaaaaagttggaaacaaaaacgaataaaaaatttaacactgaaatcattggtacaggtggattatcatacagcttgccaggaaagctaaaaaactcaccaaatggtgtcattcaaaggactgtagtacccggtagagtcttgaacgttgttaaggagaacaacgacaataaatggctggcagctattggtgggtttgtggccgatgtggtatttttccaatcaccacctagttcctttaactccatgggagatttcatcagaatgaaaacgttcttgttcgagatcttggaggcatctatggagaaaaatggttctgtttcgatgcacgctagattactcgaaccacaaaatgacaagaccagagaatttttcaataagagaccaatttataaaccattgacctctagaagggcacgtcgaccatcagtgggaaacattcaggaggccaataaccttttgaatataatcaagggaaattga

SEQ ID NO: 78907 - DNA, 867 bp, Saccharomyces pastorianus
atgactgccgacaacaatagtatgccccatggtgcagtatctagttacgccaaattagtgcaaaaccaaacacctgaagacattttggaagagtttcctgaaattattccattacaacaaagacctaatacccgatctagtgagacgtcaaatgacgaaagcggagaaacatgtttttctggtcatgatgaggagcaaattaagttaatgaatgaaaattgtattgttttggattgggacgataatgctattggtgccggtaccaagaaagtttgtcatttaatggaaaatattgaaaagggtttactacatcgtgcattctccgtctttattttcaatgaacaaggtgaattacttttacaacaaagagccactgaaaaaataactttccctgatctttggactaacacatgttgctctcatccactatgtattgatgacgaattaggtttgaagggtaagctagacgataagattaagggcgctattactgcggcggtgagaaaactagatcatgaattaggtattccagaagatgaaactaagacaaggggtaagtttcactttttaaacagaatccattacatggcaccaagcaatgaaccgtggggtgaacatgaaattgattacatcctattttataagatcaacgctaaagaaaacttgactgtcaacccaaacgtcaatgaagttagagacttcaaatgggtttcaccaaatgatttgaaaactatgtttgctgacccaagttacaagtttacgccttggtttaagattatttgcgagaattacttattcaactggtgggagcaattagatgacctttctgaagtggaaaatgacagacaaattcatagaatgctatag

SEQ ID NO: 78908 - DNA, 3387 bp, Saccharomyces pastorianus
atgacagataatttgaccgcaactcatggtggtagtaccacccttgaattgttggcgcagtacaatgatcataggtccaaaaaggataaatctatagaacatatagaaaaaggaacatgttcaggaaaagaaagaaatccgtcctatgatgaaatttttacggaaaacattaagctaaagctacaagtccaagaatatgaaactgaaattgagagtttgaaaaaggttattgatatgttacaaaaaaacagagaagcttccttagaagttgtgcttgagcaagttcaaaatgactcaagagattcatacgttaacgatcaatcatttgtgttacccccaagatctgctgaaaggaaagcgcatatcaagagtcttaatttgccaataccgacattgtcccctccattgcaacaaggttcagacgttgcacttgaaacaagtgtaacgcctacagtacctcaaatagatgttacatcaaatacttcgataagtaggaagcatttacagaacatgatactaaacgatgaaatagaagcaaatagtagcttctcatctcccaaaattatcaatagatctgtctcaagccctacaaaaatacattcagaacagttggctagcccagctgcctctgttacctatacgacgtctaggataaccataaaatcacctaataaaggttcgaaatctccattgcaagaacgtttgcgttcccctcaaaatcctaacagaatgacggctgtcatcaacaaccatttgcattctccattaaaggccagtacctctaataatttagatgagctgactgaaagtaaaagtcaacaactaactaatgacgcgatacaaaaaaatgaccgcgtttattcttctgtaacatcctctgcatacactactggaactcctacttcagcagccaaaagtccatcatcccttttggaagtcaaggagggtgaaaacaaggctttgggtttctctccagcatctaaagaaaaactcgacgacttcacccaattacttgactcctcatttggcgaagaggatctagtcaatacggacagtaaagatcctctgtccataaaatccacgattaacgaatctttacccccacctccagcgcctccaacttttttctcacctacttctaatggaaatataaaaaactctactcctttatcaagccatttggcttctccggttatcttgaataaaaaggatgataattttggtgctcaaagtgcaaaaaatttaaagaaacctgtgttaacttcatcactccccaatccttctacaaaattgtcaacaacaagtcaaaatgcttctcttcctccaaatcctcccgtggaaagttcatcaaaacaaaaacaacttggagaaacggcatccatccattcaaccaataccttgaatacatttagctcaacaccccaaggttcgttgaagacgcttagaagacctcatgcaagtagtgtgagcaccgtgaagtctgtggcccaaagtcttaagtcggatattccattattcgttcaaccggaggattttggcactatccagattgaagtactgagcacattgtacagggataatgaagatgatttatccattctaattgcaatcatagacaggaaatccggtaaggagatgtttaaattttcaaaatctattcataaagttcgcgaattagatgtatatatgaaatcacatgttcccgatttaccattgcccacgttacctgatagacaattatttcaaactttatcacctacaaaagtggatacgcgaaagaacatattgaatcggtattatacaagcatattcagtgtccctgaatttcccaaaaatgttggtttaaaaatcgcccaatttattagtacagatacagtaatgacacctccaatgatggatgataatgtgaaagacggatcacttttgctgagaagaccaaagactctaacaggtaatagtacatggagagttcggtacggtattttgcgcgatgatgttttacaattgtttgacaaaaatcagttgactgaaactattaaattgagacaatcttctatagaacttatacccaatctccctgaagatagatttggaacgagaaatgggtttttgatcactgagcataagaaaagcggactgtcaacctcaacaaagtattatatttgtactgaaacgtcgaaggaacgtgaattatggctttctgcgtttagtgattacattgatccttcacaaagtttatcgttatctagctcgaggaatgcaaacgatactgattctgcatctcacttgagcgcaggaacacaccattctaaatttggaaacgcaactatctcagcaaccgatactccatcatatgtcactgatttgacccaagaatataatagtaataacaatattagtaatagtagcaataacattggtaatagcgatggtattgactcaaacccatcttctcactctaacttcctagcaagttcaagcgggaatgcagaggaggagaaggatagtaggagagccaaaatgagaagtttatttccttttaaaaaattaaccggcccagcgagtgcaatgaaccatataggtattacaatttcaaatgattcggattctccaacatctcctgactctatcattaagtcaccaagcaaaaaattaatggaagtaccctcttcgtcgaattcttctacgggtccacatgtgtccactgcaatatttggctcgtcactagaaacgtgtttaagattgagttcgcataagtaccaaaacgtttacgatttaccgagtgtagtttatcgttgcttagagtatctttacaaaaaccgtggtatccaggaagaaggtatatttagactaagcgggtccagtacagttatcaaaactttacaagaaaggtttgataaagagtacgatgtagatttatgtcgatacaatgaaagtattgaagctaaagatgatgaggcatctccaagtctttacattggtgtgaatactgtaagtgggttactaaagttgtacttgagaaagttgccccatttattatttggtgacgaacaatttttgtcgtttaaaagagtagttgatgaaaatcataataatcctgttcaaatatcattggggtttaaggaacttattgaatctggtctagttcctcacgctaacctatcgttgatgtatgctctttttgaactgctggtaaggatcaatgagaatagtaagtttaataagatgaatctaagaaatttatgcatcgtgttttccccaactctaaatattccaattagtatgcttcgaccattcatcactgactttgcgtgtatatttcagggtggtgaaccagttaaagaagaggaaagggagaaagtagatatacatattcctcaggtttga

SEQ ID NO: 78909 - DNA, 420 bp, Saccharomyces pastorianus
atggttcagttgagcacatacttaccatcacctccctcgacaaatatgtcctgcacattctcgagtgtgatgagtgtctgctttatgaccatgtcggcaactgtgctgccgatatgtggcaaagctgtaacatcccatctgcgaagtaactcttgcttaacgcgtgtttcctcatttttaaacacatcgagaccacagcttgccacttttccagattcaagagcgtctagtagcacatcttcatctatgcatgtgcctctcccaacgttaactatcctgacaccatctttacaccaggccaaacttttacgattgataatattgtttgtagaggccgtactgggcaaggccaaaatgatcaaatccgcattcttccaagtatttggatcgtctagatcagaatggtacttagcgttgtaa

SEQ ID NO: 78910 - DNA, 1185 bp, Saccharomyces pastorianus
atgagtcagtttggcacgacagatatcgtttccggttcagaaacaccaccttattctggggcaagttaccaggacgcccaggatgacaatacccatccacattcatcagacgccggtgcagagaagttcagtgcaggcagtggaagcgagtcgcatactgaatcctcgagaagtgatgatgaggattctcaagcaaaaacaaagatggtggataatattaccatcttaaaatatatattggattctctatctggtagagacaaattagccaaaattatcaaatacgctctggatatattaaaactgtttatcgaaaagtctaagcgaaatttaactgttttggacccttccatattaacgtactataccaagattttgaaaaatctgactgtaaaagtcgcactaaggcatccaatcacggtaattaaagtacttctcctgtctcttttgagaaattttgacaagaaaattgattttatcagtcaacaattaagtacttttagatatattttaaggtttggcggcacaccattccgagtgtgcagtttcttggggaaattcaataaaaccagaaagtgcaactttcaaattgaccaaattaagaaaatatggttcaatgaagcttcattgagagaatttttggacttgtattatggtatctttgatgaattagacttgctatacaaattgaaaatatggacaaataaatcattctattcctttgtcagtagacaagagtctcttgcatggcaatacgacattcttttaagcttgaaggaccattggctcaacctgcaaagcttacagaagagacaattagaattggaagtgcaactaaaagttcaaaataacgcgttactactctcacccatactgatgcatcaggcccataaagacgatggctcacaatcgccaattaggaaacagttgttaaatgacctaaatgttaataacaacgcagaggtgttaatacacaaacaactaaaggccatcaaggatgaaaagacacttgtttatttagatattgcaagattatcgtttgattgtatggctaatacatcagatattctaaatttaaaaactccaaagggaacgtatgccgttctgtctctgggatccggcttaactggactggttaaactttggataacaacaaagaggtcactttgctcttcaaaagattaa

SEQ ID NO: 78911 - DNA, 507 bp, Saccharomyces pastorianus
atgaaagaagcatctgatagagaagaagcaccaaaaatggtggaaaaaaactatagtactggttttaggaaagcccacggagagaaggatcaatcagtgaccaagccaatctcgttagatggtagaacaggtgaagtaattgttagaaaatccaccgggaaaactaaaatacgtaaaggtcaaacggaagaagagtatacgcagcaattgcagcactacttcgaagtagaacaaggccctgtgcggacaaaggtaggatggatggatgaggtagatcccttggttgagatccgagaaggcaagtacgatatctccaataagcatcagcgacaggtgcttagtggtttctgccatcgtttattttaccaacgtaagtacaaggagtgtctggatctcagcacctattttctggggctctttgaaccgttcaacgtgaagaataaaatgaagagggagcttgaagagttggaatatatgatcgagcgatgtcgtgggcatgtattataa

SEQ ID NO: 78912 - DNA, 747 bp, Saccharomyces pastorianus
atgataagaaatcagggatggtcattactttacagaatttatccggtgcggaggttcacaagatactccagagtagatatgacttttgaaggaaacactcaagatatctctacttctgtcgaagaaagaatgaccactgtttttggaggacgcttaaagggtgaaccaccaagatccacaagtagagtgcttagcggcggaacgaagaaaatagcaggtgtccaagtgcctgcaaaaccacaagaacccgataactgttgcatgtcaggttgcgttaactgtgtctgggagatatatagcgaggatttaagagactggaaacatagaaggaaagaggctgcggaaaagatcgcaggaactaaggagaagtggcctaaagactggaatccacctttgggattgttacatatggaaaatgtccctgttgagttacgtgaaaagaagctggaaatcgatagcaaaaaagcagaacaacctcatgatttatctgctatcagaagtttgttccctaaaagaaaagggcctctgcccaagagtgtattggcagccaagaggaaaaatattgctttgagacacaattacgaacagaaagatggagcagaccaatcagtcagtgaatcagatgctgatgaaggctgggaagatattcctgtctacgttaaagcctttgcagagtttgaatcaaagaaaagattacaaaaaattcgccgacaggaagaaataaaaaagaggacagctttggtttga

SEQ ID NO: 78913 - DNA, 303 bp, Saccharomyces pastorianus
atggcgttgaggaagttcgtggaggacctcttaacagtggacctcttagcccgctacctctatcgttcagtatttcacctcttttacgaaatgacatggtacatgcgatatttaagagccgaatttgttatacaacgttgttctctgcacctcatctctaaactatttagcctcatcgacagtttcatatgtcgtttttgttattttaacagtttagagttcattccatgcgctttacccggtctggcgtcaaaagccatcaatagcatagctactattgcgtctgagagaagtcgaccatag

SEQ ID NO: 78914 - DNA, 1371 bp, Saccharomyces pastorianus
atgtcatttcgtaaaagaggtgaaatactgaacgatagaggtagcgggctaagaggtccactgttaagaggtcctccacgaacttcctcaacgccattgaggacagccaacagaagagcccctggaaatgtgcccttgtctgacactacagcgagattaaagaagttgaatattgcggacgaatccaagacaaaaatggggctggatagctcccatgtgggcgttagaccttctcctgcaacctctcagccgacgacatcaactgggagtgctgacctggacagtatactaggccatatggggctgccgctgggaaactctgtactagtagaggagcagagcacgacagaatttcactctattctcggtaaactgtttgccgcacagggtattgttcacaatagaatttcagatagcagtgctgataaaactagaaacggcgacgctcatgtcattgtcttgtcattgaaccaaatgtttgcaaaggagctacctggtatctacaagggatcacgtaaacaaatgaagaaaaacctaatctctgaagaagaatcaaaagttactgttcaaaatttgaacgagacccagagatcgacgccttccaggtacaaagacctgaaaattgcatggaaatataaactggcagatgaaaagagattgggttctccggatcgagaggacatccaacaaaattctgagtacaaggactacaatcatcagtttgatattacaacgcgtctgatgcccgctcccatagcatctgaactgacatttatcgccccaactcaacctatctccactattttgagccaaatagaacagactattaaaaggaatgacaagaaactgataagaattgttattccttctcttctacatccggcaatgtatccgcccaaaatgtttgaatcatctgaaataataggtttaatgcacggtgtgagaagtcttgtcaagaaatactatgagcgggttgtactgtttgcttccatatccatagacattatcactcccccattactggtattgctgaggaacatgttcgattctgttatcaatctagaaccctttaaccaggagatgactgagttcttagaacgtgtttataaatcgcaaccggggaagattcaacatgggctagtccacatattgaaattaccagttttcacggaccgtggagagatgagagttttaaagtctgaatgggcatttaagaatggcagaaaaaagtttgaaatagaacaatggggcatacccgtggatgatgctgaaggttcagctgcctcggaacagtcacattcacactcgcactcggatgaaatctcacataatatacctgcaaagaagaccaagatatctttagactattaa

SEQ ID NO: 78915 - DNA, 549 bp, Saccharomyces pastorianus
atgttaaacagacgctctaatgctctcattactttgagtagaactaaattctttcccataacaaccgttgcctattaccacaggcgcctccccaaccaacaacgaagagctgtttcaacgtcaccgaagaaagaaatcaagagcctagaagacttggctaatttggattctttggatggtgttgatactgaactgatacgcgatttgattaatgagcatactacaaaattaaatatcaaaaaggagttagatatgctcaaaaaattctcgcaagaggaagaatcaggacatgagatccctgtaaaaagatttattaggcctctttggatgttcattctaatgggatcttccgtttatttactgcttcacttctcgtggtggaaactagagcatgaggagagagaaagtcagctaaagaaagaggtagaaatcctggaacaccaattaaatgagttaattgtacaggataaaacccacaatactagtagaggaaagggcagtaatgaatcaacacatatgaagccttggtataggagatggttttggtga

SEQ ID NO: 78916 - DNA, 342 bp, Saccharomyces pastorianus
atgcctcctcttccacaaaattatgcgcaacagcagccttcgaattgggacaaattcaaaatggggttgatgatgggtactaccgtcggtgtctgcacaggcatcctatttggtggatttgccatcgcaactcaaggcccaggtcctgatggtgtagttagaacactagggaaatacattgctggttcagcgggtacctttgggctatttatgtccatcgggtctataatcagaagtgatagtgaaagtagtccaatgtcccatcctaacctgaacctacagcaacaggcaagactggaaatgtggaagcttcgtgccaaatacggtatacataaggactga

SEQ ID NO: 78917 - DNA, 207 bp, Saccharomyces pastorianus
atgagaccacgtgaccaaggctttttggttttagggtttacttactcggtactcctaattagtcttgctacattttactggttacgtaacaatgactctttcctgcactactggtgtgtattactgctatgccctgcgactctctggctgtgggccctcatagcctggtgtgacagtgaaatgttcgcaagtagtaaagatgaataa

SEQ ID NO: 78918 - DNA, 1092 bp, Saccharomyces pastorianus
atgggagaggtatacgaaaaaaataacataaattttgattcaatagccaaaatgttgttaattaagtataaggatttcatactgtctaaattcaagaaagctgcacctgtagagaatataaggtttcagaatttagtccatacaaatcaattcgcacaaggagttctaggtcagagtcaacatctctgtacagtctatgaaaatccttcatggcattctatagtcctggagacattggatctggatctaatatataaaaatgttgataaggaatttgccaaagatgggcatgcagagggggaaaatatatacacggattatctagtaaaggagctgcttcgctacttcaaacaagattttttcaaatggtgcaataaaccagattgtaatcattgtggccagaacacttcagaaaatatgacacctctggtcagtcaagggcccaatggagaggaatctaaattcaattgcggaactgttgagatctataaatgcaaccgatgcggaaatatcactagatttcctcgttataacgatccaattaagttgctggaaactagaaagggaagatgcggtgaatggtgcaatttatttactttgattttgaagtcgtttgggttagatgttcgctacgtctggaatagagaagatcatgtttggtgtgaatatttttcaaattttttgaataggtgggttcatgtcgactcctgtgagcaatcattcgaccaaccatatatctattcaattaactggaacaagaaaatgagttactgtattgcgttcggtaaagatggcgttgttgacgttagtaaacgctatatcctccaaaacgagctgtccagagatcaaatcaaggaagaagatttaaaattcctttgtcaatttataacgaagaggttgaggtattcgttaaatgatgacgagatataccaacttgcatgtcgcgatgagcaggaacagatagagctgattagaggaaagacacaagaaacgaaatccgaaagcgtcagtgccgcttcgaaatcatctaatcgtggtagagaaagtggatcggcggattggaaagcacagcgtggggaggatggtaaatag

SEQ ID NO: 78919 - DNA, 852 bp, Saccharomyces pastorianus
atggtagccgagcaaacacaggagaacatgtcagccgtaggtccaggtagcaatgcaggtgctagtgtcaatggcggatctgctacagccattgctactcttttacgcaaccataaggagttgaagcaaaggcagggtttattccaggccaagcagacagacttcttccgttacaagagatttgttagggcactgcattctgaggagtatgccaacaaatctgcaagacagccagagatatatccaactataccttctaacaagatcgaagaccagcttaagtcacgtgaaatctttattcaacttataaaggcacaaatggtgatcccagtgaaaaaattgcatagtcaagaatgcaaagagcatggattgaagccaagcaaggactttccgcacttgattgtttcgaacaaagcacaattggaagccgatgaatactttgtttggaactataaccctagaacctacatggattacttgatcgtcattggtgtcgtgtccatcatattggcgctcgtatgctacccattgtggccgcgctccatgagacgcggctcctattatgtgtctctgggtgccttcggcatcttagcaggcttctttgctgtcgctatcctgagattgatattatatgttttgtcattaattgtctacaaagatgttggtgggttctggatctttcccaacctgttcgaagattgcggtgtactagagagttttaagccactttacggttttggtgagaaggatacttatagttacaaaaagaaactgaaaagaatgaagaagaaacaagccaagagagaaagcaataagaagaaagccatcaatgaaaaagccgaacaaaactga

SEQ ID NO: 78920 - DNA, 1944 bp, Saccharomyces pastorianus
atgcaactttcatggaaggatatccctactgtccctccagcaaatgatttgttggatattgtcttgaacagaacccagagaaagacaccaactgtgatcagacctggtttcaagattacaagaatcagagcgttctatatgcgtaaagttaaatacacaggtgaaggtttcgtggaaaaatttgaggacattttaaagggttttcctaacatcaatgacgtgcatcctttccatagagatttgatggacaccctatacgaaaagaatcattacaagatatctttggcagctatatctcgtgcgaagtcccttgtggaacaagtcgccagagattatgtcagattgctaaaattcggtcaatctttatttcaatgtaaacaattgaaaagggccgctttaggtagaatggcaactatagtcaagaaattgagggacccattggcctatttggaacaagtcagacagcacattggtagattaccatcgatcgacccaaataccagaaccttgctgatctgtggttatccaaatgtcggtaagtcctcgtttttgagatgcattaccaaatcagacgtcgatgttcaaccatatgctttcacaaccaagagtttatacgttggtcattttgactacaaatacttgagatttcaagctattgacacccctggtatcctagatagacccactgaagaaatgaacaacattgaaatgcaatcgatttatgccattgcccatttacgttcttgtgttttgtacttcatggatctttccgaacaatgtggtttcaccatcgaagctcaagttaaactattccactccatcaagcctctattcgccaacaagtctgtcatggttgttatcaacaaaaccgacattatcagaccggaggatttagacgaagagcgtgcacaattactggaatctgttaaggaggttccaggtgttgaaatcatgacttcttcatgccaactggaagaaaacgttatggaagttagaaacaaagcatgtgaaaaactattggcttctagaattgagaataagttgaaatctcagtctagaatcaacaatgttctgaacaagattcatgttgctcaacctcaagcaagagatgatgtcaagagaacaccatttatcccagaatctgtcaagaatttgaagaaatacgaccctgaagatccaaacaggagaaagttggccagagacatcgaagctgaaaatggtggtgctggtgtcttcaatgttaacttgaaggacaagtacctattagaagatgatgagtggaagaatgacatcatgccagaaatcttggatggtaagaatgtttatgatttcttggaccctgaaatcgctgctaaactgcaggctcttgaagaagaagaagaaaaattggagaacgaagggttctacaattctgacgatgaggaagaaatctacgacggtttcgaagcatccgaagtagatgatatcaaggagaaagctgcatggattagaaatagacaaaagacgatgattgctgaagcaagaaataggaagtccttgaagaacaaagctatcatgccacgttctaaactaactaagtcctttggtaaaatggaagaacacatgtccactttgggccatgacatgtcagccttacaagataaacagaaccgtgctgctcgtaagaaccgttatgttgaaagaggttctgatgttgtttttggcgaccaagatgctttgacagcttccactgaaaacggtgtcaagttgagacaaaccgatagattgttggatggtgttgctgatggctccatgagatccaaggccgacaggatggccaagatggaaagaagagaaagaaatagacatgccaagcaaggtgaatctgatagacacaatgctgtttccttatcaaagcatttattcagtggtaagcgtggtgtcggtaagacagatttccgttga

SEQ ID NO: 78921 - DNA, 1377 bp, Saccharomyces pastorianus
atggttgccaattgggtacttgctcttacgaggcagtttgaccccttcatgtttatgatggtcatgggtgtcggcatttcatcgaatattctatatagcttcccatatcctgcaaggtggctaagaatatgctcctacatcatgtttgctatcacttgccttattttcattgctgtgcaggcactacaaatattacatttgattgtctatattaaggagaaaagcttcagagaatattttaatgactttttcagaaatatgaagcacagtttattttggggtacttatcccatggggttagttacaattataaatttcttaggagcactctcgaaagcgaacacgacgaagagccccactaattccagaaatttgatgatatttgtttacgtcttgtggtggtatgatctcgcagtctgtctagtaatagcgtggggtatctcgtttctcatctggcatgactattactctttggaagggattgggaatcatccttcatataatatcaaaatggcatccgaaaacatgaaaagtgtattgctactggatatcattccgctggttgtcgtcgcttcaagttgtggaacattcacaatgtcagaaatattcttccatgcgtttaatagaaatattcaactgataacgttggtcatatgtgccttaacgtggctgcatgccattatcttcgtcttcatactgattgcgatatacttctggagtctttatattaataagataccaccaatgacacaggttttcaccttattcctgcttttgggcccgatgggccaaggaagttttggagtcttattgcttacagataatataaaaaaatatgcgggcaaatattacccaacagataacattacaagagaacaagagatattgactattgcagttccatggtgtttcaaaattctaggcatggtttctgctatggcattgctcgctatgggctattttttcaccgtgatttctgtcgtttcaatcctgtcgtactacaataaaaaagagattgaaaacgagacaggaaaagtgaagagagtttataccttccacaaaggtttttgggggatgactttcccgatgggtactatgtctttaggaaacgaagagttatatgtgcagtataaccagtacgttcccttatatgcatttagagtcctaggaaccatatacggcggtgtttgcgtttgttggtcaattctatgccttttatgcacattgcatgagtattctaaaaagatgctgcatgctgcccgtaaatcttcattattttcagagtcaggtacggaaaagacgacagtttctccgtataacagcattgaaagcgtggaagaatcaaactcggctctagattttacgcgtttagcataa

SEQ ID NO: 78922 - DNA, 1029 bp, Saccharomyces pastorianus
atggttttagttaagcaggtaagactcggtaactcaggtcttaagatatcaccgatagtgataggatgtatgtcatacgggtccaagaaatgggcggactgggtcatagaggacaagacccaaattttcaagattatgaagcattgttacgataaaggtcttcgtacttttgacacagcagatttttattctaatggtttgagtgaaagaataattaaggagtttctggagtactacagtataaagagggaaacggtggtgattatgaccaaaatttacttcccagttgatgaaacgcttgatttgcatcataacttcacttcaaatgaatttgaagaattggacttgtccaaccagcggggtttatccagaaagcatataattgctggtgtcgagaactctgtgaaaagactgggcacatatatagaccttttacaaattcacagattagatcatgaaacgccaatgaaagagatcatgaaggcattgaatgatgttgttgaagcgggccacgttagatacattggggcttcgagtatgttggcaactgaatttgcagaactgcagttcacagccgataaatatggctggtttcagttcatttcttcgcagtcttactacaatttgctctatcgtgaagatgaacgcgaattgattccttttgccaaaagacacaatattggtttacttccatggtctcctaacgcacgaggcatgttgactcgtcctctgaaccaaagcacggacaggattaagagtgatccaactttcaagtcgttacatttggataatctcgaagaagaactaaaggaaattataaatcgtgtggaaaaggtgtcgaaggacaaaaaagtctcgatggctatgatctccattgcatgggttttgcataaaggatgtcaccctattgtgggattgaacactacagcaagagtagacgaagcgattgccgcactacaagtaactctaacagaagaagagataaagtacctcgaggagccctacaaaccccagaggcaaagatgttaa

SEQ ID NO: 78923 - DNA, 954 bp, Saccharomyces pastorianus
atgctgttcagctggccttatccagaagccccgattgaaggttattggggcaagccaacttctctgattgattggtgcgaggagaattatgtcgtatccccctatattgcagaatggtcaaatactattaccaatagtatattcttaatgaccgccttctattctacatatagcgcttggcgtaataagttagaaacaaggtatatattgataggaatggggttctcgctggttggtattggttcgtggttatttcatatgactttacagtatcgttatcaattgctagacgaactaccaatgctgtatgcgaccatcatcccatcgtggagtatttttgcagaaactcaagaaatcttgattaaggatgagaagaaaaggaaggaaagctcatttagaatccaaatggtcatttcttttatcatgtgtggtatagtcaccattttaacctggatttacgttgtcgtccaaaagccagcaattttccaagtcctttatggtatattgacgcttctagttgtggttctttctggctggctgacctactatcacgttcatgattcatttgcaaagaaaaatctttttattactatggttatgggcatgattccttttgtcattgggttcatttgctggcaactagatattcacctgtgttctttttggatctatatccggagaacatatttggccctgccattaggtgttctattggaactgcatgcttggtggcatcttttgaccggtactggtgtctatatcttcgtcgtgtatttgcaatatttgagaatattaacccatggaaatccaaatgacttcttatttatatggaggtggggatttttccctgagctggtaagaaagggcttaccgattggtacttcttattcactggagtatctggggccaattgtaaatacacaggtagatgatgaaacaaaaaagaataactaa

SEQ ID NO: 78924 - DNA, 1674 bp, Saccharomyces pastorianus
atggctcgtcatggaaaaggcccaaaaactaacaaaaaaaagctagcacctgaaaaggaaaggtttatacaatgttgtgctgatatcacattagagttaacagattctttaacctcgggaacaacaagagaaattaatctgaatggtttgattactaaatattcaaagaaatataaactaaaacaacaaccaaggttaaccgatatcattaattctattcccgaccaatacaaaaaatatttattacccaaattgaaggctaagccagtaagaacagcgtcgggtattgcagtggtagccgttatgtgtaaaccacatcgttgtcctcacattgcatatacaggtaatatttgtgtttattgtccaggtggtccagattcagattttgagtattctacacaatcttacacaggctatgaaccaacttcaatgcgtgccatcagagctcgttatgacccttatgaacaagcacgtggtagagtggaacaactgaaacagttaggtcactccatcgataaagtcgaatatgttctgatgggtggtacatttatgtcattaccaaaagaatatcgtgaagattttattgtgaaattgcataatgcactttctgggttcaatggtaatgatattgatgaagctattctttattcgcaacaaagtttaacgaagtgtgttggtataacaatcgaaactaggcctgattattgtacgcaaacacatttggacgatatgttaaaatatggctgtaccagattagaaattggtgttcagtccttgtacgaagacgttgctcgtgatactaatagaggacacaccgttaggtctgtttgtgaaacttttgctgtgtctaaagatgctggttataaggttgtttctcacatgatgccagatttaccaaatgttgggatggaaagagatattgaacagttcaaagagtattttgaaaatcctgattttaggactgatgggttgaaaatctatccaactttagtcattaggggtacaggtttatacgaactttggaaaacgggcaggtataagtcttatagtgccaacgccttagtggacttagttgctagaatcttggccctagtgcccccatggacaagaatctaccgtgtccaaagagacattccaatgcccttggttacctcaggtgttgacaatggtaacttaagagaattggcattagctagaatgaaggacttgggtacgacttgtagggatgttcgtactagggaagtgggtatccaagaagtgcatcataaagttcaaccagatcaggtcgagcttatcagaagggattactatgcaaatggtggttgggaaacctttttatcatatgaagatccaaagaaagatatactgattggtttgctgagattgagaaaggcttcaaagaaatatacatatagaaaagaattcacctcccagaggacttctattgttagagaattgcatgtttatggttctgtggttccacttcattcaagagatcctcgtaaattccagcatcaagggtttggtactctattgatggaagaagcggaaagaatcgccaaggaagagcatggttcagagaaaatttctgttatttctggtgttggtgtaagaaattactatggtaaactaggatatgaactagacggtccatacatgtcgaaaagaatttaa

SEQ ID NO: 78925 - DNA, 1401 bp, Saccharomyces pastorianus
atgcaattcgctgggaagaaaactgatcaagtgaccacatctaatccgggctttgaagaagaagaagaagaagaagaactacaacaagattggtcgcaactcgcatcgctcgttagcaaaaatgctgctctttcacttccaaagaggggtgaaaaagactatgaaccagatgggactaatttgcaagatctgcttctctataatgcaagtaaagccatgtttgataccatatcagactcaataagaggcacaacagtaaaatctgaagtaagaggatactatgttccccataaacatcaagccgttctacttaaacccaaaggcagctttatgcaaacgatgggaagggctgatagcacaggcgaactctggcttgacttccatgagtttgtttatttggcagagagaggcactattcttccttattatagattagaagcaggctctaacaaaagctcaaagcacgaaacagagattttactcagtatggaggatttgtattcgctgttttcatcgcaacaggaaatggaccaatattttgtgtttgctcatttaaaaaggttgggttttattctaaaacccagcaatcaagaagcagcagtcaagacttcctttttcccattgaaaaagcaacgaagtaatttacaagcaatcacttggagattactttcattgtttaaaatacaagagttatcgctgtttagtggtttcttctattctaagtggaattttttttttcgtaaatatacgacttcaccacagttataccagggtttaaataggcttgttcgttccgtggctgtaccaaagaataaaaaagagctattggatgcacaatctgatagggaatttcaaaaggtaaaggatattcccttgacatttaaagtatggaaaccccattctaatttcaagaaaagagaccccggtcttcctgatttccaagttttcgtttacaataaaaatgacgatcttcagcattttcctacctataaagagctgcgatctatgttttcctcacttgattataaattcgaatttttaagcgaaatcgaggatgatgacgattgggagacaaactcctacgttgaagatatcccacgaaaggaatatattcataagaggagcgcgaaatctcaaactgaaaaaagtgagtcgtctatgaaagcaagttttcaaaaaaaaactgcacagtctagcacgaaaaagaagagaaaggcgtacccacctcacatacagcaaaatcgtagattgaagacgggatatcggagctttattatcgctattatggataatggccttatttcgtttgtaaaaatgtccgaggctgattttggatctgaaagtgtatggtatacacctaatactcaaaagaaagtagatcaaagatggaagaagcattaa

SEQ ID NO: 78926 - DNA, 327 bp, Saccharomyces pastorianus
atggatggatcttacctcactcaccgatattgcgcgctcaagcggccctatactgcacacctattacttcttgatttttcaaaggacgaagttacaaaaaatgtttggaggtggaaaggtacggatgttaaacttcataaaatgggtagaaaaagcatcgttgctgcagtgtacaatcaagctcacccgagccatccacctctctaccatctcggtaacttgaatggtgacaaatatgtcgcctcacctcctagtcgaatgaaggcagtcagcctatcttttgcgtttactttcttatattattatattccgcttcctactaattag

SEQ ID NO: 78927 - DNA, 735 bp, Saccharomyces pastorianus
atgagcatgagtatgggtgtccgtggcctagcgttaaggtccgtttctaaaacattatttagccaaggtgttcgttgtccttcgatggtgattggagcccgttatatgtcttccactccagaaaaacagacagatccaaaagcaaaggctaactctatcatcaatgccattccaggtaataatattttgacaaagacgggggttttggggacttctgctgccgctgtcatttatgccatttccaatgaattgtacgttatcaacgatgaaagtattttattgctgacttttttgggtttcactggtttagtggcaaagtatttggcgccagcatataaagattttgccgatgcaagaatgaagaaagtctccgacgttttaaatgcctcgagaaacaagcatgtcgaagctgttaaagatagaatcgactctgtctctcaactacaaaatgttgctgaaactacaaaggttttgtttgatgtttccaaggaaactgttgaacttgaaagcgaagcctttgaattgaaacaaaaggtagaattagctcacgaagcaaaggcagtcttggattcgtgggttagatatgaagcttccttgcgtcaattggaacaaaggcaactagcaaaatctgtcatctccagagttcagtcagaattgggtaatccaaaattccaagagaaagttttgcaacagtctatatctgaaattgaacaattgctttctaaattgaagtaa

SEQ ID NO: 78928 - DNA, 843 bp, Saccharomyces pastorianus
atgacaagatctccctggaagcgcctactatggttgagacaggagtacccagataattatacagatccaagttttattgagttgagagcaagacaaaaggctgagagtaaccagaagtctgatagaaaattatcagaagctgctcgcgctcaaattaggtcggattttataagtttctaccgaaccatattgaacacttctttcatttacatcacttttacatatatttactattatggcttcgatcctattccgccaactattttcctttcatttattacattgattatatcaaggacgaaagtcgaccctctattgtcctcattcatggacgtaaagtcttcgctgattatcacatttgcaatgttgactctctctccagtcctcaaatctctttctaaaacaactgcatctgattccatatggacattgtctttttggctgaccctatggtacattttcgttatttcgtcaacaaagtccaaagataaaccctctaacctttccaccaatatacttgtcgcccttgttgctgtcctatcatcgaggctttcgaccacaatcgacgtattctgttttcttttaatttgtattcagttgaatatcattctacccacttatttatcggtgacgaataaggtagtaccaataatttcaaatattattgtatactcatttttgaatgttgctctaggttggatttatatgctgttgattttctttgcttcagtattttatattactgttttacctaagtggttcatctactggaaaatcaattatcataaacgggataacgatctactaagtacatgggatgcaagaacaccaatattggattag

SEQ ID NO: 78929 - DNA, 2265 bp, Saccharomyces pastorianus
atggcacatgaaaagtttagtatacctgagaacttcacattagcgcagtctttgcaattgctttactctgttgtcaaaaatcaatataaaaacctagcagacctaataatcaatggcaaaggtaataaggacacagtaacgtatgggaaaatccacaaaaacttagacactttactggtatacgtcaatgaaggtctacgaaaaattgaaaagacttataccttaaagaaagggttaggaaatcttgtagttgatcatcctgaattgaggagcatcattgaggatttccaaattcttggccaggatataaggatcgcacgtcgtaaagcagaaacgcttatggccgaaggaaacggtagtccctctttgtcatcctcctcttccgttttgggccttgggacaggaaatggtttgcgttttccaaaactttggagaatgggttccaaaagagataaattgaaagaagcagacgaaaaggaggctagaatcaacaaacaggctgataatatcagacgtgctaggaaattagaagaagagaaaaagttaggagcaaaacttcagtatgagagggacttagaacttcaaagggaaaaattgatcgagttaaaggttaaagaaaaggtcgaatttgaagtggcccaaaagttggaggaggagagagttaagagagaggaagaagaacgcaaacatagagaacaagcggagaaaaaacgtatatcaaccctgaaacatgagaggaaaacaaattacaaatcaagggctagcctcgacaacttctcttccagtagcaaatcttctggaaagattgacaactccctaattaaaagaagatcacttgacgttgtacggacttcaggcgaaagagtacgaacgccagtaagaaaatcaatggaggcagcagaaataggtatggctgcgcagttagcctggtctcagtatcaaaacggggcaaatcattcaaaagtgagtaacaacggatcgcattcaaatgaacttcagatacgttataagccaacaccacctttgaaaaaaaggtatgactacaaaaagccaacagttaatcgaccgattataaaatcacctactcttaacaggcaaaacagcaagtcttcacggaatatacccacaaatagcaagctgaaggctagtaaatccaatactaacaaagtttctcgtaggaatgagcaaaatttggagcctagttcaccagtactcgtttcagcgacagcggtacctgctgaatccaaacccatgcgttctaaaagtggtacacccgataaggaaagctctgctagttcatccctcgattccagaaaggaggatatattaaaatcagtgcagggagtagatcgaaacgcttgtgaacagatacttaatgaaattcttgttacggatgaaaaagtttattgggaggatatcgcaggcttacggaatgcgaagaattctttgaaagaagcagtggtttacccatttctgcggcctgacttattcaaagggctaagagaacctgttagaggtatgcttttgttcggcccaccaggtacaggtaagacaatgattgctaaggcagttgcgacagagtccaattccacattttttagtgtaagtgcatcttctttgctatcgaaatacctcggtgaatctgagaagctggttagagcattgttttacatggccaaaaaattgtcaccctcaattattttcatagatgagattgactctatgttaacagctcgctctgacaatgaaaatgagtcctcgaggagaattaaaacagaacttcttattcagtggtcctccctatctagtgctactgcacaatcggaagaccgaaataatacgcttgacagcagagtacttgtcttaggagcaacgaatttgccatgggcgattgatgatgcagcaagaagacgattttcacggaaactatacattcctttaccagattatgaaactagactatatcatttgaagagattaatggccaagcagaaaaatagcctgcaagatttagactatgaattaataacagaaatgaccgaggggttttctggttctgatcttacgtcattagccaaagaagcggcaatggaacctattagagatttaggagataagttgatgtttgcggattttgataaaatcagaggaattgaaataaaagattttcagaatgctctgttgacaataaaaaagagcgtgtcgtcagaatctctacaaaaatatgaggagtggtctagtaaattcggtagtaatggttcctga

SEQ ID NO: 78930 - DNA, 486 bp, Saccharomyces pastorianus
atggactctaatgtgtttatcactattttcggagaaattgacgtcttacgatcttttacagatatcaaatccaaaattaaactggtaagactttcgtgtaagggggcaagtgaattagacgagttttcaagtcgactatgccttgtagtgttatcaactgtaggattgtcgccttttgcattatttgacagcttagtttctaattctagaaggaccgttcttatccgtttcaaatattctacaaatcgaggtattccagccaggccttgcaaagatgatgttatgaagcaatcattcccacgattaattaagcccactgtcgtgtacttcccaatactctgcttagaatccccaaagactagcgcacttaggctgggtgcaatggcatatagagaagcagcaattatcaaaccacatgaaacttttttaatcagtgaagtcggagattctgttacattttttatccaagacatattgtgcttgtag

SEQ ID NO: 78931 - DNA, 471 bp, Saccharomyces pastorianus
atgagttcccggtttgcaagaagtaatggcaatcccaaccacattaggaaaagaaatcattctccagacccaataggaattgataattataaaagaaaaagactaattatagatttagagaatttatccttaaatgataaagggcccaagaacggacatgcagatgataacaatcttattcataacaatatagtattcacagacgctattgatgataaggtcctgaaagagatcatcaagtgttccacaagtaaacgcggcgacaatgacttgttttatgacaaaatatgggaacgtttgagagaaaaaaggctacaaataataaaatgggtagattataaggaaattgcttatctaagctggtggaagtggttccataatcaaatgacttcgaaatacacttatgatggagaggctgataccgatgttgaaatgatggcagtggatactgatgtggatatggatgcgtaa

SEQ ID NO: 78932 - DNA, 597 bp, Saccharomyces pastorianus
atgcaacaagatatcgtcaacgatcaccaggaggaggcccaagggtggaagtgggaacaaatcaaagagataattgaatcgggggagcttgcccgtttgaaacgaagccgccagatgactgacaaataccacgagcataagaaaaggactgctggcctggacatgaaccagtacgttttgcaaaaactaggctggtcgctagacgaaccgcagctcgaaaatgctgccgcgaaggcttttagttcttctactctatatgctgtgcgtgccaacgatttcccgtataacttcgagcctggtgttgtacaccttgttctctggtccaaggttgccctgccagtacattccccagataaggccgtgcgcaaagcggcccgcgctcgcatgaatgcatttttgcaggcacagccgctactgcgtccacttctaagctcgggtcacgtggcctggtttgtcaactacccggaactacaaagtgttgcccggattttccacgctcacgtgctgcttttcttcccacgggaacgctattccgcggaacaggtaaaaacgaccgttgatgatatcctttcacacggtttcgagccacttgcctga

SEQ ID NO: 78933 - DNA, 729 bp, Saccharomyces pastorianus
atgcaaaaacacaatataaaattaaaccaaaaccaggatatttcccaattattccacgatgaagtacccttattcgacaactctataacttcaaaggataaagaagtcattgaaactttatctgaaatatactctataataatcacactagaccacgtagagaaagcctacctaaaagactccatagatgacacccaatacaccaatactgttgacaaattactaaagcagttcaaggtctacctgaattctcagaataaagaagagataaacaagcatttccaatccatagaagcgttctgcgatacatacaacatcactgcttcaaacgcaataacaagactggagaggggcataccaattacagcagaacatgcgatatccactaccacatcggctccctttggtgataataaacaaagttcttctagcgacaaaaagtttaatgctaaatacgtcgctgaggccactggtaatttcatcactgtaatggatgctttgaaactaaactataatgcaaaagatcaattacatcccttattggctgaactgctaatcagcataaatcgcgtcaccagggatgattttgagaatagatcaaaactcattgactggattgtcagaataaataaactgtcaattggtgacactttaactgaaacacaaattagagaacttctgtttgatctggaactagcctataaaagtttttatgctttactggattaa

SEQ ID NO: 78934 - DNA, 906 bp, Saccharomyces pastorianus
atgtccagtaatatagaacctcagacaacagctaaatgtatactgtatacaacaaaggggaacattgccattgaattatgggctaaagaatgccctgagacatgtaagaggttcttatctatgctctcagatggcacgttcaccaatggagaatttaaagagttaaagccaacacagtggctaatgtttaatgcaaatagtactggtgagtaccgtacagttgctgaggaaaaaaatcctcgtatacgcttcaatagagatgggctcttgggatgggatagacgaaggaacacatggtttataactgtgctggcggattctaagcacgtactgaacgattgtaatgtatttggcaaaattgttgggaaatctatttacatctttagacagatcttgggcggcgaaattgaagcttcctcccgtgacaataatgtcaaacgattcatgtatcctgcagttttgaaggatgttgagattaccataccattctttgaggacatctttggatcaaaaagaagactggaagataatgaaaaaaaagaacaagagccggcaaagaaacttgtgaaatcagcaaaagtaaagatggtttatgaagatgagcaagaggatcatgatggtgatgttcaaaagcttaagccaagaaagagaatgattctcccagcatggatcaaagatgatagtcgcagtgaaggaatcaaactagacacattcttagatcagccacaagaggcaccaattagggaaaagacggagttgcatgataatgttgatgaggcaaccactaaagaaacggaaagtcaagaaaacatcaaggaagaaccaatggataaaagagagcgggaaactttggcaatgttgtcaaaatttcaagaacgaataaaaaacaagaatattctaaagtga

SEQ ID NO: 78935 - DNA, 1242 bp, Saccharomyces pastorianus
atgagagcattcccccgagtactgccatttcgccatcagagatcatataataacatccttcttcgaacagtaaggctttttggttcatcattttcttcttttgatttctctaggcaaatgcctaaggtggaccctgacaataccgctgcaatgctactacagaaaaacttgatccaaagaaacaacatgctctatgggtatggatcagggacaatacgatgtactttgctagactcaactggacgagccaaatcaccattagtagagataaaacgtgaggatctagtatcaaaacatggcttgttgcccagagatctacgtaaaattgaaaaatcaaggaagaatgacttagtccctagtttgctcgtgcgagaaaattccatactaatcagtttacttactgtgaaagccctaattaagcctgatatggttattatcttcgattcagccggcagtggaataactttaaactcagaagctcacaaggattttattaacgatatgaaattgagactaaaaaatcaagaaacaagtgagctaaatagcgatccacttccttatgaattcagagctttagaaacgatcttcatttcggcattatctaaccttaccagtgaaatgaaggtgttgctaaccatatgcaagggggtgcttcaagatctagaatttagtataacaagagataaattaaggttcttactgggtcaaaacaaaaaattgagtagcttcaataaaaaggctgttctagttaaagatatgctggatgacttgctagagcaagacgatatgctttgtgatatgtacttaaccgacaaaaaggctggaaaaattagagttcaagatgatcatactgaaattgaaatgcttctggaaacatatcataactatgtcgatgaaatagttcagaaaagcgaaagcgccatatctgacgtgaaaaccacagaagaaatcatcaatataatcctagattctaacagaaacgaattaatgctgttagggataagatacgccataggaatgctttcgttgggaggcgctctattcctgggttctatctatggtatgaatctggaaagtttcatagaagaaagtaattatgcgtatttaactgtcaccattttggggttaatatctactgtttggctctatgcgaagggaatcagacatttgcataaattacaacgtatgtcattattgagtaaaataaaaacagattccgttcacgaactgttgaagaaatag

SEQ ID NO: 78936 - DNA, 453 bp, Saccharomyces pastorianus
atgtttctcccaaaattcaatcccataaggtcattttcccccatcctccgggctaagactcttcttcgttaccaaaatcggatgtatttgagcacagagataagaagagctattgaagatgccatcgaatcggctccagtggttcttttcatgaaaggtactcctgaatttcccaaatgtggattttcaagagcaaccattggattattaggaaatcaaggcgttgacccggccaaatttgcggcttataatgttttagaagacccagagctacgtgaaggtatcaaagagttttcagaatggccaactattccacagttgtatgtaaacaaagaattcataggtggatgtgatgttattacaagtatggcacgctctggtgaattggccgatttgctagaggaggcacaggcattggtacctgaagaagaagaagaaaccaaagatcgttga

SEQ ID NO: 78937 - DNA, 606 bp, Saccharomyces pastorianus
atggaatctcaattcatattagattacaatgttccgtcaaaaaataaggggaacaatcagaagtctgttgctaagctgttgaaaaataagcttgtaaacgatatgaaaactacgttaaaaagactaatttataatgaaaataccaagcaatataaaaataataatagccacgatggttacaattggagaaaactaggctcgcagtatttcatactgtatcttcccctatttacgcaggaactgatttggtgtaaactgaatgaaaactatttccatgttgtattaccatctttactgaatagtaggaacgttcatgataaccacagtacctatataaataaagattggttacttgcccttttagagctaacttccaacctgaaccaaaacttcaaattcgaatacatgaaattgagattgtatattttaagagatgatttaattaataatggtttggatcttttgaaaaatcttaactgggtcggtgggaaactgattaaaaatgaagatagagaagtcttgttgaactcgaccgatttagctacggattctatttctcatttattaggtgatgaaaactttgttattttagagtttgaatgctaa

SEQ ID NO: 78938 - DNA, 597 bp, Saccharomyces pastorianus
atgtttcatttagtcaagggactttacaataattggaataaaaaggaacaatattcaattctaatattaggtctagacaatgcaggcaaaacgacgttcttggagacattgaaaaaggaatactctctggcgttcaaagccttggaaaagatacagcctacggtaggacaaaatgtggcgacaatacccgttgacagtaaacagatcttgaagttttgggatgtaggtggtcaagaatcactgagatcaatgtggtccgaatactattccctatgtcatggtataattttcattgtggatagttcagatagagaacgattagacgaatgttccacgaccctacagtcagttgtaatggatgaagaaattgaaggtgtacccatcttgatgctggccaataaacaagatagacaagatagaatggaagtacaagatataaaagaagtatttaataagattgcggaacatataagcgctagagatagtagggttttaccaataagcgcattgactggagaaggtgttaaagacgctatagaatggatgattgttagactagaaaggaataaaaagtcaagaccaccgatttataaatga

SEQ ID NO: 78939 - DNA, 1188 bp, Saccharomyces pastorianus
atgtcactttctcttgtatcgtaccgcctaagaaagaacccgtgggttaacatttttctacctgttttggccatatttctaatatatataatttttttccagagagatcaatctctgttgggacttaatggccagtccatttcccaacacaaatgggcacacgaaaaggaaaacacattttattttcccttcaccaagaaatacaaaatgccaaagtactcttataagaaaaaaagcggctggttgttcaacgatcacgtggaagatattatcccagaaggtcatattgcacattatgatttgaacaaattgcactctacgtcagaagcagctgtcaataaggagcatattttgatattgactccaatgcaaacatttcatcaacaatactgggacaatttgctgcagctaaattaccctcgggaattgattgaattggggttcattacaccaagaacagccactggtgacttggccttaaagaaattggagaatgctattaaaaaggttcaaacggacaagaaaactcaaagatttagtaaaattactattttgcgacagaattcccagagttttgataagttgatggagaaggaaagacacgctttagatgttcaaaaggaaagacgtgcagcaatggctttggcgcacaatgaattactattctccaccataggacctcacacttcttgggtgctgtggctagatgccgatattatagagacaccaccatctttaattcaagacatgaccaaacacaacaaagctatcttagctgcaaacatttatcaaagattttacgatgaagagaagaagcaaccatcaatcagaccatacgatttcaacaactggcaagaaagtgacaccggtttagaaatagcctctcagatgggtgatgacgagattattgtcgagggttatgcagaaattgccacttataggccattaatggctcatttctacgatgctaatggcgtaccaggtgaagagatggcgctggatggtgttggtggaggctgtactttggtcaaagcagaagttcacagagacggtgccatgttccctaatttcccattttatcacttgattgaaacagaaggttttgctaagatggcgaagagattaaactacgatgtatttggcttaccaaactatttggtttatcacatagaggaagagaaccattga

SEQ ID NO: 78940 - DNA, 300 bp, Saccharomyces pastorianus
atgaccgaagaaactattactatagattctatatcaaatgggatactgaataacctgttaaccacattgatccaggacattgtagctcgggaaaccactcaacaacaattgctgaagacaagatatccggatcttcgcagttattatttcgacctgaacggatctctcgatattaatggactacagaagcaacaagagtcctctcagtatattcactgtgagaattgtggcagggatgtgtccgcaaacagactagcagctcatttacagagatgtttgagtaggggtgctagacgttga

SEQ ID NO: 78941 - DNA, 300 bp, Saccharomyces pastorianus
atgtctcaagatttcgttacgttagtatcaaaagatgataaggaatatgagatatcacgatctgctgcgatgatttcaccgacgttaaaagctatgattgagggacccttcagggaaaggaaaggccgaatagagctcaagcagtttgactcgcatattctagaaaaggctgtggaatatttaaattataatttgaagtacagcggcgttagcgaggacgatgatgagattccagagtttgaaataccgacagaaatgtcgttagagctgctacttgcggcggactatttgagtatatag

SEQ ID NO: 78942 - DNA, 549 bp, Saccharomyces pastorianus
atggtagcctccacgacggtaccatatctgccaaagatctttttcaatttaactggatcacgacaactccatggcatatttctgataattaatttcggtttaccttttagcatggagtcttcaccatcagcatcgtcctcatcttcattgttctggcccgttattttctcagatgactcaggtgtgctcttttcaaccacttctgatgttttctttgaacgatctcttcttttagcaatgtctaccctcaagatatgtccgttaaatttggtctttctggccttagctagggcttcttttgtgtcatcctctacagcaaaactaacgaacccgaagcccctggaccttttattcgtgtccttaacaactaccgcatgcttgatcggagcaaaattggaaaagaaatctgccagctgctcatctgtgacatcctggggtatagacctcacaaacaaagtcttcatatctaggccgtcgtcattttgttttgagacattactagaaggcacttcaacattttctattgtttcttccatctcactttggtag

SEQ ID NO: 78943 - DNA, 2058 bp, Saccharomyces pastorianus
atggaagaaacaatagaaaatgttgaagtgccttctagtaatgtctcaaaacaaaatgacgacggcctagatatgaagactttgtttgtgaggtctataccccaggatgtcacagatgagcagctggcagatttcttttccaattttgctccgatcaagcatgcggtagttgttaaggacacgaataaaaggtccaggggcttcgggttcgttagttttgctgtagaggatgacacaaaagaagccctagctaaggccagaaagaccaaatttaacggacatatcttgagggtagacattgctaaaagaagagatcgttcaaagaaaacatcagaagtggttgaaaagagcacacctgagtcatctgagaaaataacgggccagaacaatgaagatgaggacgatgctgatggtgaagactccatgctaaaaggtaaaccgaaattaattatcagaaatatgccatggagttgtcgtgatccagttaaattgaaaaagatctttggcagatatggtaccgtcgtggaggctaccattccaaggaagcgtgatggtaaattgtgtggatttgcgtttgttactatgaagaaaatcagtaattgtagaattgctttggaaaacaccaaagacttgaaaattgatggtagaaaggtggctgttgattttgctgttcaaaaaaacagatgggaagattacaaaaaagcccagccagaaatgaatgacaaagatgataacgagtcaggaaatgaagatgctgaagaaaaccatgacgacgaagaagatgaaaatgaagaggaagatagacaagtagatcaagcttcaaaaaacaaagaatcgaaacgtaaagcacaaaacaaaagggaagatttttctgtttttgttcgtaacgtcccttatgatgccactgaagaatctttggctgcgcacttcagtaaatttggcagcgttaaatacgcattacctgttatcgataagtctacggggttggctaaaggtacggcctttgtagccttcaaagaccaatatacatataacgagtgtatcaaaaatgcgcctgcggctggctctacctctttattgataggtgatgatgtcatgcctgagtatgtgtatgaaggtcgtgttctgtccattactccaacgttagtaagagaggatgctggaagaatggcagaaaagaacgccgccaaaagaaaggaggccctaggtaaagcgccaggcgaaaaagatagacgtaacttatatttgcttaatgaaggtagagttgttgaaggctcaaaaatggctgatttgttaaccaacactgacatggagatcagagaaaaatcctacaaattaagagtggagcaactgaaaaagaacccatctttgcatttgtcgatgactaggttggctatcagaaatcttcctagagcaatgaatgataaagcattaaaggcgttagctcgtaaagctgtcgtggaatttgctacagaagttaaaaataaggaaagacatccattgagtaaagaagagattatcagatctacaaaggaaaaatacaagttcatgggtccagatgagattgaagctcaaaaaaagaaagacaaaaaaagtggtgttgtcaagcaagcaaaagttataatggaagttaaaggatcaactgcgggaagaagtagaggttacggttttgtagaattcagagatcataaaaacgctttgatgggcttaaggtggttgaattgtcatgccgttacctccgatgaaattttagagggtttgaatgatgatgaaaagaaacaagtagacaatgacttaggcaaaggaagacgtctttgtgttgaatttgcgattgagaactctaacgtcgtaaagagaagaagggaacaattgaagcaagcaagaaccaagagaacgagaccagataatgaagatactggagatgtcggagaatccgagaataagaagccaaagaaagaagaagcaacgacgcccaccaatcccgatgacaaaaagatgggcgatgatataaagagaataatcgggttcaagcgtaagagaaagcacgcaaaaaaatag

SEQ ID NO: 78944 - DNA, 1668 bp, Saccharomyces pastorianus
atgtataatggcaaggatagagcacaaaactcctatcagccaatgtaccaaaggcctatgcaggtacaaggacaacagcaagctcaatcgttcgttggaaagaaaaacacaatcggaagtgtgcatggaaaagccccgatgctaatggccaataatgatgtttttactattggaccttataaggcaagaaaagatagaatgcgggtatctgtcttagaaaagtacgaagttattggctacattgctgcgggcacatatggtaaagtttacaaagcgaaaagacaaatcaactccggtaccaattccgctaatggttctagtctgaatggtaccaatgcgaaaattccgcagtttgacagcacgcaaccaaaatcaagctcttcaatggacatgcaggcaaatacaaacgcattaagaagaaacttgttaaaggatgaaggagtgacccccggaagaatacgaactacgagggaagatgtatccccgcactataattcccaaaaacaaaccctcattaaaaaaccgctgacggtattttatgccattaaaaagttcaagacagagaaggatggcgtcgaacaattgcattatacgggaatatctcagagtgcctgtagagaaatggcattatgtcgagaattgcacaacaagcatttaaccacattagtggaaatttttttggaaaggaaatgtgtccatatggtgtacgaatatgcggagcatgatctgctacaaattatccacttccattcccatcccgaaaaaaggatgataccaccaagaatggttcggtctattatgtggcagcttttagacggcgtatcgtatctgcatcaaaattgggtgcttcatcgagatttgaaacccgcaaatataatggtgaccatagatggatgtgttaaaattggtgacttaggtttggccagaaaatttcataatatgctgcaaaccctctatactggggataaagtggttgtcactatatggtaccgtgcacctgagttgctattgggagcacggcactatacccctgcggttgatttatggtccgttggctgcatttttgcagaactgataggattacagcccatatttaaaggtgaagaagctaaattagactctaaaaagactgttccatttcaagtgaatcaactacagagaattttggaagttcttggcactcccgatcaaaaaatttggccttatttggagaagtatccagaatacgatcaaattacgaagtttccaaagtatagggataaccttgctacatggtatcattccgcgggaggaagggacaagcatgctttaagcttgctttaccacttgttaaattatgatccaattaaaagaatagatgcatttaatgcgttggaacataagtacttcacagaaagtgatattcctgttagtgaaaatgtgtttgaaggtctaacttacaaatacccggcaagaagaattcacacgaacgataatgacatcatggatcttggatcaagaacgaaaaacaatacacaagcttcaggaatcaccgcaggtgccgctgcaaatgcgttaggtgggcttggtgttaaccgtagaattctggccgcggcagcagcagccgctgctgcggtgtcaggaaacaatgcatcagatgagccatctcgaaagaaaaacagaagatag

SEQ ID NO: 78945 - DNA, 951 bp, Saccharomyces pastorianus
atgctgaaagaggagtataatttgagcggtgctgataacatggcatctgctgagttgtcatttaaaaagcaaaaagtggtattgaaaaagttcatgatagcgcaagtgactaaggggattatgcagcggtatgcgagcctattagttaccatgcctagtgatgatgacaatacaattattggcacaaatcatttgaaaacaaccaaatttttagaaataatcctacacagagccaaatcatcgcatttacagttcaaaaaggtctgttgcattgtcatcaagtttctagattgctgctcgaaggaaactaactacatgaagtttttaaagttcagcttacacaaactatttgtagctgctttcatcttaagtgtgccaaatgttgtaggcgatgaccgcgacaggattaccacgagggatgaaacctatcatctctattcccagataacaggcttgccactggaagaagtgataaattgttgttctattgtgaggcctgtacttattcggcggagtagacaacaacgcaggcaaatgttatctcggcgtgaacaacattcgtacttcctcagaagttcttttatgaactccaattcatcagtatcaccttttttctctaccaataggtcagctgatgatctacatgtacatacaagggcatactcgcttcatagtcattccgatggggaaggccacgataggcggtctgaacatgaagaaacgcatagcatgggggctgatgccgatacatatcgacaaactacgtttatcccagacacaccaaatggtttgcattctagatcattaattgagtgtgggatcgaacccacccaagtaagtgactctggtgaatggtcgggtcaaagtaacggatatgttttggtgacagaattacaggagtttaacaaaatgggtaaaaagttagtacaagaagcttttaggatagtttaa

SEQ ID NO: 78946 - DNA, 534 bp, Saccharomyces pastorianus
atgaaactggcgcaagacatgaatgtagatgaaatatttctcaaacaagcggcagaagctatagcggtaatctcatcaagtcccactcatacggaccccataatacgagagctactccacagaattcgacaatccagcccattgagcgcagttataccagcaccagaaaatgttttaaaggctggggagccggaaaatatggctagaggtcttataagggttccagaaacacaaacaaaaagaacaggaggtaacaaccacagcaaggaaggcgcacagctctacagctgtgcgaaatgtcagttgaaattcagcagaagttctgatctgagaagacatgaaaaggtacactcactcgtgctgccgcatatttgctcaaactgtggcaaagggtttgccaggaaggatgctctaaaaagacattctaacacactgacctgtcaaagaaacagaaagaaactaagtgaaggttcagacgttgatgtagatgagctcatcaaggatgcgataaagaatggtaccggcctgttgtaa

SEQ ID NO: 78947 - DNA, 474 bp, Saccharomyces pastorianus
atgccaattgaccaagaaaaattagctaagctacaaaagttgtctgctaacaacaaagttggtggtaccagaagaaagcttaacaagaaggcaggctcttctgccggtgccaacaaggatgacaccaagttgcaaagtcaattagctaagttgcacgctgtcaccattgacaacgtcgccgaagccaactttttcaaggacgacggtaaggtcatgcacttcaacaaggtcggtgtccaagttgctgctcaacacaacacttctgtattctacggtctaccacagggaaagaacttgcaagatttgttcccaggtattatctctcaattgggccctgaagccatccaagccttgtctcaattggctgcccaaatggaaaagcacgaagccaaggctccagctgatgctgaaaagaaggatgaagctattccagagttagttgaaggtcaaacttttgatgctgacgtcgaataa

SEQ ID NO: 78948 - DNA, 348 bp, Saccharomyces pastorianus
atgaaaagtttctccatttttttttgtaagcttgataatgaaatgggcaatagcctgtttgaactgatatttttgctttcacttttcaatttcaagtggtataatttatcgactttctctggcgtcaagtttatcactggatgcttgcatgtggtttgccattctaaaagtcttgaatctactgtttttcgagtggtcattcctatcttacatagaataaagtctctgtctacccattgtctcttcttgttaccattagtccgaattattgactcatcaataaatagccattttaaatccaccgtcttttcagatacgtatgattcaaagaggttactgtatgtatag

SEQ ID NO: 78949 - DNA, 1704 bp, Saccharomyces pastorianus
atgactggcgacggtaatgcacatatttctaaaaacaatcaaaatcaacacaaagatcgcttcaagtttattgtgaatgataaaagtattctaggacctcaatggttaagcctttaccaaacggatgggaaagtaacattcgcaaagtcccacttcgagcaagcaatgatgaacgttattagagaaccaaatattaactctactgtcatattaagagcggatattttgaaagagatcaatcatgctgcagaagctgggtctgagccaaaatttgacgagtccgtattaaaaaagtttgagatcgataatggtaatgaaagcggtgaagaagatgtcaagaagataaatattgaagatttaaacataaggtcgtgtgaaacatctgagagtttaaaattgtcacccgttcatgaatttgtaagaaggatcattcctaggaatttttacaaagatgctatcataaaccaaacatgtttaatcctaaatagcaaagaccctaattttcaggagacctcattgattgtatatacgccgcacattaactctgagaaagactgtccgttttatattccaagaacgcaaagtgtaggcattttgttacaccagtcagttctttctgtacactacattcccttccccgaggataaaactgcctttacagatgaatctgagcgtgttgtaagaaccgcttataggttattacaaactgctaacaaacactcaaagggtgtgatgcagggttatgaaaagagggtcaatcacgatcaagtggtaaataaagtcaattttcagaacacatacattgttttgaagaaaaaatactccaagttcctggtggagaattgggcagagtctacagacccaaaaaaacatgtttttgaagacatagccattgccgctttcctgattgaattatggattaaagtgtacggtccagacttccgttcaaaaatgcaatttagagatttgggatgcggcaatggtgctctttgttatattttactgagtgaaagtattaaaggtctcggcatagatgcaaggaagcgcaaatcgtggtctatctacccgcctgaagtgcaatcatcgttaaaggagcaagttataataccttctatccttttaagaccccatcctgctttgaaaagacaagtacctcatttggaacacaatgggagatttttcccagtcaaggtgacgcacgaagtgattgcccccgcaaccgtcgtgtattcaagtgaggacttactaaaatctccgcaggtcaatacagcagagttcccaccagatacttttattataggtaaccactcagatgagttgacttgctggatcccattactaggtcatccttatatggttataccttgttgctctcataacttttctggccagagagttcgttttaacgtaaggaaacgttcgcctaggtcaaatgaaatcaaaaaccagaataacagtaagagcacctactctggtttggttgatcacgttgaatatatttcatctcgtgtaggctggaaagtagagaaagagatgttaaggataccaagcacaagaaatgcagccatcataggtgtagaaaatgcaaccttaaagcattttccaacgcaagcggtgtacgatatgatttgggaagacggtggagctgaagggtggattcagaacacaatgtccttattgaaaagaaacccaagaaaccattaa

SEQ ID NO: 78950 - DNA, 750 bp, Saccharomyces pastorianus
atggcatgtactagtgatgatcctaacaaatatcctaacaaatatcccgaaattgtgagtattaagcacctgttccaacattcggggtccaagcatgaatttagtgctggtaaacgattttcaaaatccattggtaaaatattcaaacgaaactctgctttgaaaacttctagaactgaaacggcaaatcataaaatggaattgaaaaaaagagagggtgttaccttattgccacctgtcccagaatcattatttcataaactcaattcttggttggaaactttttcttccaccaagaacatgaaaatcgaagaaaacaaaattgttattaatgaaaaagagattcgagattcaatctcttactaccctgataagaatggaggaagtgctgtattttgttacttgcccgaccttgtgctatattataagccgcctataaaagtcacaggcaagcaatgtccaataaagagaagtccttgggaatcgatggaaatccaatatcaaaagtttatgtaccccttagaaaggttggaaaggcagtttgaggaagttccatttaggccctggtattttgcaatgcgattaaaggaattttacagatgctgtgaaaggtcttttactaacgcggcaaatagaggaaaggcaaggttattgcgggggaagcaaaggacgaaaaaatcgtatcataagacagtcaatctggtatcagcgaagatttccacccattcaaatgcgccgtcgccgggctga

SEQ ID NO: 78951 - DNA, 726 bp, Saccharomyces pastorianus
atgtctttttcatctatcttatcacaggatatcacagatgacattacaccaccagcgtattccgccaccttggggtcgagagaacagattgttttcagagcttaccaaaatgaaccttggttggctggtactgcttcgaatcttatcttagataaaaaacttgttattgtagacagagaactgttgttccaggtgttgatggtagagaatatcaccaaatccaagctaacacagatcgatgatataaaaaccaagctggatccgaaaaaacagaaagtggatagactacgatcaggcgcgcaaggaaatggcgctaagaagtacgaggtcatcactcaagtggacatggaagatgacgggaatgtggcggacaacaactgcgccaaggaaaataatagcaacaataatagcagtgccgccaagaataaagcagtgtttaaattgacactacaaagtaagtcgggcgacgttttttttgctatcaactcgactccaatatcttggagctcttgcatgctgggttctaaaattgtgatactgccgggaactgtgttcaataggggcgttttcatattgaaggactcacaagtcatttttctcggcggcattaatagagtttggaatgaaaatagagatcagaaattttgtgattatttggaatctaaattacaacgtgacaaacaacttgtaaatggcggctccaagaaaaggaaagccaatgattag

SEQ ID NO: 78952 - DNA, 564 bp, Saccharomyces pastorianus
atgttatataacaaagagcagggaacaagcggcgctagtagctctggtcgtagaacgaaattccacttcgatcgttttgtacaaatggttctgttcattgccgctaatcccaattattgctgttcagtagccagtatcccgaaatctggtgtcacgccagatttaaaaagagcagatattcttgaacagaagatcaaaagcttaaatagtgcgctgagtccaaaattgaaggaagaaagtcgtcttggtgggcctttgcataacccctctattctaccagccccatctttttcatcactaccaatgtcatccaatggaaagaaaactttagcaggatatagacctaaaagtaggaagaaacaaactattctccccaacggtcaaccaaaagagtgcgccacttgtggtgacacctggacttctcagtggagaagtggacctaatggaaatgttgagctatgtagtcgatgtggcatagcatacaggaaaaaaatggagaaaaaaatacgatcgcaacaatccactgaggatggtactaaaaattttatatttaaaaataaatag

SEQ ID NO: 78953 - DNA, 366 bp, Saccharomyces pastorianus
atgacctgtggtctagtacgaataaggttagccagatttggaagaaaaaatagtccggtctataatatcgtagtggctaattcccgtaaggcgagggatgctaaaccaatcgaggtactaggaacctacgtgccggtacccagcccagtgaccaagagagaattgaagaggggcgttgtacctattaaagacgtgaagcttgattttgatagaacaaaatattggattggtgtgggagcacaacctagcgaaacagttactaaactattacgaaaggctggtatattaaatgatgcatgggccactagtaagaacagcaatgtgaataggaaagttgtatttgaaagaatggaaacattggagtga

SEQ ID NO: 78954 - DNA, 570 bp, Saccharomyces pastorianus
atgtcttctttatcgctatatactgttcaggctgttttaatactagatcagcaaggagaacgaatttatgcaaagtattatcaacctcctcatagatctgatgaaggacaccaattgctcttcaattcggtgaagaagcaaaaagagtttgagaaacaactataccgtaagactcataagcaagattcggagattttaatcttcgaggatcatttagtcctttacaaagaatacattgatatcacgatatatttagttgcttcgctggaagagaatgaaattgttcttcagcaaggattttcagcaatcagaggagctttggatttgattttgaactcaggaatggacaaaaaaaacatccaagaaaactatgatatggttttattagctattgatgaaaccattgataatggtgttatcctcgaaactgactctaacactattgcatccagagtttctaaaccacctacgaacgaaccccaaatggcattagatttggataagggtttcttaggcgcgtggggtttcgcaaagagcaagtttcaagaaaggttacagcaaggcttatga

SEQ ID NO: 78955 - DNA, 1125 bp, Saccharomyces pastorianus
atgtctgccaatgatttcaagcctgaaacgtggacttcaagcgccaacgaagccttaagagtttctatagttggagaaaacgctattcagttttcaccattattcacgtatccaatttacggtgactccgaaaagatctacggctataaggatctcatcatccacctagcatttgattcagtaacattcaagccgtatgttaacgtcaagtattcagcaaaattaggagacgacaatattgtagacgtggaaaaaaaattactctcatttctaccaaaggatgatgtaattgttagggatgaagctaaatgggtagattgctttgcagaagaacgaaaaacacataatttatctgatgtgtttgaaaaagtatcagagtattcgttgaatggggaagaatttgttgtatataaatcgagtttggttgacgattttgccaggagaatgcatcgtcgtgttcaaatcttttcattactttttatcgaagccgctaactatatagatgagactgacccgagttggcaaatctattggttgttgaacaagaaaacaaaagaattgattggtttcgtcactacttacaagtattggcactaccttggagcaaaatctttcgatgaggatatagataaaaaattcagagccaaaatatctcaatttttgatctttccaccttatcaaaataaaggccacggatcctgtctttatgaggctataatccaatctttgctagaagacaaaagtattactgaaattactgtagaggatccaaacgaagcatttgacgatcttcgcgacaggaatgatattcaaagactgcgaaaacttggttatgatgctgtctttcagaagcactccgacctttctgatgagtttttggagtcaagccgaaaatctttaaaactggaagaaagacagtttaatcgtcttgtggaaatgcttcttcttttaaacaattctccatcatttgaattaaaggtaaagaataggttgtacattaaaaattatgatgccctagatcaaactgatccagaaaaggcaagagaagctttacaaaattcatttattttagtcaaagatgattataggcgtattatagagtcgataaataaatctcaaggttaa

SEQ ID NO: 78956 - DNA, 1551 bp, Saccharomyces pastorianus
atgtttatagccaaaaatctaaaaaataataaaatcaaggtatgcttgcctaaaaagaaatttgctgcgctgagtacagcgtctatacaaactaatgaaagaccaaatccagataaggttttgaaggacatcgcgaaatatgtccatgaaaccccattaaaatcatctttggctctagatacagcacgactctgtttccttgatactctaggctgtggcttggcggctttgaaatttaagcaggctcaaaatattattaaaccaattgtgccaggaacaatagttcccagtggaacaaaaatattgggcacatcttacgttatggatccagtgaagggagcttttgccattggtactctaatacgttggttagattacaatgactgctggttagctgccgagtgggggcacccatcagataaccttgggggaattttagctgtcgcggatcacttgtccagattaaacaaggctacccacggaaagaatggaaaacagtttcttgttaaagacgtattagaggcaatgattaaagcgcatgaaatccaaggtattatagcgctcgaaaattctttcaataaagtaggtttagatcatgtggtactcgtgaaagtagcaacggctggtgttgtctcgaagatgctgggcctgagccaggaacaaactattgaagcattgtcacaagcatttgtagacggtcaatcactgcgtacttaccgtcatgccccaaatactggatctagaaagtcgtgggcggcgggagatgcagtttcgagggctgtaaacttggcttatttagtcaaaaatgctaatgttggcacgataccttcagtattaacagctagaacctggggattttatgacgttttatttaagggtaaacctttttcattccaacaaagatcaaaatatgattcctacgtcatggaaaacgttctgttcaagatatcatttcctgccgaattccatgcgcaaactgcagtagaagctgctgtaaaagcatataggattcttgccaaacaagggaaaacttttaaagatattaaatcgatcagaattagaactcaagaggcggcaatgaggattatagataaatccggtcctctgtataattatgccgatagggatcattgtatccagtacatgatcgcggttccgctgattactggtaatctcacagctactgattattcggatgaggtcgcaagaaatcctgagatcgataacttgagatcgaaaatgtactgtatcgaagatactcatctcactcaaaactatcacgatcctgataaaaggtcgataggaaacgctcttctcatagagctgaacgatgggacgcagttggatgaaatttttgtagagtaccctgttggtcacaaatttagacgagaggaaggaataccattactaatgaataaatttcaaaggcatctgcgcgaacattttgtagagagccctgataaagtcgaccttataatgaaggtaagttcaaaaacaaacttttttaatatgcaaatcgacaaatacatggatttgtttactgagggatga

SEQ ID NO: 78957 - DNA, 1035 bp, Saccharomyces pastorianus
atgtttaaatcattggctgctgtcttgcctagagctagcaaggcaaagttcctccagaaaaattacgcctccactttagctttcattgaaagctcaaaagatggctctgtttcaaggtcatcattgagtttattggctgctgcacaaaagttgtctaaccctatcacagctgtaatcacaggtagcaaagctgaaaaaactgctgaggcgctaaaatcttcatattcatgcagcaatttagaaaagcttgtcatatttgaagattcaaaattagatacctgtcttcccgaacaactaactccgttattagtgaaactgttaaaaggcggcgactattcgcattttgttgtctcaaactcctctgttggaaaaagtgttttacctcgggtgggtgcgctcttggacgtccaacctgtttgtgaggttactgtaatcaaagatcctaagacctttataaggccaatttatgcaggtaacattatttctacaatagaatgccaggcagaaaaaaaactgttgattattagggcatcagcttttccaccaattgcagagggtagtatggattctgttaccattgagaagagaactgatattcctccttgtgacttaaatgttacctgggttaaaactattcttaccaagagtgaaaggcctgaacttacttctgcacagaacgtggtaactggtggaagggcactcaaggataaggagacatttgagaagctattatcgccgctagcagatgttttgcacgctgctataggtgccacaagagcttctgttgataatggactatgtgataattctctacaaattggtcagactggtaaggtagtcgcaccaaatttgtatatagccattggcgtttctggtgcagttcagcatttagcgggaatgaaggattcgaaagttatcgttgccattaacaatgatcctgatgcccctatatttaatgtcgctgactatgggttgcaaggggatctttacaaaatagtccctgaactaactgaaaaacttggtaaatataaataa

SEQ ID NO: 78958 - DNA, 885 bp, Saccharomyces pastorianus
atgcatttcaaagatttaggattgcatgactatactctcaaaaacttgatgtatgagaataattgctgtaaattttatgatgccgtggatgaaaacaacacctcatatgttttaaaatttgttccctcagatgtgacttcggaaggggatactttcccattcgtggatcgctttcaagtaaaggaaggtgtttttttggtatattcctcaaatgactttggaaaagaaggtacggactactttacttatactggtagtggtggaaatgaggttcacatctcgggcacctcttcagaagcaggaataaaaccgcagtttattgaaacttgccatccaaaacatcttaagcggggaacaaaagagcaggaagatataaatagtagtacctcaaagaaaagtgcagttatcaacaatttttcgggtgaaaaaacaccaaatccaaggccacagagttccaacatttcagaaaaagagacgtatgtcggaatattgaacgtcaaaagtaaaaataagaactcatcgaaaatacgaagtgaaaaattggtaagttccgtcatcgaaacaaagcatacgccgggattggcatctattttgtcgaaagaaggcactacatatccgaataatgcggacgggaaacatatcagtatcgtgaatccatcctcaaaaatatatcattcatcccataaacagattgttaaaacgcctatccctaagagtggcctttctccaattgagagatgccctttcaatggtcaaaatattaaatgctactcaccaagaccactagatcatgaaagtccccaacgtgatttcaataataactttcagctgagaatactgaagagctcggtgttgcaaaggagacaatcaacacagaatagttga

SEQ ID NO: 78959 - DNA, 1728 bp, Saccharomyces pastorianus
atgattacaatgattaaaaacaaaactttcaatagaaaaactacgggaacattgaagaagctggttttgtcatcagacaagtcactgcgaagatctttcaacggggcaagcagtactaaagacttcgtgtcctcggaatcaagtaaagtagaagaatggtgggaatcagccagatttaagaatatcagtcgtccatactcagctacggatgttgtaaagcatcggggcagccttcctgctaatacttcaatttatccttcatcttatcaagctcgaaagctgttcaacttactagaagagaatttcaagaatggtactccacttcacacgttgggagttatcgatcctgtacaaatgagtcagttggcccgttgcagaaatatcaaagttgcttacatatctggttgggcttgttcttccacattagttggatctacaaatgaagtatcgccggattttggcgattatccatacgatactgtgccgaatcaagtggagagaatattcaaggcgcagcaattgcacgatcgaaaggctttcttggaggcctccatcaaaggttctactcctgttgattatttaaaaccaattatcgcggacgcagacatgggtcacggtggcccaacgactgtaatgaaagttgctaagttatttgcggagaaaggggctgctggtattcatcttgaagatcagatggtgggaggcaaaaggtgtggccatcttagtggagctgttttggtgcccacagcaacacatcttatgagattgatttccaccaggtttcaatgggatatcatggggacagaaaatttggttattgcaagaacagattcctgtaatggtaagctgttgagttcaagcagtgatccgagagaccacgaattcattaggggtataataagagataacgtggtgccttggagcgaaaaattgattgagatggaggacaaaaaaattcccaactccaccattgctgacatggaacaagaatggtaccatgaaaatgagctgtttacatttgaagaggccttagaaaagcagtttacggcaaccgagtttgaaagctataaagaaaagaaggaagaccttatggtaaacaagctgggtagagcatacctaagcttaagagaaatgaaacttttagctcaagaagtgacaccactaaagaaaattatatttgactgggatgctccgaggaccaaagagggatattacatgtttaacggttgtattgaagcagctattagaagatctttggtgtttgccccatattctgatatgatttggctggaaacgaaaactcctgacctggagcaggcacgctcattttcaagaaaaattcataaacaacttccagctaccaagctagtatataacttatctcctagtttcaattggagcgctcacggctttgatgataaggcattaaaatccttcgtatgggacttggcaaaagaaggcttcacgttgcaactggtttcccttgccggtctgcattcagatggagtatcattctgggaattagccaatagcttccaaagtgacggaatgaaagcatacgtcgaaaaagtgcaaaaacgggaaaaggagactaattgtgatatcatgacacaccagctatggtctggtgcagaatatgttgattccttaatgaaagttgtccaaaacggtgcttcatcccaaactttaagtacatctggtgagagctttaccgaaacgcaattttga

SEQ ID NO: 78960 - DNA, 981 bp, Saccharomyces pastorianus
atggcagaagtactgaccgtcctcgagcagccgaactcaattaaagattttctcaagcaggattcaaatattgcgtttctggctggtggagtagctggcgcggtttcccgaaccgttgtttcaccttttgagagagttaaaatactgctgcaagttcaaagttcaaccacttcttataaccgaggtatctttagctctatacggcaggtttaccatgaggagggaaccaaaggtttattcagaggaaatggtttgaactgcataagaatttttccctatagtgcagtccagtttgtagtttacgaagcttgtaagaaaaagttattccatgtaaatggctataatggacaagaacaactaacgaacacccaaagactattcagcggtgcattgtgtggtggttgtagtgtggtggctacttacccgttggacttgatcaaaacaagactatcgattcagacagcaaatttgagcagtttaaaccgctcaaaggcaaaaagtatatcaaagcctccggggatctggcaattactaagcgaaacttacagactcgaaggcggtctcaggggattatataggggtgtatggccaacgagtcttggtgttgttccatatgtagcactaaactttgcagtttacgaacaattgagagaattcggtgtcaattcctccgatgctcagccttcctggaaaagtaacctctataaattaacaattggcgccataagtggaggggttgcgcaaacaatcacttatccctttgatctgctaagaagaagatttcaagttctcgcaatgggcggaaatgaactgggatttagatacacgagtgtctgggatgcgctcgtgacaatcggcagagcagaaggcgttagcggttactacaaaggcttagctgcaaacctttttaaagttgttccttcaactgcagtgagttggctagtttacgaagttgtatgtgattctgtaagaaattggtga

SEQ ID NO: 78961 - DNA, 954 bp, Saccharomyces pastorianus
atgaatttttccctttcaaggcaaagttcagaaaaacaatcatcatatacagacaagccaagatctcctaatataggaatgtgtacagtcaattataaatcgaacctcccccttcaagtgtccgcagttgatcagctgagcactggtaaggggactcaattttatggccacaatagctacaaaaatgaacgggaatgttataatagtacgaaaataaacttaccaccaatttcatcccttttgcctaattttgaaaataatacaccacctaacgtagattcaagggttcaattccctccacagcaagtttatcaaagcatgaatgttgtacccattgttaatgagatctacaccccaatttccatgaacgcaacatcagatcaatatcctatctactatacggaaagtcagcaaccaataccacatagccagcctcctcatttgacctcctttgctcccttgatgatgccagtcatggtcccaacagtatataaaccattgacaccatacgacaaagaaccaatagcaattgcctccgaacctaacttcactgcaatatcaatggcgagtcacccaaacgctgccttagagctatgccatgataggccaaaatcagtcccacctgggtatggcgtacttccaaccatgcaggaagccagtaacggcagaacaaaaagcgaacctggtgccgtgttgaacggttcagcaacattttctgattggaaaactgacgcccgaatatcatccacaaagctgagaaaacagtgcccagtatgtggaaaaatttgttcgaggccctcaacgctgaagacacattacttaattcatacgggagatactcctttcaaatgtacttgggagggttgcacaaaatccttcaatgtgaaaagcaatatgctgagacatttgaaaagccatgaaaggaaaagaaacaaagtcttacacactacatag

SEQ ID NO: 78962 - DNA, 744 bp, Saccharomyces pastorianus
atgtggagaacaaaaacactagaatctatgctttgtagcccaatgaaatgttcatcgtctaacatagggggatcctatgcgcaatcttcaaaggaagtctcgaacacgaccaaaagggaagtgcatcttccaccttgttcgtcgattatgcacgctccacttactcctgaaataaaccaggccgcactaccacctcccgcttaccattacgcaccttcttctctgcatcagacagaggatcccgtatggagatcaagtcccaactctattatcttttcgccggttatagcaacaccgcaacccttccctttaacgttcgttgaacgtcaatcttgttgccctatttattcaacggcagcttcctcttatactgcccaatctgtacctccatcaatgcagcattttcaggaggaaaaccacagagcggtgagcaacgagcagtactccctcccgaatgtgcatatagggcaaaatcctgggacgctattatcccaaacacaaaccgacttagatcttatacaaaagcaactgcgcgctgtggtaaagctacggaaacaatgtcctatctgtgggaaggtttgttcgagaccttcaacactgaggactcattacttaatacatacgggagacacacctttcaaatgtacttgggagcattgcaacaaatctttcaatgtcaagagtaacatgttaaggcatttaagaacccatcaaaagaaaatagcaaagaaaaaacatcagtga

SEQ ID NO: 78963 - DNA, 738 bp, Saccharomyces pastorianus
atggctaccaggactcaatttgaaaactccaatgaaatcggtgtattctccaaattaacgaatacttactgtttggttgctgttggtggttctgaaaacttttactctgcatttgaagctgaattaggagatgctattcccatcgttcataccactattgctggtacgcgtatcatcggtagaatgaccgcgggtaaccgtagaggtctgctagttccaacccaaactactgatcaagaattacaacatttaagaaatagtttgccggattccgttaagattcaaagggtagaggaaagactatctgccttgggtaacgtcatctgttgtaatgattacgttgctttagtgcatccagatatcgacagagaaactgaagaattgataagtgatgtactaggcgttgaggtcttccgtcaaaccatatcaggtaatatcttagttgggtcatattgttctttaagtaatcaaggtgggttagtgcatccacaaacaagtgtccaagatcaagaagaattgtcctccttattacaagttcctttggtggctggtaccgttaaccgtggtagttcagttgtcggtgccggtatggttgtgaacgattacttggcagttacaggtctggatactacagccccagaattgagtgttattgaaagtattttccgcttgcaagatgcccaaccagaatccatttcaggtaacctacgtgatactttgattgaaacctactcatag

SEQ ID NO: 78964 - DNA, 261 bp, Saccharomyces pastorianus
atgctcttgttccaaatactctgtcgtattgcttcttgtaattatactataagaccaacgagggatgaggcttcttttaattatgcaatattgaatattgcttcacatacagtaaaagaaaaaatctgcacaaaggaacatgggtttaaatctttaattaataaaaattttccgaaaattttcgtttggccctcggaaaaaacgggtaatgctcatccatcgggatttcgtccagaatgcctatattattacataaagtga

SEQ ID NO: 78965 - DNA, 432 bp, Saccharomyces pastorianus
atgagcaaggctacgtgttcctttgagggctgtcatagtgcagttattacgatcaacgatgataacataataaacttaccagagcaggtgcacagcgaattcaagttgctggaaaaaagaactatgcgagatgctacccccagcgagagcaacttcttggtcgtccctgatgtttgggactttgataatgttggtgtatctagagaaattccttcttctatattaggggatttgagtgataagagtgattttgtttttgagtatggtaattccagctggaagatcaaaaagtgcttgaaatatttgatatgcgctgattgtgataaaggtcctatcggaataatatgtcaggtgcaagatcagacaaagaatgaagaaagagttttgcatctactaagcttgcgaagccttcaaattatgggaaggaattag

SEQ ID NO: 78966 - DNA, 2802 bp, Saccharomyces pastorianus
atgtctcaacagtctagctctccaacaaaagaggataataactccagctcccccgttgtgcctaatcctgattctgttccaccacagctttcttccccagctctattttatagctcctcttcatcacaaggtgatacctatggtcgcaacaatagccagaacttaagtcagggagagggaaacatcagagctgctataggttcttctccactaaattttccatcttcttcccaaagacaaaattccgatgttttccaatctcaaggcagacaggacagaattcgttcttctgcgagcgcttctggaaggtctagatatcattctgatctgagaagtgatagagcactgcctacttcttcctcttctttaggccgtaatggtcaaaaccgtgtacacatgcgaagaaatgatattcatacatctgatttatcctctccaagaagaattgtggattttgatactagatccggcgtgaatactttggatacttcttcttcttctgctcctccatcggaagccagtgaacccttgagaataatttggggtaccaacgtcagtatccaggaatgtacaactaattttcgtaattttttgatgtctttcaagtataaattccgtaaaatattggatgaaagggaggaattcattaacaatactaccgacgaagaactatactatatcaagcagcttaatgaaatgagagaacttggtacctctaatttaaacttggatgctagaaacttacttgcttacaagcaaacagaagacttataccatcaactattaaattatcctcaagaagtgatttctatcatggatcaaactatcaaggactgtatggtttccttaatagtagacaataatttggattacgatttagatgaaatagagaccaagttttataaagtaaggccttacaatgtaggttcttgtaaaggtatgcgtgaattgaatccaaatgatattgataaattgataaacttaaagggtcttgtcctgagatcaactccggttatccctgatatgaaggtagcgtttttcaaatgcaacgtctgcgatcatacaatggcagtggaaattgatagaggagttatacaagagcccgctaggtgtgaacgtattgattgtaatgaacccaattccatgtcactgattcacaacaggtgttcattcgcagataaacaagtcattaagttacaggaaactccagactttgtgcctgatggacaaacgcctcactctatctcattatgtgtttacgatgaattagtggattcttgcagggcgggcgatcgtattgaggtgactggcacgttcaggtccatccccattagagctaattccaggcaacgcgtactaaagtcgttatataaaacatacgtcgatgtggtccacgttaaaaaagtttcagataagaggttagacgtcgatacttctactattgaacaagaattaatgcagaacaaggtagatcataacgaggtcgaagaagtaagacaaattactgatcaggatttagcaaaaattcgcgaagttgcggcaagagaagatttatacagtttattagcccgctctattgccccaagtatttacgagctagaagatgtcaagaagggtatattacttcagctatttggcggcacgaataaaacctttaccaagggtggccgttatagaggtgacataaatattttactttgtggggatccttctacttccaaatcgcaaattttgcaatacgttcacaaaattactcctcgtggtgtgtatacttcgggtaaaggttcatctgccgttggtttaactgcttatattacaagggatgtcgacacaaaacaacttgttttggaaagtggtgcattagtattgtctgatggaggtgtttgttgtattgacgagtttgataaaatgagtgattctacaaggtccgtcttgcacgaagtcatggaacagcagactatttcaatcgcaaaagcgggaattatcacaacacttaatgccagaagttctattttggccagtgctaacccaattggttcacgctacaaccccaatttgcctgtgactgaaaatattgatctaccgcccccactactttcgagattcgatctggtctatcttgtccttgataaggttgatgagaaaaatgacagagaactagccaaacatttaacaaatctttacctggaagataagcccgaacatatttctcaagacgacgtgctaccagttgaatttttaacgatgtatattagttatgcaaaagagcacatacacccaataatcaccgaggccgctaagactgagcttgttcgtgcttatgtaggaatgagaaagatgggtgacgattcgagatccgatgagaagagaatcacagctaccacaagacaacttgaaagtatgattcgtttggctgaggcgcacgccaaaatgaaattgaaaaacgtcgtagagctggaggatgttcaagaagccgttagattaattagatcagccataaaagattatgcaacagaccctaaaaccggtaaaatcgacatgaatttagttcaaacaggtaaatcagttattcagagaaaactacaggaggatttgtcaagggaaattatgaatgttttgaaggatcagacatcagactcaatgtcattcaatgagcttataaaacaaatcaatgaacactctcaagatagagttgagtcttctgatatccaggaagccttgtcaagattgcaacaagaggacaaggtcattgtccttggcgagggtgtaaggagatcagttcgcctgaataaccgtgtctga

SEQ ID NO: 78967 - DNA, 348 bp, Saccharomyces pastorianus
atgctaagcaggatccaaaattataccagtgggttagtttctaaagcaaatcttttgtcatcaaaggctttatactatggtaaagtcggtgccgagatttcaaaacagatttatttaaaagagggtcttcaaccaccaactgttgcccagttcaaatcagtgtattcgaacctttataagcagagcctaaactttgctctaaagcctacagaagttttatcgtgtttaaaaaacatccaaaagaatgaactattaaaatatggcgcatatggtattcagttgatagggttttattctgtcggtgaaataattggaagaagaaaattagtgggatataaacatcactaa

SEQ ID NO: 78968 - DNA, 2709 bp, Saccharomyces pastorianus
atggagcaaatcaattcgaacagtagaaaaaagaagcaacaattggaagtattcaaatattttgcaagtgtccttacaaaagaggacaagcctattagtatcagtaatggtatgttagatatgccgacagtgaactccagtaaactcacagcaggaaatgggaaacctgacacggagaagcttacaggagaactaattttaacatacgacgatttcattgaactgatatctagctcaaagactatttattcgaagtttacggaccattcgttcaatttgaaccagatacccaagaacgttttcgggtgtattttcttcgctattgatgaacaaaacaagggatatctgacgcttaatgattggttttattttaataatttattagaatatgataattatcatctcattattctatatgagttctttaggaaatttgacgtagagaatttgaaggcaaaacaaaaaaaagagctcggtagttcgtcgtttaatttaaaggctgcagatgatcgaattaagtcaattaattatggtaacagatttctaagctttgatgatcttcttttgaatctgaaccaattcaaagatactatccgcctgttgcacgaatctattgatgataattttgttaaagataacaaattactacttgattggaatgactttcgatttctgaaattttacaaatgttatcatgaaaatgaagagtatttgagtttaaactctctggtcacaattttacaaaatgatcttaagaatgaaaaaatatttataggttttgataggttggcacagatggactcacaagggcatcgtttagccctaagcaaaaatcaactcacctatcttctaaggttattttactctcacagggtgtctgcagatatattttcctccttgaatctatcaaacaccgaattactaaaagcggacaataattccattccgtacaatgtattcaaggatatattttatttatttcaaaattttgacctactgaaccaaatatttcacaagtatgttactgaaaataatttgaatgagcaggatattagggaacaaatagttactaaaaatgactttatgacagttttaaacgcccagtataacaaagtaaacaatatcattgagttctctccttctcaaatcaacctactattttctatcgtcgcaaattcaaaggaaaacagaagattaagaaagagaaatcaagatcgagataacgagctattaaatgatcaccattatgattcagatattgatttttttatccataatgagtatttgcatggagtaagcagatccagaaaaaatttagaaagttttaatgactattatcatgatctctcggatggatttgaccaagactctggtgttaaaaaagcttcaaaagcgagtactggcctgtttgaatctgtatttggaggtaaaaaagataaagcaacgatgcgttctgacttaacaattgaagatttcatgaaaattttgaacccaaattacctgaacgacttagttcaccaaatggaattgcaaaaaaatcaaaatgagtcattgtatattaattactacttttatccaattttcgattcgttgtacaatttctccttgggttctattgcgggttgtattggtgcaactgtagtatacccaatagactttataaaaacaaggatgcaagcccaaagatctttagcccaatacaaaaactcaattgattgtttgttgaagattatatcccgcgaaggaataaaaggtctctactctggcttagggccacaattaataggagttgctcctgaaaaggcgataaaattgactgtcaatgattttatgagaaacaggttgactgataaaaacggcaagctaagcctttttcctgaaattatttctggcgcttcagctggtgcatgtcaagttatatttactaatccgttagagattgtaaaaattaggctacaggtccaatccgactatgttggtgaaaacatacaacaagccaatgaaactgccactcaaatagtcaaaaaattaggactgaggggcttgtacaatggtgtagccgcatgtttaatgagagatgttccattctctgctatttattttcccacttatgcacatttaaaaaaagatctctttgattttgatccaaatgataaaacaaagaggaatcgattaaaaacatgggagcttttaactgccggtgccattgctggtatgccagctgccttcttgactactccttttgatgttataaaaacaaggctccagatagatcctcgaaaaggtgagacaaagtataacggtatatttcatgctatccgaactatcttaaaggaagagagctttagaagctttttcaaaggtggtggagcccgtgtcctaagaagttctccccaatttgggttcactctggccgcctatgaattattcaagggctttattccctcccccgataacaaattaaaaagcagagagggtagtaagagattttgtatcgacgacgacgcaggcaatgaagagacagtagttcatagtaacggtgaactcccacagcaaaagttttactctgatgatagaaaacatgctaattattactataaaagctgtcaaattgcgaaaacattcattgatttggacaataacttttctaggtttgactcttcagtttataaaaactttcaagagcacctaagaagcattaacgggtga

SEQ ID NO: 78969 - DNA, 3393 bp, Saccharomyces pastorianus
atgcacggcaaagagttggctggcaggctccggaaaagggaaaatgataacgatttatcaccaaattcaagctcttctcctgctgaaagatttaggtgtccacatcccgaatgtaataaaactttctcacgtcaggaacatttatcaagacacaagctaaaccactggccgaaagagatatatgtttgttcttacgtgcttcccactacaaatgcgccttgcaataaaacgtttgtaaggaaagatttactgatcagacatgaaaagaggcattcaaaggtgaaaaacagattaagtcggccaagcaaggaccagatttcctcatcaaataaggacttctccaaaaatgcaccatataatcccagtgaagtacccctttctacgcaaagtggaacttctacgattaacttaataaaaaattctgtgaatccaccaccatctatcacacaagaatcaaaatttcgtccttttcttcaacagcctcaagaacctcaacagattcagcaatcacaacaaccacaacaaattcaacaactgcagcaacttcaattcccgcagcaactgcgggcaccattgcaacaacctatgttgcagcaacaaatgcatccacagcaagcaagtcctacttttccatcgtatgatcctcgaataaggaacaacggtcaaaatggtaatcaattttttaatttgatatttgataaccgtacaggcgttaatggttttgaagtggatgcagcgaataacaacggtaatggcaatgaccaaaatatgaatatcaatccagccgtgcagcagcaacgatatcaagacagaaattttgcaagtagttcatatcagcagccactccagccacttacccaggatcaacaacaggaacagtactttcagcagcaaaagcttgcccaacagcaacagcaacagcagcaacaacaacaacaattaccaccccagaatccatttggagatccattaacatcttcctctagcggtgctaatttgtcagttatgcaggaccttttttctacaaattttttgaacagcgacccattacaatctttcatgcaagaactttctgaagccccgcaagtaagtattgaagatacattttctgacaagaatacaatcccacctaatgaaaaacctgttcaacaagacgaagggttccagaatcctccagttatgtttgagttaccacaagataacattaaaattcccaaagcacaaccgaagttcaacgataaccccagtacttcagtgaaggacaatctttccagtcagaaacttaatatcaacgagctaaaacggagatcatctaaagattcaggagtaggaaacaattcctctctgaactacaaggaacagttgcgtcactctatgaaaagtgtcccgtcatttttccatccggatcccttaacaaagtataagatatcaaaagaaaaatgtcaagaaatgttttcatttgttccagaattacgctatgtctctattgaatctatacacaaatcgttaaaatccttctggttgaacttccatccacaatacggtctgcttcataaaccctcttttcacgttgataaacagcctgcaattttgaatttggcactaattatgactggcgcaagttttttgggaagcgagtatcgtgaacagattagtgacccaatttgtggtcctctaagatggataattttttctcatgctgattttcaaccaccttctaaaacctacatcattcaaagtttattattagtcgaaggatatgaaaaaacaagtacgaacaggtatttacatgaaaggtcttttttacatcacggaacgaccattcaattgctaaggcgaacgccctctttaggcggccatcccttaatggtcaaaaccggcaaaacctctggggaaaattcaattcaagacccacaagaagtttataaaagatggattgattttgaaatgttgaaaagaatagctttctacgcattttatatggacactacacatgctgtagtgtttggatactggaatttatttattaatagcaatcagattcaactaactttaccctgtccagatcaagtgtgggagtcttatgatttgagctatgaaactctgatggagcatgggtatggcagcacaaagagagatgagaataatacatttttgtctgcgttaatgcaattaatgaaaaatgtcattcaaatcttacgaaataataatatacggagaaacaaagtcaacaatggcggtatagagagtacccctacagacttggaaagcactacagattggaatattcagagtctttttggtaaaaagattcttttggcggggataatttcgatcttatttcaatgtcaagaggaagttaatggtgactatttcattactaactttaggggcggaatcactgatcatttaggcctttcgtggaaagatattttatcatttgcaatgaactattggcttcacgaagttcagaaaagctgcactgatccgaaagcatgtaggataagtactccatctgaggagacactaacgaacagaaaaattgacgaggataatggagatggactatgtgatgatgatttggacttgctttcctccgataatccgtcaaattgtaaaattcccgttattcatatctctcaaattgttctacgtattcttcatcatgattattacatatatgcaggagcaccttggagaatgaatgtaccaattggtcgcgatgaatatgacatgatcagtcgcaggattctccagttcgctaaagacccctacaatgggggtgtagctgtagtctatgccttccagttcttatttgaaatgtttatcattaaggaaaataacgttccaaccgtggtgaagagctacaatataaattctgatcctgtgattactagaccctatgcgattgcattaacttcactcctaatttggtcttgtaattttgcattacatggctgtgaagttagcatatgggataatacagaagcctcaaaggatgaatgctttcaaccagatgacagcaatggtggaaacattcttggcaatactgataataatggatcgacgattgcaaacaacaatttaaaggaaaagaacaattacattccaatagaaagttttgaagtttacctattgagaatgtatcggaacttatatgtggatagctcactcgatgtagttagttttcagaatgaagtttgggcaaaagcaagtttacttcaacatatttctaatacccactttctatgcgggatgatgcagtttatgagagatatttttaacaagagctactgggatttagggcgcgaattcggaaaactcttcgataattgtttggaaaggagcctagggaaaacgtcacccacttgtcataacatgtttgatgtttag

SEQ ID NO: 78970 - DNA, 1182 bp, Saccharomyces pastorianus
atgacggatattcaactaaatggaaagagtacattagatactccttctgctaccatgacagcaaaagaaaaagaggcaaaattaaaatcggctgatgagaataacaagccaccgaactacaaaagaatttctgacgatgatttatataggcactcttcccagtatagaatgtggtcattcactaaagatcaacttcaggagaaaagggtagataccaatgcccgagcgattgcttacattgaggaaaatttattaaaatttagagaagcacacaacttaacagaagaagaaataaaagtactagaagcaaaggctatccctttgacaatggaagaagaactcgatttggtgaatttctacgcaaaaaaagtccaggtaatagcacagcatctaaatttgccaaccgaagtagtggccactgcgatatccttttttaggcgttttttcttagaaaactctgttatgcaaatagatcctaaaagtattgtacatactactatctttctagcctgcaaatcggagaactattttattagcgtggattcgtttgctcaaaaggccaaatctactagagatagtgttctcaaattcgagtttaagttgttagaatcattaaaattttcactgttgaaccatcatccttacaaaccgcttcatgggtttttcttagatattcagaacgtcctttatggtaaggttgatttaaattacatgggccaaatatacgataggtgtaagaagagaataactgccgcattattaaccgatgtcgtatatttctacactccaccccaaataacactagcaacattattgattgaggatgaagccttagtcacaaggtatttagaaacaaaatttcccagcagagaaggtagccaggaatcagtaccgggaaacgaaaaagaagaaccacaaaatgatgtcagtacaactgagaaaaacaaagagaagtccacagagagcgaagaatattcgatagactccgcgaagttactaaccataatacgcgagtgtaaaagtattattgaagattgtaaacctccgagtactgaagaggccaagaaaattgcggcaaaaaactattattgtcaaaatccatcaacactgattcagaaattaaaaaggaagttgaatggagaagatacttcgtccaccgttgagaaaaagcaaaaaacatga

SEQ ID NO: 78971 - DNA, 2247 bp, Saccharomyces pastorianus
atgaataggggatcattagatgatgggcctaaactacgtgaagaaaagcacttccaagatttttatcctgatcttaatgccgatactttactgccgttcatcgttcccttagtggaaacaaaggataacagcaccgatactgactcagatgatatttcaaatcggaataacagagagatcgggagtgtcaaaagcgtacaaactaaagaattgattttcaaggggagagtcaccactgaaccactagtactgaagaagaacgaagtggaatttcaaaaatgtaaaataactacgaatgagttaaaaggtaagaaaaatccatactgcgttagatttaatgagagctttatatccaggtactatcatataaacaaagtaagaaataggaagagttataaacaacaacaaaaagaattcgatggtgtggagacaccctacttcaccaaattctctagtaaagaagccccgaatattactatttcgacgagtacaaagagtgcaattcagaaattcgctagtatttcacccaatcttgttaatttcaagcctcagtatgacatggatgaacaggatgaattatatttgcactaccttaataagaggtattttaaagatcaaatgtctcacgaaatatttgaaattttaatgactacactagaaactgaatggttccatattgaaaaacatataccctcaacgaatagtctgattgctaggcataatattctaagggactgtaagaattatgagctatatggttctgatgatggaacaggtttatcgatggaccaggcgtgtgcagtttgtttaggcacagacagtgacaatctgaatacaattgtcttttgtgatggatgcgatattgctgtgcatcaagaatgttacggtataatttttatcccggaaggaaaatggttatgtagacgatgtatgatctcaaaaaataactttgccacttgtctaatgtgtccaagtcatacaggtgcattcaaacaaacagacaccggttcttgggtacataacatttgtgctctatggcttccagagctatacttttcaaacttacattatatggaacctatagaaggcgttcaaaatgttagcgtatcacgatggaaacttaactgctacatctgtaaaaagaagatgggtgcttgcattcagtgctttcaaagaaactgttttacagcatatcatgtcacgtgtgcccgtcgagctggtctctacatgagtaaagggaaatgcactattcaagaattggcctctaatcaattctcccaaaagtattcaatcgaaagtttctgccacaagcatgcacctagaggatggcaaacgagtatagaaggtattaataaagctagaaaatacttctctctactctctacattacaaaccgaaactcctcagcataatgaagctaatgataggacaaattcaaaattcaacaaaacaatttggaaaacacctaatcaaacgccggtagcaccacatgtttttgctgaaatattgcaaaaggtcgttgatttttttggcttagctaacccaccagcaggcgcatttgatatttgcaaatattggtcaatgaaaagggagcttacaggaggtaccccattaactgcctgttttgaaaataattcattggggtccttaaccgaggaacaagtgcaaacaagaatagattttgccaatgatcagctcgaagacttgtaccggctcaaagagctgactactttggtgagaaagagaacacaagcttcaaacagcttgtccagatcccgaaagaaggtttttgatatagttaaatcgccccaaaaatatcttttaaaaatcaatgtactggatatctttataaaatctgaacaattcaaggctcttgaaagattggttactgaacctaaattattggttattttagaaaagtgtaaacattgtgattttgatactgtccaaatttttaaggaggaaattatgcatttttttgacgttttggaaactctacccggtgcatcaagaatactccaaactgtctcatcaaaggcaaaagagcaagtaacaaatttaattgggctcatagaacatgtagatattaagaagttgctatccagagattttataataaatgatgacaagatagaagaaagaccatggagtggcccggtgattatggaagaagaaggtttaagcgatgcagaagaactgagtgcaggggaacaccgtatgctgaagctaatccttaacagcggataa

SEQ ID NO: 78972 - DNA, 1434 bp, Saccharomyces pastorianus
atgacattgaataggaagtgcgtagtgatacataacggatcgcacagaacggtggctggatttagtaacgttgaattgccacaatgcattataccctctagctatattaaaagaacagatgaggggggggaagctgagtttatattcggaacctacaatatgatagacgctgcggcagaaaaacgcaatggtgacgaggtgtatacattggtagatagccaagggttaccgtacaattgggacgcattggagatgcagtggagatatctgtacgacacccaattgaaagtttcacccgaggaactgccactggtgattacgatgcctgccaccaatggtaaaccggacatggccatattagagcgctactatgagctggcgttcgacaaattaaatgtaccagtattccagattgtaatcgagccattagcaattgccctatccatgggcaagagttctgcattcgtgattgatatcggcgcgtcaggctgtaacgttactcccatcattgacggtattgtggtgaagaatgctgtagtgagatctaaatttggcggtgatttcttggattttcaagtacacgaaaggttggctccactgattaaagaagagaacgacatggaaaacatggccgacgagcaaaaaaggtccaccgacgtttggtacgaagcaagcacgtggattcagcaattcaagtctactatgttgcaagtaagcgaaaaggacttgtttgagttggaaaggtattacaaagagcaagcagatatatacgctaagcaacaggagcagttaaaacaaatggatcagcaacttcagtacacggcgttaacgggaagccccaacaatccgttggttcaaaagaaaaattttctattcaagccattaaacaagactttaaccttggaccttaaggagtgctaccaattcgcagagtatctcttcaaacctcaactgatatcagacaaattctcaccagaggacggactgggaccgctaatggcaaaatcagtcaagaaggccggcgctagtataaattcaatgaaggccaatacctccaccaacccgaacggattgggtacaagccatataaacaccaatgttggcgatcataacagtactggcagcagcagcaacatatcaccagaacaagtatactcgctactgttgacgaacgtcatcatcacaggatctacctctctgatcgaaggtatggagcaacgcataataaaggaactgtcaatcaggttcccgcaatacaaattgacaacttttgccaaccaagtcatgatggaccgtaaaatccagggatggctgggcgcccttacaatggccaatctgccatcatggagcttgggaaaatggtactctaaggaagattacgaaacgctgaaaagagacagaaagcagtcgcaggctacgaacgcaacaaactag

SEQ ID NO: 78973 - DNA, 1113 bp, Saccharomyces pastorianus
atggctgaagcaagcatcgaaaagactcaaattttacaaaaatatctagaactggaccaaagaggtagaataattgccgaatacgtttggatcgatggtactggtaacttacgttccaaaggtagaactttgaagaagagaatcacatccattgaccaattgccagaatggaacttcgacggttcttctaccaaccaagcgccaggccacgactctgacatctatttgaaacccgttgcttactacccagatcccttcaggagaggtgacaacattgttgtcttggccgcatgttacaacaatgacggtactccaaacaagttcaaccacagacacgaagctgccaagctatttgctgctcataaggatgaagaaatctggtttggtctagaacaagaatacactctatttgacatgtatgacgatgtttacggatggccaaagggtgggtacccagctccacaaggtccttactactgtggtgttggtgccggtaaggtttatgccagagacatgatcgaagctcactacagagcttgtttgtatgccggattagaaatttctggtattaacgctgaagtcatgccatctcaatgggaattccaagtcggtccatgtaccggtattgacatgggtgaccaattatggatggccagatactttttgcacagagtggcagaagagtttggtatcaagatctcattccatccaaagccattgaagggtgactggaacggtgccggttgtcacactaacgtttccaccaaggaaatgagacaaccaggtggtatgaaatacatcgaacaagccatcgagaagttatccaagagacacgctgaacacattaagttgtacggtagcgataacgacatgagattaactggtagacatgaaaccgcttccatgactgccttttcttctggtgtcgccaacagaggtagctcaattagaatcccaagatccgtcgccaaggaaggttacggttactttgaagaccgtagaccagcttccaacatcgacccatacttggttacaggtatcatgtgtgaaactgtttgcggtgctattgacaatgctgacatgacgaaggaatttggaagagaatcttcataa

SEQ ID NO: 78974 - DNA, 1437 bp, Saccharomyces pastorianus
atgggcgcaaccaaaattttaatggacagtactcatttcaatgagatccgtagtataatccgttcgaggtcagtggcatgggacgccttagccagatctgaggaattgagcgaaattgatgcgtctactgcaaaagcgttagaatccattctggtgaagaagaacattggtgacggtttatcatcttcgaacaatgcacattccgggttcaaagtgaatggcaagacgttgataccattaattcacttactttccacctcagacaacgaagactgcaaaaaatctgtgcagaacctaatagctgaattgttgtcgtctgacaagtatggagacgataccgtgaagtttttccaagaagaccccaagcaattggaacaattatttgatgtgtcactcaagggagacttccagactgtgctaatctctgggttcaacgtggtctcactcttagtgcaaaatgggttgcacaatgtgaaactagtggaaaagctgttgaaaaacaacaacttgatcaatatcttgcaaaacattgagcagatggacacttgttacgtgtgcatcagactattgcaagaactggccgtgataccagagtatcgtgacgtgatatggttgcatgagaagaagttcatgcccaccttattcaagatcctgcaacgtgccacggactctcaattggccacgcggatagttgcaacaaactccaaccacctgggtattcaattgcagtactactctttactattgatatggttgctgacctttaacccagtttttgcaaacgagctagtccagaaatacttgagtgatttcttggacctcttgaaattggttaagataaccataaaggagaaagtgtccagattgtgcatatccatcatcctgcaatgttgctccacgcgcgtcaagcagcacaagaaggtgattaagcaacttttgttgctcggcaacgcgttgcccaccgtgcagagcttgagcgaaagaaagtattccgacgaagaattgcgtcaagacatcagcaacctcaaggaaatcctagaaaacgagtaccaagaattgacctccttcgatgaatacgtcgccgaattggactccaagttgctgtgctggtctccaccacatgtcgacaacggtttctggtccgataacattgacgagttcaagaaggacaactacaagatctttagacaattgatcgaactcttgcaagcaaaggtccgtaacggcgacgtcaacgcgaaacaagaaaagatcattatccaagtcgccttgaacgacatcactcacgtggtcgagcttctaccagagagcatcgacgttctcgacaagactggcggcaaagccgacatcatggagttgctgaaccattcagattctagggtgaaatacgaggccctcaaggccacgcaggcaatcattggatataccttcaaataa

SEQ ID NO: 78975 - DNA, 204 bp, Saccharomyces pastorianus
atggtcgcctttttagaactaacttctgacgtttctcaaccttttgtcatcccatctctttcgccagtctctcagccaagctcaagaaagaactctgacgcaaacgtcgatgacctgaatctggctattgccaatgccgctcttttggatgcctctgcttcaagccgctcacactccagaaaaaactctttgtctctgttgtaa

SEQ ID NO: 78976 - DNA, 336 bp, Saccharomyces pastorianus
atggcttcttttgactatctgtttcatcccgtcgtaccttgcacaatctgtccagactgtcctctttacgaatcaccagccttcccgtcttcttgtcttcatcacccacgtttattgtttaatgataaagccttttgtcctttatttttggttccttttcccgcttcgtttacccggtggttaacctttctcttccatcttgtaatatataataacaaaatgcatcaccatacttacgcaccccatatacatgacctaacggcagctttagacacaacagctccccagaaaaaatgtccaaaagaaacactccaccgctcagatcatcagggataa

SEQ ID NO: 78977 - DNA, 1077 bp, Saccharomyces pastorianus
atgtccaaaagaaacactccaccgctcagatcatcagggataaacactattcaaataaatgctgctagagaaatgcacgctcaaacggtgcgcgctcgaagaatgcccatgccaactagcggcatcactacaccctctgtgcaaccaactgcagccccagcaacaccacctcgacatatttgcaataacccaaacaatccgcagtgtctccactgtgggtctgttatcattccatctccaagggccacgttacccttggaggacaacccctccatctccatcaacgactggaccatctcctccagaaagaagcccattttgaactcgcaggaattagacatctgggaaaacgaaaaactcaaaggtttgactttgccagagatgatttttggtaacaactacatcaggatcgaaaactcaaaacagcattggtccatagagttcaatgccctggatgctttaaaggaggttcaactccaggattcaggtattcgtgttgcgtactccaaacgactgataaattctacaaacaaacgaacaaaattacaactaatggtgcgcaacggttcactaacgaatgtgaacgacgatcccttaaatatcatacacaagtacgactggacctacactacgcggtataagggcacagagagctcacctgagtcgaaattccgactggataacgatcaaaagctgccccttgacaaactggccgtacacgataaaatcctattctatgacgacatgattcttttcgaagacgaattggcagacaatggcatatcaatccttaacgtcaaaataagagttatgaacgaaaggttactgctgctgagccggttctttttaagggtggacgatgttctggtgagggtctacgacaccaggatttacgtggagtttgacgaaaacgtagtgatcagagaatccaaggaatttgaaggtaaatatcaggatgtacttgctaagcaccggctatcccaatctcacgacccaaaagctgccttgagagatagtaattgggtagcacagaacacgccgatgatcaaaagacaatgtgaaataattcagttctaa

SEQ ID NO: 78978 - DNA, 354 bp, Saccharomyces pastorianus
atgatttttatacatataattaaaatgaaatcaagcttcaaccatttctctcaatcttctgatggtagatctaacggtggcggcagcagcagtggagacagtgtaagcaccaccagcgacggtcttcttacaacaggaacaagtccaaataccagcagcacctctcttgacggtcttcttaccacagaaagaacaatcgtatctagcgtgttgttggatttccaacttcttgacttgtcttctcaaagaggaaccataacggacaccgtacttaccagtgataccaaccttcttagttcttttagccctgtattcaaaaaagaaaaaatatcaaaatatgttagtaaatcttga

SEQ ID NO: 78979 - DNA, 1413 bp, Saccharomyces pastorianus
atgcagaatccttacggtcactttactaacaataccacggaggacagggaggcttcatctcaaggaggaccattcggccaaagcctgaataggcccctagattacgccggatctttcccttctctgacatacaataataataatttcattgccaatcaacaaccttctctgcctttgccagaaccacgtttatcttggaacaacgtcaaccaggtttctaaccctttgatggtaacaccgcttccgggattacaaaaacgtatgaacaaaaacattaaaaagaaattaccaagagtatctaagaaggcatcagccctttctaacggggtatccggcaatgtaatgagcaacagtaatatagtagggcatggtgctgtaggttcggcatcgggatggaaagttgaaatgggtggcagtgatgaattagagagaagaaagagaagggcagaaagattcagtcagggaccatcagcgacgacgaatagtaacgataatttgaatgaagactttgccaacctaaatgccattagtagcaaatctcatcaatatgacaaaaagattcatgtggtagggcgttgccaaactctagagaaatcttatctgagactaacttcagagcctaatcctgacttgatcagacccccaaatattctacaaaaaatgtattgcttgttaatggacaaataccaatctaaaacagccacttatacttacctttgcgaccagtttaaatcaatgagacaagacctaagagtgcaaatgatcgagaactctttcactattaaagtgtaccaaacgcatgcacgtattgccttggagaacggagatcttggggaatttaatcaatgtcaaaataggattatggcgttattcgaaaaccctacaataccaaaaaaatcttattccgaatttatatgctattctgttttgtattcgatgttaaccgaagactatccgtcgatttctcatttaaaacttaagttaatagacgatggctcttcggaaatcttggaggacgaacatgtcaaaatgatatttgagttgagcgatatgaaactagtcggcaattatcactacttcatgaaaaactacctaaaactgcacaaatttgaaaaatgtctaattaattcattcttaaatctagaaaagttgatatttttgaccataatttgtaagagttataaccaggtcaatttagattttgttaaaagtgagtttaatttcaacagtatagaagagacaacaaatttcttgaatgagcaaaacttgacggagttcatattaaacaaacaaatcactgacagtaatggcaaaagtagtaatatcaagattttgaataccaagggatgtagggtacagttgatacaaaattatatgaagtctaaaaaaattgatataaagggacaaaaatga

SEQ ID NO: 78980 - DNA, 546 bp, Saccharomyces pastorianus
atgacaaacagtagtgaaaaacaatgggaaagaatccagcaattagaaaaggagcacgtggaggtatatagagagttgttgatcacgttggacaggttgtacttgattagaagacacaatcatgcggtaatattaagccatactcaacagcgcctcttggaaattagacaccaacttcaaattaatcttgaaaagactgctcttcttattagactgttggagaaaccggacaataccaatgtattattcaccaagctacaaaacctcttagaagaaagcaattctctggactatgagctcttgcaatcgttaggtgctcaatcttcattgcacaaacagttgattgaatcaagagcagaacgcgacgaattgatgtcaaaactgattgagttatcgtcgaagtttcccaaaccaactataccgccagacgacagtgatactgctggaaaacaggttgaggtagaaaaggaaaatgaaacgatacaagaattgatgattgctttacagatacactccggatataccaacatatcctacacaatttga

SEQ ID NO: 78981 - DNA, 414 bp, Saccharomyces pastorianus
atgaaacccattccttcatataagtttagagccgccgaattttccacctctgtttctaacatgatctcatcgcaatgttccctttgcattttatctatggcaatttccactagtttctttgctatgccatgcccgcggtatgtggactctacggctagcattcctatatatcctctcagtctcacgtttctatgcgggtccatcttacacactatgcaaccaatgggtatgttaggcgttccactcttgttgtcaacggcaatgtacgttaactcgggccattggttcaagaaatacctatatacgtatatcgagtacggctctgatagatccgcatctattagttttttaatactagcaaactgctcttcgttacgtatgtccaatggcttgtacactatttccatgtcctga

SEQ ID NO: 78982 - DNA, 531 bp, Saccharomyces pastorianus
atggaaatagtgtacaagccattggacatacgtaacgaagagcagtttgctagtattaaaaaactaatagatgcggatctatcagagccgtactcgatatacgtatataggtatttcttgaaccaatggcccgagttaacgtacattgccgttgacaacaagagtggaacgcctaacatacccattggttgcatagtgtgtaagatggacccgcatagaaacgtgagactgagaggatatataggaatgctagccgtagagtccacataccgcgggcatggcatagcaaagaaactagtggaaattgccatagataaaatgcaaagggaacattgcgatgagatcatgttagaaacagaggtggaaaattcggcggctctaaacttatatgaaggaatgggtttcatcagaatgaaacggatgttccgctactacttgaatgaaggggacgcctttaaactgatattgccgttgactgaaaggagctgcactcggtctacgttcctaatgcacggccggctggccacataa

SEQ ID NO: 78983 - DNA, 282 bp, Saccharomyces pastorianus
atggccaccccaagagaacctaagaagagaaccactagaaagaagaaggacccaaatgcccctaagagggctttgtccgcctacatgtttttcgctaacgaaaacagagatattgttcgttctgaaaatccagatatcacatttggacaagtcggcaagaagttgggtgagaagtggaaggctctaacgccagaggaaaagcagccttacgaggccaaggcccaggccgataagaagagatatgaatccgaaaaggagttatataacgccactttggcttag

SEQ ID NO: 78984 - DNA, 456 bp, Saccharomyces pastorianus
atgatgtatcgcacgacgttaaatactgttcaagtgtcacaaattagtggcgccgaattctaccctcacgcctcgtcgcgcgcgatacttttcgaatcacccgccttttgccgcctatttttttcgccgttcgtttatttagcggtgggcaaacaaacaacacagtatttattactggtaccgactgttaaagaaggactgttttgggacgtgtttttttcctgtttttgctcaattgactaccctatacatagtaaagcacagtcgcaatggccaccccaagagaacctaagaagagaaccactagaaagaagaaggacccaaatgcccctaagagggctttgtccgcctacatgtttttcgctaacgaaaacagagatattgttcgttctgaaaatccagatatcacatttggacaagtcggcaagaagttgggtgagaagtggaaggctctaa

SEQ ID NO: 78985 - DNA, 1167 bp, Saccharomyces pastorianus
atgaatcgcacacttacagataataccagagccataaatgtggcctccaacctcggtgctcctcaacagaggacgatttttgccaaggagagaatatccatcccaggatactacgagataatccaattcctgggcaagggagcctatgggacagtgtgctcagtgaagtttaagggtcgaagcccagctgctaggatagcggtaaagaagatcagcaacatctttaataaggagatccttttgaaaagggccatccgtgagctaaaattcatgaacttcttcaagggccataaaaatattgtaaatctaatcgatctagagatagtgaccagctcgccctatgacggactgtattgctaccaggaactgattgattatgatttggcaaaagtcatacattcgtccgtgcagctctcggagtttcatatcaaatactttctttaccaaatcctgtgtgggctaaagtacatacacagtgcagatgtcatccaccgagatttgaagcctgggaacatattgtgcacattgaatggctgtttgaagatctgcgattttggtctcgctaggggtattcatgccggatttttcaagtgtcattccactgtgcagccccatataaccaactacgttgctacaagatggtacagggcgcctgagctgcttctttccaaccaaccgtatagtaagtccgtagacatatgggctgtagggtgcattcttgcagaattctatgctcgaaagcctgttttcatggggcgtgactccatgcaccagatatttgaaatcatcaaagtcttgggtactcctgataaagatattctgatcaagtttggcaccattaaagcttggaatctaggcaaaaacagtaataaccctgtatataaaaaaatcccatggtccaacattttcccctttgcctcgcatgaagcaatcaatctcatagagtcattacttcattgggactcaacacataggttaaacgtggaacaagctatatcacatccgttcctaaacgaggtgcggaagccagacgacgagcctgtttgccttcaaggtcctttcgacttcacctatgaatccgagttgaattcaatgtccaaattaagagactacttggttgaagaagtgaaaaatttcaaaaccgatttgtcctcctcgtctttataa

SEQ ID NO: 78986 - DNA, 1017 bp, Saccharomyces pastorianus
atggatgcaatatctgatccaacgtttaagcatgctagatcaagaaaacaggttactgaagaatcaccatctttgcttaccgttattatagaaattgcaccaaagttatggacaacttttgatgaggaaggaaatgagaaaggaagtataataaaggttttagaggcattgatagtatttctcaatgctcacttagcgttcaatagcgccaacaaagtagcagtcattgctgcatactctcagggaatcaaatatttatacccagagagcacatctgctctaaaagcctctgaatctgaaaataaaacccgtagtgatcttaagattattaactcagatatgtatagacgttttagaaacgttgatgagacgctagtggaagaaatatataaactatttgagttagaaaagaaacaaatcgaacaaaatagtcaaaggagcacgctagcaggtgccatgtcagctgggctgacttatgtaaacagaatatcaaaagagtcagtaactacctcattaaaatcaaggctacttgttcttacgtgcgggagtggcagtagtaaagatgaaattttccaatacatccctataatgaactgtattttttccgcaacaaaaatgaaatgtcccattgatgtcgtaaagattggtggttctaaggaaagcacgtttttacagcaaacgacggatgccacaaatggcgtttatttacatgttgaatctacagaagggctaattcaatatttagcaactgcaatgtttattgatccgtcgttaagacctataattgttaagccaaaccatggatctgtagattttaggacatcatgctatttaacagggagagttgttgccgttggattcatctgttcagtttgcctatgtgtcttatcaatcataccgcccggaaataaatgtcctgcttgtgattctcaatttgatgagcacgtaattgccaagttgaagaggaaaccagttgttccaaggttgaaagcccaaaagaaggtgacgaaaccatga

SEQ ID NO: 78987 - DNA, 387 bp, Saccharomyces pastorianus
atggctcataaattctataggaattatcaacccaataacctcatcgctaattcaaaagtagcaaaagtggcaccattggcgggagcagctcttagcatggtaggaccaaaccctttgaaaaaagcgcctatccctccattggcatataaagtcttggctacactggaaatagaattaccaaatttaggcttttgtaaattatccgtttgcatgacagacttgatgacatctaatggatataccatcaaccataaggcagtgccagacaatgctccaaaaatacaaagtttccatgcaggaatgtcctttctctctagtccacgtcttttgttcatttggttagcaatcaacgcttcatacactaagaaatatgtgccacatccatga

SEQ ID NO: 78988 - DNA, 771 bp, Saccharomyces pastorianus
atggatttcacaaaaccagaaactgttttaaatctacaaaatattagagatgaattagttagaatggaggattcgatcatcttcaaatttattgagagatcgcatttcgccacatgtccttcagtttatgaggcaaaccatccaggtttagaaattccgaattttaaaggatctttcttggattgggctctttcaaatcttgaaattgcgcattctcgcatcagaagattcgaatcacctgatgaaactcccttctttcctgacaagattcagaaatcattcttaccgagcattaactacccacaaattttggcgccttatgccccagaagttaattacaatgataaaataaaaaaagtttatattgaaaagattataccattaatttcgaaaagagatggtgatgataagaataacttcggttctgttgccactagagatatagaatgtttgcaaagcttgagtaggagaatccactttggcaagtttgttgctgaagccaagttccaatcggatatcccgctatacacaaagctgatcaaaagtaaagatgtcgaggggataatgaagaatatcaccaattctgccgttgaagaaaagattctagaaagattaactaagaaggctgaagtctatggtgtggaccctaccaacgagtcaggtgaaagaaggattactccagaatatttggtaaaaatttataaggaaattgttatacctatcactaaggaagttgaggtggaatacttgctaagaaggttggaagagtaa

SEQ ID NO: 78989 - DNA, 477 bp, Saccharomyces pastorianus
atggtgacagggggaatgtcaagcaagtgggatcagaagggtatggacattgcctatgaggaggcggccttaggttacaaagagggtggtgttcctattggcggatgtcttatcaataacaaagacggaagtgttctcggtcgtggtcacaacatgagatttcaaaagggatccgccacactacatggtgagatctccactttggaaaactgtgggagattagagggcaaagtgtacaaagataccactttgtatacgacgctgtctccatgcgacatgtgtacaggtgccatcatcatgtatggtattccacgctgtgttgtcggtgagaacgttaatttcaaaagtaagggcgagaaatatttacaaactagaggtcacgaggttgttgttgttgacgatgagaggtgtaaaaagatcatgaaacaatttatcgatgaaagacctcaggattggtttgaagatattggtgagtag

SEQ ID NO: 78990 - DNA, 420 bp, Saccharomyces pastorianus
atgaagtcatgtgtgcttagcaattacgtagagggattagaaataatagtgtgcggttatcggaaccggctcttgttcccgtttagagcaacccaggtgcaggcgtactttaaagtgttttctttcttttttttcctgctacttacgctaggagctgccgcagctgcaaagccgacgtcggagaggcaggtgatcttcggctcggccgacaaatcccctggatatcattggcctgtcgaggtatcggccgcgtggaactaccgggaattactatgcaaaacaattggaaatctggtaggaaaaccttgttctagaacttggcgattgctgacaaagaagaaaagggcctcttgttgctgcctcttttgttgttcttcctcgtattgtcttgccggtgttctttgtgtcttatgtgtgtag

SEQ ID NO: 78991 - DNA, 1107 bp, Saccharomyces pastorianus
atgaatcctaaatcctctacacctaagattccaagacccaagaacgcatttattctgttcagacagcactaccacaggatcttaatagacgaatggaccgctcaaggtgtggaaataccccataattcaaacatttctaaaattattggtacgaagtggaagggcttacaaccggaagataaggcacactgggaaaatctagcgaagaaggagaaactagaacatgaaaggaagtatcctgaatacaaatacaagccggtaagaaagtctgagaagaagcaactacttttgaaggaaatcgagcaacagcagcagcaacaacagaaagaacagcagcagcagaaacagtcacagccgcaattacaacagccctttaacaacaatatagttcttatgaaaagagcacattctctttcaccatcttcctcggtgtcaagctcgaacagctatcagttccaattgaacaatgatcttaagaggttgcctattccttctgttaatacttctaactatatggtctccagatctttaagtggactacctttgacgcatgataagacggcaagagacctaccacagctgtcatctcaactaaattctattccatattactcagctccacacgacccttcaacgagacatcattacctcaacgtcgctcaagctcaaccaagggctaactcgacccctcaattgccctttatttcatccattatcaacaacagcagtcaaacaccggtaactacaactaccacatccacaacaactgcgacatcttctcctgggaaattctcctcttctccgaactcctctgtactggagaacaacagattcaacagtatcaacaattcaaatcaatatttacctccccctctattaccttctctgcaagattttcaactggatcagtaccagcagctaaagcagatgggaccaacttatattgtcaaaccactgtctcacaccaggaacaatctattgtccacaactacccctacgcatcatcacattcctcatataccaaaccaaaacattcctctacatcaaattataaactcaagcaacactgaggtcaccgctaaaactagcctagtttctccgaaatga

SEQ ID NO: 78992 - DNA, 900 bp, Saccharomyces pastorianus
atggactgcaagatattggtgttaggcgcaggtggtctaggatgcgaaatcctgaagaatttgacaatgttaagctttgttaaacaggttcatattgtagatatagacacaatcgagctaaccaaccttaatagacaatttcttttttgtgataaggacataggcaaaccgaaagctcaagtggcagcccagtatgtaaacacgcggttccctcaattggaagttgtggcgcacgtacaggacctgaccactttgcccccgagcttttacaaagacttccagttcataatctcggggctggacgccattgaacctcgtcgcttcatcaatgagactctcgtgaagcttaccttggagtccaattatgaaatttgcatcccgttcatagatggtggaacagaggggctcaagggacatgtaaaaacaatcattccaggcatcactgcatgctgggagtgctccattgataccttgccctcgcagcaggatactgtgccaatgtgtacaatcgccaacaatcctcgctgcattgagcatgttgtggagtatgtctcaactatacaataccctgatttaaatattgagtctacggcggatgtggaatttctgctggagaagtgctgcgaaagggctgcccaatttagcatctcaacagaaaaattatcaacaagttttatcctgggtataataaagagtatcatacctagtgtaagcactacgaatgcgatggttgcagcgacatgctgtacgcagatggttaagatttataatgatttaatcgacctggaaaacggcaataatttcactttgattaactgctcagaagggtgttttatgtacagtttcaagttcgagcggttacccgactgtactgtttgttcaaattccaattccaactag

SEQ ID NO: 78993 - DNA, 558 bp, Saccharomyces pastorianus
atgcaggctaaattattgtttaccagactaaactttagacgtccctccacaactttacgccagtttcccctaacatgttttttatttcatagcaaagcattttactcggatctggtcactaaggagccgttgatcacaccgaaaagaataataaataagacgcctgggttaaacttatctatttctgagagggcttccaacagactagctgagatctaccgcaatagtaaggaaaatttaagaattagtgtggaaagtggtggatgtcacggtttccagtacaatctaactctagaacccgctaccaagccagatattaagaatgatgtcaaagacaaggagttttcagacgaccttgacgatgatgattccaaggatataatatacgtgttacccgaagataagggtcgagtgataattgatagtaaatcactaaacattttgaataacactacactgacatacactaatgagttgatcggttcttcgttcaaaatcatcaatggtagcctaaaaagtagttgtggttgtggaagtagttttgatattgaaaattaa

SEQ ID NO: 78994 - DNA, 636 bp, Saccharomyces pastorianus
atgcaaaacggcacagaagacaaaagcaatattcctgctcgtagtaatgatgatgtattgccgccgttagccgtcaggcttactatgaaagtaatgcgattaattttcatcggaaaaatgtttgaatattcatttgtaccctttcccccatttagccttttgacatttgataataatgtgggctggttcatagcatattcagcgatcgtttctatttgggggtttgctgtgtggatggaaagagcatatagaaataagattaatctacagcctccaagatgtacgaagataatatgctctcgctgcaatacaagaataaaatcccctaagtggttcaaatataaaaattggttatattttttcctattatacgtttctctaaccatttctaacttaagaattcaactggccttttttataacagaaatgagtcgtcagggtataagcgttcctggaatgaaggaaccagacaacagagattattcagcgcttatcatgtcaacgcgaattattggtgcattaatccattacatgacggctcatttattcaaagagtattatttacataacggcccactagaaaagaatgatagaacttctaccgatgagaagacatcagagaatgaaacgctatag

SEQ ID NO: 78995 - DNA, 1083 bp, Saccharomyces pastorianus
atgtcgagctcctccaaggcttctgcaagttcatccttgtcaagcacagccacctcttcaacttctgcaactagaggcagcgacggatgtgttgtttgcgattcaactgcatcatgccctgtttgcgcttcaggagaatattgtgttatgacttcattaacatgtgacaagtgcccatccacatactgtgcgaaacagtccgattcacaactgagtagtttatcttcctcctcctctagttctagttccagtaattcaaatgagaaaacctcgttgattgtggggttcaccgtgggtattgtaggtggtgcgatgcttattgccttggtggcgttgtatttcatcaacaagagatattggaagcccaaaaggcaaaaaaataaagctttgaaattggaagaggcatcgcaaagttacgggaatgaagaggaatacttcgacgatgaagacgatgatgatgaagacgatgaggatgatggcggtatgagaaaagatgaaagtcacactctgttcaatacgtcactggtacctccaactctcaacgtgccgggaaacagaagttcagcatctaccactcgtacaagggcttctaatattttgcctattgcctacattcctggtgtgacaagcggtttgagtaccgacaaactgcaatcaaaactacgctcgagctctaagagacaaaatgcagctggtgatatcaggtcacatataaccttaggttcttccatcttggatggtctggatgacgaagatgacgagcataaccaggtactcaataaggacgcagacgataacctcataactgctattcgtgctaaacctaaactggttcaaatcgcagaggaagagagtgataaggagattcaggacttggatgtcattgaagaacagacagaggcggatgatctttcacacatggcaaaaagcgaggcaagccatggtaataacgacgaagatgacgatgaagaaggaagttttatactggacttggaaattccagaatcgatacgcgagagcacccagggcagtcgcactgagagcccgtttgaggacaagttcgaaatacacgatgaacgataa

SEQ ID NO: 78996 - DNA, 375 bp, Saccharomyces pastorianus
atgaaatacaacgccaccaaggcaataagcatcgcaccacctacaatacccacggtgaaccccacaatcaacgaggttttctcatttgaattactggaactagaactagaggaggaggaagataaactactcagttgtgaatcggactgtttcgcacagtatgtggatgggcacttgtcacatgttaatgaagtcataacacaatattctcctgaagcgcaaacagggcatgatgcagttgaatcgcaaacaacacatccgtcgctgcctctagttgcagaagttgaagaggtggctgtgcttgacaaggatgaacttgcagaagccttggaggagctcgacattttttgtttgattttcagaaaacgaacgtaa

SEQ ID NO: 78997 - DNA, 372 bp, Saccharomyces pastorianus
atgtcaggacttctcttgatatgctcggctctgaaaagagtagttctaaaaataacagcggtggtatgttccgtattttccataagagtgctaattttggcgacaaaaatcaagaaaacgtgccacgagtgtgggacacacttagaaataatttgggaagggaaatttatcttttgcaaggaagattcaaaaaatggactacaaagcatcaaaatcttaagaagggccaaccttgtaaagatgaagacgccgttaccgttcccttaccatcatctgatccgggaaaggaaacacagttggaaactaaactctgttttgtgcccgaaccaggtgatcagcctttggtacaagcataaccgtgtaaaaggttaa

SEQ ID NO: 78998 - DNA, 432 bp, Saccharomyces pastorianus
atggctagtgttttgttgcctcaattgcgtacgggatggcatgtggatcaggctattgttaccgagactaaacgacttgttgtcattcgttttggtcgcaaaaatgatagacaatgtatgatcatggacgagttgttatcttcgattgctgaaagagtaaggaactttgcagttatttatttatgtgatatagatgaagtttcagattttgatgagatgtacgagctgacggatcccatgacagtaatgtttttctaccagaataagcacatgatgtgtgattttggtacagggaacaacaacaagttgaactttattgtagacgacaaacaagaaatgattgacatattagaaactatattcagaggtgccaggaagaacaaagggctggtggtctctccatacgattataatcataagcgtgtttcataa

SEQ ID NO: 78999 - DNA, 1740 bp, Saccharomyces pastorianus
atggatgaaaacggtacagtaaagcctggctatgaattaaagggactcaattcgggaaattcgaggtcaaatatggataaggatcccatcgttagcaaatttcatagggctggtctcaatgattctgcagacgaggaagatactgatatcaatggtaatcgcaacactagctggataacttcaatgattagtgaagaaaaacgcaaggtggagggaaaatctatgctgaatgatgaggaagatttgcatttatccaaagctactttgaacaaatgcgatgctctagttaagatattagcggatattatcaagctagagtttgttattcaccaatcatggtatatcagatcccttcacaagagtgtcttaattcaatttgaagtagaaacgtctggtggaaataagaatagcgccggtgatagcggcgacgatgatgatgataatcataatggtaatctggacgatagcttttataaagatttaagcttaaaatgcatcaaaaaatgcgagaagtcttcccttgcacttgagtcgctgtcaagggacattgaccaaattagagatttcataatgtccaatacaatagaagacaacagggttgacaggcttttgcagaattcgatgaccctgttattagagtgttggatctactctatgaagagattgcgccgtctaaggatgaagattgcaggtatctttgttaggtccaaacttttgcttattgatcatgaattagtgaccatatggcattttttacaggagcaaaacgagcacgaaacggttaataatgagaacgaactgaaattggcagaaacaataaaatcatacagagcgttcattaagatatttattcaacaattggaggactccgaatcgggatctccatcctcctctttgtttgaagaatgtttacacgtttttttggatatagaatcgatgtacaactctttaaacctgaattggcttttgaacgaaaacaaagcattacaagaaagactactatcaccatcgtcgacatcggagaacgatcatactaataaccttcccgttattgatgagacaaaggaaatcgaagatatcagctcatttgtcaatagcattgtggatgcatccatgttgacacatgatttgactcctattaactcatcagatagcgacaatttatcaaacggagaaatcgatcgtctagatggaagaaggttatcctcttccacgtcagatatgtcattgatgatgcaaaggacttctctgcagaaacaacttcctagcttattaactgccttcaacaacgcaagaagactagaacaagaattgcaaaacgcatgcaaagtaaacgataacaaacatagcacgaaagatactgattcaaatatacgacggaatgaacatgctatgtcttcaagtgtatcctccatcatctcccaaaactccacattagcatcaccgtctcctccgatgtcatcgtcctttatatccacggcgccatcacaatcaagttctcgtatgagtacattaccactgtctccttcctcttcattattggaatcacaatcgcaaacgctgaagaacaatatgtcgcaatggttgaaccaatcgcgatctggcctcaacggcacaaaacttattccaacaaaccacattgggtttcacagcaatgttctgaatactttgtatggtatcggtggtggtccggtatcgaaatcttataaatccaatcaaccttcttcacaaaatacttga

SEQ ID NO: 79000 - DNA, 1347 bp, Saccharomyces pastorianus
atgggcgtagaacacatgagaggctttagtaatgagataatcctgaagagaacgttgactttatccgatttcaccttacgttaccataaaaggggcatcacagctttgcaggtcatcaaagcaccgtcagtttcgaatgtgccagtcttgttatccggtgataactacggttatttcgttatgtgggacctggtgaccaagagaccgattacacatatggaaatcgagggcaactcgcacattatagcgttttggtgggtggaaactaccaatgtgctgtacattctttcgaaagactccatgctgcgaatttttgagcttgattcatctacacaacgatctatagatttagttagaaagcttagccaagccaataaaacggatcatttacaatggactaaaatctatgaaatgcccataaacacactgaattttgcgaatttcatcatcgaagctgaagtgaaaccaaccaaagataataaaagttatagattggtttgctgtcatactgatgattcggaaactatcgatatatatcagataatagaagactccacatttaaattgaaaagaccattcaataatattaatttccccagattcttgaagcagcagaattttttaggaatttcgaaagactccaaattcggtatcataatgagatttgctaaattaaacgatgtcatatttttaggttatgaaaatgggtttgtagtcggatttaaaattacttttgatgaaggccttcaaagggacattgcagaactggtccatgtttctaacgatcattatccgaatccaatacttgatatgtgtgttagcggggatgaactttatagttgttcaacagacgatttcataaccaagtacaaaattccagtgaacttacaacttgagacgaaataccttagagatgatgcgcttttgataaaatgcccaagctcactgagagtcagtgagccatcaaaagtacatcttcccttgaagaatattggtcatattgataaagtaaaagacgattacttagtcgtgagtagttggtcaggtatgaccattgtttataatatgcggacttcagaagtggagcaaacttttgtgaaatcaaagaacaacctggtcgtgagtgatagctctatgggagacctaacaaacggtagcggctcaaataccgaatccagctcgaaatcccataactataaagtgggagccatgacatgtttggaatcgtttgatgtgcagtcagatgggttgaggttaggacaacttagacgtattaaagcgctggcgaaatgtaactggtgtttaattggatatgaagatggtaccataaagctcaataaaatataa

SEQ ID NO: 79001 - DNA, 1038 bp, Saccharomyces pastorianus
atgatgactagggagagcatagataaaagagcaggaagaaggggtcctaatctgaatattgtgctgacgtgtccggagtgcaaagtctacccaccaaaaatcgttgaaagatttagtgaaggggatgttgtatgtgctctatgtggtctagtactatcagataaactggttgacaccaggtcggagtggagaacgttttcaaatgatgatcacaacggtgatgacccaagtcgtgttggtgaggcttcaaatcctcttttagatgggaataacctatctacaaggatcggaaagggtgaaaccacggatatgagattcaccaaagaactgaataaggcacaaggaaaaaatgtgatggataaaaaggataatgaagtacaagctgcatttgctaagattaccatgctatgtgatgctgctgaattaccgaagattgtgaaagattgtgccaaggaagcatataaactttgccacgatgaaaaaactttgaaggggaaatcaatggagagtataatggctgcatccatactgattggttgcagacgtgctgaagtggcaaggacttttaaagaaatccagtcattaatccatgtcaaaactaaagagtttggtaaaactttaaacataatgaagaacattttaagaggcaagagcgaagatggtttcttgaagattgataccgataatatgagtggtgcacagaacctaacttatatacccaggttttgttcgcatctgggcttaccgatgcaagtcactacttctgctgaatataccgcaaagaaatgtaaagagatcaaagaaattgcaggtaaatcccctattactatcgctgttgtttccatctatctaaacatcctgctctttcagatccctattaccgcagcgaaagtgggccaaaccttgcaagttactgaaggtaccatcaaatctggttacaagatactttatgagcatagagacaagcttgtggatccgcagcttattgctaatggtgtagtgtctttggatagcttaccgggcgttgaaaagaaataa

SEQ ID NO: 79002 - DNA, 303 bp, Saccharomyces pastorianus
atgagaagtgaaacaggcgtaagcattaaaaacccaaggccatctcgtcctttttcttgtattaggcgtaaaggagatgttgaaaatattaggaaaagtgatatagggaacgaaaagaaaatagacgctaagttcaacaggcttcagtataatctatattacaagcctctctcgcaccacaaggccggtttattgtacaaagacctcttcttcagaagctgcttctcttatactacctgctcattagactttcagggtaaaaggcaccaagtggaaagaaaggcagtagatatagtactttga

SEQ ID NO: 79003 - DNA, 357 bp, Saccharomyces pastorianus
atgtctccatcagaatccttcaatagctttagcttgttttctacattgtcaatgttcaagtttctcacacaaataactttttcacgcccatttgtgtattctgccctcaacaaaggatgtccagacttcctcatcacttcaaactgtatccatgggaactcctggccccatttatctaatctctttgaagtcaaaaatttcctcatgccttccgaagaccctccccagttacagaattgcaaagtaatctttctgcatggaaacacgaatgctccaactccattacgacctatggaatttcgtgcaatagctttcacaaccatttctccatatattcgtgtctgtgtatctacttag

SEQ ID NO: 79004 - DNA, 423 bp, Saccharomyces pastorianus
atggttgtgaaagctattgcacgaaattccataggtcgtaatggagttggagcattcgtgtttccatgcagaaagattactttgcaattctgtaactggggagggtcttcggaaggcatgaggaaatttttgacttcaaagagattagataaatggggccaggagttcccatggatacagtttgaagtgatgaggaagtctggacatcctttgttgagggcagaatacacaaatgggcgtgaaaaagttatttgtgtgagaaacttgaacattgacaatgtagaaaacaagctaaagctattgaaggattctgatggagacattttacgcagaagaacaaagaatgataacgtggaaagcttgaacagtagtgtgaggggtatatggtcgcctctgcatgctgcgaaaaggcatagaatttag

SEQ ID NO: 79005 - DNA, 528 bp, Saccharomyces pastorianus
atggacggccttagctttgtagataaagggaaaataccagatggttacaaaaatgaaatagatcaattagtaaagaaggaatttgcgaatataaaaagagagcctgttcatcccgaaatacgaggtatacttgcgaagagaaagggggccgataatagtgtttctacgcttacaaatgcattgtacaccgaatacttgaaacaacgtaataacaaaaaaaggcgaacaccggattttaatgacgacgatgatactttatttttggaagagtatagaaggaaatacccgaggattgatacttccagatacataccgaacgagttttccgaagttagcttgttaggaattgtagattcttatttaaaacatcaggaaatagttttggatacacttctaccgcaaacggtatcgaaccaatggagaattaataatgattatattcgtcaaacgtgtactatagtggaagaaatgaacatccagcagaggaaacaaattaacgatttggaaatatacagaaagaggttataa

SEQ ID NO: 79006 - DNA, 864 bp, Saccharomyces pastorianus
atgcaagctattgccgatagtttcagtgtaccaaacagattggttaaggaacttcaatatgacaacgaacaaaacttagagagcgatttcgtaacgggcgcctcccagtttcaacgtttggcaccatcgcttacggttccaccaattgcgtctccacagcagtttttaagagcacacacagatgattcacgaaacccagactgtaaaatcaagatcgcacatggtactacaaccttagcatttagatttcaaggcggtattattgtggcagtagattctcgtgccactgccggcaattgggttgcttctcaaactgtgaagaaagttattgagatcaacccatttttattgggtacaatggctggtggtgcggcagattgtcaattttgggaaacttggctaggttctcagtgtaggctgcacgagctgagggaaaaggaacgtatatctgtcgcagccgcatccaagattttaagcaatttagtataccaatataaaggggccggtttatcaatgggtactatgatctgtggttacactaggaaggagggcccaaccatttattacgtcgactcagacggtacaagattaaaaggtgacatattctgcgttggttcaggtcaaacatttgcatatggtgttctagactctaactataaatgggatttatccgttgaagatgctttatatctaggtaagagatctattttagctgctgcccatagagatgcttactctggtggttctgtaaatttatatcatgttaccgaggatggttggatatatcacggtaatcatgacgtaggtgaactattttggaaggtcaaggaagaggaaggatctttcaacaacgttattggctaa

SEQ ID NO: 79007 - DNA, 2586 bp, Saccharomyces pastorianus
atggaagggcaaaaatcgaatgcatcatgggagagctcgatcatcgagggccaattgtctaaaaatctagcaaggtacaccttgttattagacaaattatcgacactatctcaaatagacaagctgtctgaagtgatagccaatgattacgcaaaacaatctaaacaattaaatgcatttgtgcaacagtcgcaatcatcgctcaacaaagagtcccggaaattagaattacaaagaactaaccttacgactactttgactcagtttcatgagactgtggccaccatttcttcttcgaacgcaagagcaaaagctatacatgacgatattgaaactgtagatcaggaacgcgctttggtcaacaaaacgttacaatttgtaaaagacgtcaggacgctaaagaataatatttcactggcgcattctgctttagaaacaaaggattacttagttgctgcgacagcaatcaatgaaattagaagccttccggataaaaaacttattgtatccgagtttgccaagaaagttgtgccctcgagtgaaattcccgaagaaccagccatactaataaagaattggtgtaaggaactgacaagtttatttcaggagcaattcatggaagcaacaagaacacaggatattaaagagctaaccttaatgttcaaaatgttccctatgattgggcaggacgtacttggtttagacctgtattccaaatatgtctgtgatattattgcggacgaaagcaggaaaattatgtcgaattctatggaaaacagcaccaagtttcaaggatttttttcacaagtactattacatctttttaaaattgtatcgaccatcataaatgatcattcaaaagtcatcgccacgtgttatggaaaaaagcacatggtgcatgtcatggaaaaagtagaaaaagaagctgatcttcaagctagtttgattctagatatttttatggagacaaggaaaatagaaaggactatacatgatataaatgaatgggaacattcacaaaagaatgaagatgtgaatataggcagtaatcagtcggatatcgaaacagacggagaaacggaaaagagctcaattatatccattcatgacttggcattattgataatggaattttctcaaatacttcaaaattggtccatgtattctagattttattcagttaaatggaatgaatttagcgatttgcatccgcatgtattgcaaccacctccaccaatagcagatggtaaatttgccttaaagttaaagcaagataaggtctttgatgagtttcaggtgtttgtgttgaaccatctgcagagatcattcagaaatagtatttcactagaagaattaccgtcactgaacgatcttataactgctgttcccctcaatgaccacgataacatttcataccctgtaacatctgttttagatgacttaattttattagttcggaaaaatctgatatcagtggttaatactggccagtttaagctcttagcaagttttttgaacgagttggtaaaattttttcagaaccgatttctggtaaaatttatgcaaaacaaatttaagttactacaatcgaaactagcctccaatgtatctttgaaaagatacattccaaaaggtgaggagcaatctgcaacatcaagatcggtttctccacctgcaaataagttttctccgctaagcaggttcacttttagaggggcagcagctagcgctttgacaaatattcaatcaaatttacaagccgtagttgcagaggacgaggattccattcttgcgttgcaccattatttgatatatctgaacacgttgtacttgagtaaagtatacgttcacaggctgttatccatagaaatattagaagacgattcgcaaaggattttgagagacaatttcccttttgacaatgatgcagcgcagttacagaatttaattataaactcagaaaaattagtcctggaacaaacagataagctaagcaaatgggctgtcaaatacttgttccaaaatatcctacaaaatagggttcggaacttattgggaactgtttttgttaattcagcctcatcaaattcctcaacgtccaatcaaaaaaatgtgtctcgcgattattctgcaggttcgaaccaaaagaattacatcacaagcatagaagatttcgaagatttgtcgcaaattaacagtttcaatagcaaatggaaccaattgattatcccttacaaaaatattcttcacaacgaagcatatgcagagttgctatctgtcatagtcgactacatcgtaacaacattggagcaaagaatatggactctagaattcaatgaacttggtgttacgaaattagatagagaactgagccttttcatcggcaatatgtgtggcttgaactataatctcagagagaagttcttgaaattgacacaaatcgtgttgcttctcggtttagatgatgacaattttgatttgactacaggtgatatcaaggatgacttcaatggtactttcgattgggtgataaactctcaggaaagaattaaagctagaaatatgaagattgatagaatacagtaa

SEQ ID NO: 79008 - DNA, 627 bp, Saccharomyces pastorianus
atgagcctaattcaccccgatacagcaaaatatccttttaaatttgaacctttcctcaggcaagagtattcgttttcactcgatcctgacagacctatttgtgaattttacaattctagagaaggccctaaatcatgtccgaggggaccgttatgtccaaaaaagcatgtgttaccaatatttcagaataaaattgtttgtagacattggcttcgagggttgtgcaaaaagaatgaccaatgtgaatacttacatgaatacaaccttcgaaaaatgcctgaatgtgtcttcttcagcaaaaacgggtactgtacacaaagtccagattgtcaatatctacacatagatcccgctagcaagataccaaaatgtgaaaattacgaaatgggattctgtcctctggggagttcttgtcctagacggcatattaagaaggttttctgtcaaagatacatgaccggattttgtcctttagggaaggatgaatgtgatatggaacatccacagttcataatcccagatgaaggtagtaaattaagaattaagagagacgatgagataaataccaggaaaatggatgaagaaaaggaaaggcgtttaaacgcaattataaacggtgaagtttga

SEQ ID NO: 79009 - DNA, 213 bp, Saccharomyces pastorianus
atgaaatcactccatgatagtttaagtgttacagacattaagagaagtcggctgcaaatttccatgcagacactttgtcccatcttggaggataccctacagtgtaaaagcctccttagcttagtggtagagcgttgcacttgtaatgcaaaggtcgttagttcaattctgacaggtggcaaaattttttccctaaagttaacacttatttag

SEQ ID NO: 79010 - DNA, 885 bp, Saccharomyces pastorianus
atggataattttgaaagtactgctgaaggaaatttaagtataggaaacaaacgagtatacgaactacgaaaaagaaacttccaaagaaatttggtgaataatttgagctttctcgggtatgttttaatatcattggaatatatcaagtatgatcgtaccgtctggacacttataacaagagcaatagtgcaatctctcataagttctccttttccaagtgatgccaagttacgtaggctagcgaccatcggtgcagataataacacgacgggggttgcaacacttccaggcggaagatctatcaggtttcccggaatgtttggaacagaaatgctttataattcttctagtgaagctgagcaacaagaccatgatgataccgctattgtgtccatgaaaaagcaaatccggaagtttttatttcatggttgcttatcgttgaatatgcttttcattatcttaacaatcctattcccaattgatttttttgaacccctgagtggtagcgagccagtagacgatggccctaagaatactccctcacccttttccaattcagatggtctacttttgggtgagagaagaggtgggctttttctacagatgatcggagaacggctaccaaagagcaacttttccggcaatcttggattagtaatgttcgaatttagcatacttattgtacagtttactttattttcactaacatgtgttgtattggcagatttagattttgaagagccagaaagactagaacctgtaaatagtgatggctacgatggctctgtaatagttgcacgaataccattaaataaaaccatgaatgccattttaaatgacggcaatattaatgacaacaatgagaatgctagcaattctgtctaa

SEQ ID NO: 79011 - DNA, 1008 bp, Saccharomyces pastorianus
atgtcaaatattgtgggtattgaatataaccgtgtaacgaatacaacctccacggattttcctggtttctcgaaggatgcagaaaacgagtggaatgtggaaaaattcaaaaaggacttcgaagtcaatatttcgtcattagacgcaagagagacaaatttcgacttgataaacattgacacatcgattgcgaatgcctttcgtcgtataatgatttccgaggttccatccgtggctgctgaatacgtctatttttttaacaatacatccgttatccaagatgaggttttggctcatagaataggtttggttccattaaaagttgaccctgatatgctcacatgggttgatagtaatttgccggacgatgaaaagtttacggatgaaaatactatcgttttgagtttgaacgtgaagtgcacaagaaatccagatgctccaaagggatctactgatccaaaggaactatataacaatgcccatgtctacgcccgtgatttgaagtttgaaccacagggcagacaatctaccacttttgctgattgtccggttgttccagctgatcctgatattttattagctaagctaaggcctggtcaagaaatttcgttgaaggcacattgcattttaggtatcggtggtgatcatgctaaattttcaccagtttccaccgcttcttatagattattacctcaaatcaatatcttacagccaatcaaaggtgaaagtgccagaagatttcaaaaatgttttcccccaggtgttattggtattgatgaaggttcagatgaagcgtatgtcaaagatgctaggaaggatacggtttccagggaggttttaagatacgaagagtttgctgataaagttaaattaggaagagtgaggaaccactttattttcaacgtagaaagctctggtgccatgacaccagaagaaatttttttcaaatctgtcagaattttaaagaataaggctgagtatttgaaaaactgtccaattacccaatga

SEQ ID NO: 79012 - DNA, 1695 bp, Saccharomyces pastorianus
atgttttcacgaagtgatcgagaggtagatgatttggctggtaatatgagtcatttagggttctatgatttgaatattcctaaacctacttctccacaggcgcaatataggcctgctagaaagagcgaaaatggaagattaactcccggacttccaagatcatataagccgtgtgattcaggtgatcaagataccttcaaaaatcgcatttcattgaatcactcaccgaagaagctacccaaggattttcacgagcgtgcttcccaaagtaaaacccagagagttgttaatgtatgccaactttactttctcgactattactgtgacatgtttgattatgttattagcagaagacaacgtacgaagcaggtgctaagatatcttgaacagcaaagaagtgtcaaaaacgtttctaataaggttttaaatgaagaatgggctttgtatttgcaaagagaacacgaagtactgagaaaaaggaggttgaaacctaagcacaaggattttcagatactgacacaagttggacagggtggttatgggcaagtttatcttgcaaaaaaaaaagacagtgatgaaatttgtgctttgaaaatattaaacaagaaacttttattcaaactaaacgagacgaatcacgtccttactgagagggacatactaaccacaactagatctgactggcttgtgaagttgctttatgcatttcaggatccagagagcctatatttagcaatggaatttgtacctggtggtgattttcgcacattgttaataaatacaaggatattgaagagcggtcacgcaaggttctatatcagcgaaatgttttgtgccgtgaacgcgttgcatgaacttggttacactcaccgggatttaaagccggagaatttcttgattgatgctacagggcatatcaagctgaccgattttggtctagcagcagggaccgtatcaaatgaaagaatcgaaagcatgaaaatacgcttagaagaagtaaagaatttggaatttcctgctttcacagaaaggtctatcgaggatagaaggaaaatatatcataacatgaggaagacagaaattaattacgctaattctatggtcggttcgcctgattatatggccctagaagttctggaaggtaaaaaatacgattttacagtggattattggtcattgggctgtatgctttttgaaagtttggttggatatacaccttttagtggttcttctactaatgaaacttacgagaatttaagatattggaaaaaaactttaagaaggccccgtactgaggatagaagagcagcattctcagatagaacctgggatttaattacaagattaatagctgaccccatcaacagagtacgatcttttgagcaagttcgcaaaatgtcttatttcgcagagatcaattttgaaaccctaagaacaagttctccaccatttattcctcaattagatgatgaaacggatgcaggttatttcgatgacttcacaaatgaagaagatatggctaaatatgcagatgtcttcaaaagacagaacaaattatctgcaatggttgatgactctgccgttgattccaagcttgttggatttacttttaggcatagagatggaaaacaaggttcaagtgggatactttacaatggttcagaacattcagaccctttttcaactttttattaa

SEQ ID NO: 79013 - DNA, 2664 bp, Saccharomyces pastorianus
atgtcccgtatcattgtcaagggtttgcccgtctatctaacagatgataatctcagggagcattttacaaaaagattacgtcaaaaacattcccatcaagcagttaatggtagtggtccagacctcataacagatgttaaaattcttagagataggaacggagaaagtagaagatttggatttatcggataccgtaacgaggaagacgcttttgatgctgtagagtatttcaatggcagttttatcaacacttctaagatagaagtgtccatggctaaaagctttgcagacccaagagtcccgcagcccatgaaggagaagagaagagaagctctgaaaaggtttagggaaaaggaagaaaaattgctacaagaagaaaatcgaaagaaaaagaaagtggatgaaaataagcacagcaacattgatgacgagattcgcaagaacaagcaattacaagagttcatggagactatgaagccaagctcacaagtcacatcatgggaaaaagttggcattgacaagagcatagaggacgaaaaactaaaacgggaagaagaggactccagcgtgcaagggaattctctattggctcatgcattagccttaaaggaagagaataataaagacgaagcaccaaatttggtcattgagaatgaaagtgacgatgaatattcggctctcaacagaaacagggatgaagatcaagaagatgccggagaggaagaaaagatgataagtattagcaatttgaaggatactgatataggtttagttaatgatgacgctaatagtgatgaaaaagagaatgaaaagaggagaaacctcgcccaagatgaaaaggtttctgacctagattggttcaaacaacgccgtgtaagaatcaaagaaagtgaagcggaaacaagggaaaaatcatcatcatacgctactgaacaaaatgaaagtctcgataccaagaaggaagaacaactagaacctgctgtgccgcaaaagacggacgaagaactggctattgaaaaaattaaccaaactggccgtttattcttacgtaatatcttgtatacctccaaagaagaagatttcaggaaactatttagtccatttggagagttagaggaggttcatgtggctttggataccaggactggtcaatccaaaggatttgcatacgttctatttaaggatcctaagaatgcagtgaacgcctatgttgaattggataaacagatttttcaaggaagactattgcatattcttcctggtgaagaaaaaaaaagccatagattagatgagtttgatttaaagaatatgccattgaaaaagcaaaaggaattgaaaaggaaggcagctgcatccagacaaacattttcttggaactccttgtatatgaaccaagatgctgttttgggtagtgtggcagccaaattgggtctagaaaaatctcaattgatcgatgctgaaaactcaagttcggctgtcaaacaagctttggctgaagcccatgttattggtgatgttagaaaatactttgaatccaaaggtgttgatctgaccaagttttcacagttaaaatctacaaatcaaagagacgataaagtgatactggttaaaaattttccttttgggacaactagaaaagagcttggcgaaatgtttttgccatatggtaaattggaaagattgctcatgccaccagctggtacaatagctatagtgcaattcagggacacaacgtcagcaagggcagctttcactaaactatcgtataaaagatttaaggacggcataatatatctagaaagggggcctaaggattgctttactaaaccagctgaggccgatgatttgataaataacacttctgcaaaagaagaagaaaacccggtagaggtaaaaccttcatcaaatgacttaatggaagcaaacaaggatgtaactgaagggtcatctaatgctcatgatgaagacgttattgatggtccaactgtctcaattttcataaagaatctaaacttctccacgacgaaccaaaatcttactgataggttcaaggttttcactggttttgttgttgcccaagtgaagacaaaacctgatccaaaacatcaaggcaagaccttgtcaatggggttcggttttgtagaattcaggaccaaggaacaagctaatgccgtgatagctgcaatggatgggacggtaatcgacggccataagattcaattgaagttatcccatagacaagcatctcagagcggtaatacaaagactaaatccaataagaaaagcggtaaaatcattgttaagaatcttccatttgaagctactaggaaagacgttttcgaattattcaattcttttggtcaattaaaatctgttagagttccaaagaagttcgacaagtctgcaagaggttttgcgttcgtggaatttttacttccaaaggaagcagaaaatgctatggatcagttgcacggtgtccatttactgggccgcagattggtaatgcaatatgcagaagaagatgcagttgacgctgaagaagagatagccaggatgacaaagaaggttagaaagcaagttgccactaatgagatggctgccttaagaaatgggggcggtagaaagaaactggatgtggatgatgaagaaaacgaaggtttctag

SEQ ID NO: 79014 - DNA, 948 bp, Saccharomyces pastorianus
atggatgttttattgtcgcttcctcaaccggaattatttaagaccacggtgattccgttcttggcaaatcgcaatataatcaagtcggaagcgattctctccaacttgcactcaattttttatgttgctatattctaccatatttggtttctttttggcaaatggatcttattcccacctttggttaaatggaaattggactatgaccaaaaacataacgtcaagaaagatgagaagacaacttcggaacgtcaagctcaacattacaaaaagaagtacacttctttgatcaatcaaagttcagtccacttaatatccctactgcaaagcatagtggtcttgtactactcattgaagttcttgcttgatccaaaagcctcggccgagccctaccaaacctcacactctcgagtgtttacagaaaatcgagacactcaagtcatctgtatttttgctattggttatttcgtctgggatatctatatttccaccatgtattctactttccccttcgttgtgcacggaataatctccaccgtcgtgttttgcatcggattgaaaccgtacatccaatattacgccccagtgttcttgatgttcgaactttccaatccctccttgaactttagatggttcggtatcaaatttctaccccagaaaagcaaattctgctctctactgctgctgttgaacaatttgacgctcatggtcgtcttctttgccgctagaatcgcctgggggtggtttcaaattggaaaactatgttacgacttttaccaggtgcgcaatgaacctggtttcttagtctttgacaccattgttatccttgcaggcaatttcgtcctggacatcttgaatgttatttggttttctaccatggtgtctgtggctgcaaaggtcttgaagaagggggagtctgtagacaaagtcactaagaatgaacaataa

SEQ ID NO: 79015 - DNA, 1236 bp, Saccharomyces pastorianus
atgtcgttggaagccatcgtctttgatagatcggagccagaaaatgtttcggtaaaggtacttgatcaattacttttaccatatactactaaatacgttccaattcacacaattgatgatgggtactcagtcatcaaaagtatgcaggtgagaggtgccccggcaattgcaattgtgggttcgttatctgttttgactgaggtacaattaataaaacacaacccaacttctgatgttgctacgctgtattctttagttaactgggaatctacaaaaacagtgctaaataagagactagatttccttttgagtagtagacccacagccgttaatttatcaaattctcttgtagagataaagaacatactgaaatcctcaagtgacctaaaggcttttgacggtagtttatataattacgtctgtgaattgatagatgaggatttggcgaataacatgaaaatgggtgataatggagctaagtatttgattgacgtgttacaaaaggacggtttcaaggacgaatttgccgttctgacgatttgtaatactggatccttagcaacctctggatatggcacggctttaggtgttatccgttctttgtggaaggattcacttgctaaaaccgacaaggcagactcgggattggacaatgaaaaatgcccgaggatgggccatgtcttcccactggaaactagaccttataatcaagggtcaaggctaacagcatacgagctagtttatgataagattccatcaactttaattactgatagttccatcgcgtatagaattagaactagtccaattccaatcaaagcagcatttgttggagctgatagaattgttcgtaatggggatacagcaaataaaattggtactttacaacttgctgtaatttgtaagcagttcggaattaagttttttgtagtagctcccaaaacaactatcgataatgtaaccgaaactggcgatgacattattgtggaagaacgtaaccctgaggaattcaaggttgttactggtacagtaattaatcctgaaaatggttccttgatattgaatgagtcaggagagccaatcactggaaaggtcggtattgcccctcttgaaatcaatgtctggaatccagccttcgacattactccacatgagcttattgacggaattatcacagaagaaggtgtatttaccaaaaattccagtggtgaatttcaactggaaagccttttctag

SEQ ID NO: 79016 - DNA, 1308 bp, Saccharomyces pastorianus
atgggagagaaccacgaccatgagcagagtattaaaagaaattctatgatttataatgaaaatgagaggcaattgtgcaattcaaacctaaagattcttcaaaataaaagggccctttcaaaaaatgacagctctagtaagcagcaggttcaggattctaaaccaagaagggctttaacagatgtaccagtgaacaataatcctttaagccagaacaagagaatagtagcagagagcaaggcggccaaagtacgaagagaagaaaacattagacctattgttagcgccgttcaaaaaagacagatatataacgatcgaacggcagcagagcaagaagaagaagaagaagaagaaggagaagatgatgatgctgcttcgatagtgaacaaaaaacgcagaatagacgctgaaggagtgagtgaaatagtaggctggcaggacctagattatgttgaaaaagatgatactgcaatggtagcagaatattctgctgaaatttttgcatttttatatagaagagaattagaaacgttaccatcgcacaactatttactcgacaaaacgtccaagtattatttgaggccttccatgagaacaatattagtggattggctggtagaggtgcacgaaaaatttcaatgctatccggaaacgttattcctatccataaacttaatggatagatttttagctaaaaataaagttacgatgaacaagttacaattattggcagttacctcacttttcatcgcggcaaaatttgaagaggtaaatttgcccaaactagctgaatacgcttatatcactgacggcgcggcttctaaaaacgacataaaaaatgcggaaatgttcatgctcacttccttagaattcaacattggttggcccaacccactcaatttcctaaggaggatctccaaggcagatgattacgatccggttaatagaaatattggtaagtttattttagagtatgcctactgctgccaccaattcattcatttacctccatctaccgtaagcgcaatggcaatgtatatagcgagaagaataaccaacagaaacaagaacgagctatggaatggaacactacagcattacagtggtggtatcgatccaatacacgatgaagcgtttcagtctctctgcattgatctagtcaaagacatcgctagttccaaaactcatttagattcattgattttgaagtacaagaaaccaaggtatggctctgtttatttccaaactttcaagtggtgtacatccgaaatgcatagcaactttcaaaatctatttaatcttaagtag

SEQ ID NO: 79017 - DNA, 1719 bp, Saccharomyces pastorianus
atggttatcatcctcctaggtctttgcacattaggttttccaagaacagcattctgtccctccataatgacaaattctacagtgagtattaacacgcctccaccatatcttactctagcttgtaatgaaaaattaccaacagttatgtcaattgctggatcagactcaagtggtggagccggtgttgaagctgatattaagactatcaccgcacatagatgttatgccatgacatgcgtcactactttgactgctcaaactccagtgaaggtgtacggcgctcaaaatataccaaagaaaatggtatctcaaatattagacgccaatttacaggacatgaaatgtaatgttattaagactggcatgcttacggtggatgcaatcgaagtcttgcacgaaaaacttttgcaacttggtgaaaatagacccaagttagtaattgatccagttctttgcgccgcttctgactcttctccaactggaaaggatgtggttagcttaatcatagaaaaaatttctccttttgccgacattttaactcctaacatttcagactgtttcatgttactgggcgagaacagagaagttagcaaactacaagacgttcttgaaatcgtgaaagacctttctagaatcaccaattgctccaatattttagtgaagggaggccacattccatgtgacgatggaaaagaaaagcatattactgacgttctttacttaggtgctgaacaaaaattcatcacttttaagggccaattcgttaatactacacgcactcatggcgctggatgcacactggcttctgctatagcatctaacttggctcgcggttattctctttcccaatctgtttatggtggtattgagtatgtacagaatgccatcgcaattggctgtgacgttaccaagaaagctgtgaaggttggaccaattaatcaggtttacgccgtagagattccattagaaaaaatgctcaccgacgaatgctttacagcatctgatgctgtacctaagaagccaatcgaaggttctcttgacaaaatccctgggggtagcttctttaattatctgataaatcatcctaaagtcaagccgcattgggatgcctacgtgaatcacgaatttgttaaaagagtggcagacggcacattggaacgcaaaaagttccagttttttattgaacaagattatttatacttaattgattatgtgagagtttgctgcgtcacaggtagtaaatctccaactctagaagatctagaaaaggaccttgttattgctgattgcgcccgtaatgaactaaatgaacatgaaagaagattaagagaagaatttggagttaaggacccagattacttacaaaaaattaagagaggtcccgcattaagggcctactgtcgttacctaattgacatttccagaagaggaaactggcaagaaatagttgtagccctcaacccttgtctaatgggttatgtttatgctgtagacaaagttaaggataagataacagcagcagagggttctatttatagtgaatggtgtgatacttgcacgtcttcattttgctaccaagctgtgcttgaaggtgaaaggctcatgaatcacatcttggaaacatatcctccagatcaacttgattctttggtgacgatctttgcaagaggttgtgaattagaaactaatttctggaccgccgccatggaatacgaatga

SEQ ID NO: 79018 - DNA, 309 bp, Saccharomyces pastorianus
atgttggcgagagtagcggagagtgtatcgtgcggtttaatgggccaggtgaaaactgggttacttctctttgatggcagcggcttctccgataggcttggtgtcatgcggttttacgtctggagcagccgcatctatgttcttgtcttggtcgtccaagctcaactcatccttgacgctcacaatggcgttctcttcttgctgctcttcttccttcataatttcttcttgctccctcaattgtttcaatttttgcttagcggatgcctcatcttccttaacgacgtttactttaacctcatggtatag

SEQ ID NO: 79019 - DNA, 1038 bp, Saccharomyces pastorianus
atgtctgtcgccgatttgaaaaagaacatccacaagttagatactggctatggtttaatgagtttgacttggagagccgagcctatccctcagtcgcaggctttcgaggccatgcacagagtggttgagttatccagagaacgtgggcacaaggcctttttcaacgttggtgaattctatggtcccgattttattaatttgtcgtatgttcacgacttctttgcgaaatacccagatttgagaaaggatgtggttatcagttgtaaaggtggtgcagacaatgctaccttaacccccagaggcagtcacgatgatgttgtacaaagcgtaaagaattcagttagtgctattggtggctacatcgacatcttcgaagtcgcaagaatcgacacttccctatgcacgaaaggagaggtctacccctacgaatcgttcgaagcgcttgctgagatgatctccgaaggcgttattggcggtatttcattaagtgaagttaatgaagagcaaattagagctattcacaaggattggggaaagtttttgacctgcgttgaagtggaactttctttgttcagtactgacattttacacaacggaattgctaaaacatgtgctgaattggggttgtccatcatctgctactccccactgggcagagggttgttgacaggtcaattgaagtccaacgctgatatccctgagggtgactttagaaagtcgttaaagagatttagcgatgagtctttgaaaaaaaacctgaccttggtcaggttcctgcaggaagaaatagtcgacaagcgcccacaaaacaactccattactcttgcacaactggctttgggatgggttaagcactggaacgaagttccggaatacagtggcgccaaatttatcccaattccaagtggctcttctatttccaaggttaatgaaaactttgatgaacagaaaaccaaacttaccgatcaagagttcaatgccattaacaaatatttgactactttccatactgttggtgacagatacgaaatggcgtaa

SEQ ID NO: 79020 - DNA, 1050 bp, Saccharomyces pastorianus
atgtcgcagtacatcggtaaaactatttctttaatctctgtgactgacaacagatatgtggggctgttagaagatattgactctgaaaagggtaccgtgactttgaaagaagttcgctgttttggtacagaaggtcgcaagaactggggtcctgaagaaatttatccgaatcctacggtatacaattctgtaaagttcaacggcagtgaagtcaaggatttaagcattttagatgctaacatcaatgacatacagccggttgttcctcaaatgatgccacccgcttcacaattccctcctcaacaagctcaatctccaccccaggctcaagctcaagcacacgtgcaaacaaacccccaagccccaaagcccgaatccaatgtgccagcagctgtcgctggatatggtgtttacaccccaacttcgacagaaaccgctactgctagtatgaatgataagagcactcctcaagacaccaatgtaaactcgcaaagtagggaaagaggtaaaaatggtgaaaatgagccaaaatatcaaagaaacaagaatagatcaagtaatcgccctcctcaatccaaccgcaatttcaaagtcgatattccgaatgaagattttgactttcaatctaataatgcaaaattcacgaaaggtgattccactgatgtggaaaaagaaaaagaattagaatcagctgttcacaagcaggatgaatctgatgagcagttttataataaaaaatcgtcttttttcgacaccatctccacttctactgaaactaataccaatatgagatggcaagaagaaaaaatgttgaacgttgacacctttggacaagcttctgccagaccaagatttcactctagaggccgcggtcgtgggcgtggaaattataggggaaacagaggaaacagaggaagaggcggccaacgtggaaactaccaaaacagaaataactaccaaaataatagtggcgcctatcagaaccaaaacgactcgtacagcagaccagccaaccagttttcgcaacctccttccaacgttgaattttaa

SEQ ID NO: 79021 - DNA, 408 bp, Saccharomyces pastorianus
atgtacatactgaatgatattcttaatttacatagaaacatcattttaaaattcaacgttggaaggaggttgcgaaaactggttggctggtctgctgtacgagtcgttttggttctgataggcgccactattattttggtagttatttctgttttggtagtttccacgttggccgcctcttcctctgtttcctctgtttcccctataatttccacgcccacgaccgcggcctctagagtgaaatcttggtctggcagaagcttgtccaaaggtgtcaacgttcaacattttttcttcttgccatctcatattggtattagtttcagtagaagtggagatggtgtcgaaaaaagacgattttttattataaaactgctcatcagattcatcctgcttgtgaacagctga

SEQ ID NO: 79022 - DNA, 1233 bp, Saccharomyces pastorianus
atgagtacagccgatcaagaacaacccaaagtggtggaagcgacaccagaagatgggacagcttcctcccaaaattcaactataaacgctgagaatgaaaatacaaaacaaaatcaaagtatggaaccccaagaaacttcagaaaatgcctccaatgatactaaagacccagataacggagaaaagaacgaggaagccgcaatagacgaaaatagtaacgtagaagctgcagaaaggaaacgtaagcacattagcacagatttctcagatgacgacctagaaaaggaggagcataatgatcagagtcttcaaccaacggtggaaaatagggcaagtaaagatagagattcaagtgctactccaagtagtagacaggaattggaagagaaactggaccgtatattgaaaaaaccaaaggttagaagaacgaggagggatgaagacgatttagaacagtacttggatgaaaaaattctaaggcttaaagacgaaatgaatattgcagcacagttggacatcgatactttaaataagagaatagaaactggagatacttcgctgattgccatgcagaaggtcaaattgttgccgaaggtggtaagcgtactgtcaaaggcaaacttggcagacaccattttggataataacttacttcaaagtgtcagaatatggttggaacccttacctgatgggtctctgccatcttttgagattcaaaagtcactctttgcagctttaaacgatctaccagtgaaaactgaacacctgaaggagagtggtttggggagagtagttatcttttatacaaagtccaagcgtgtcgaagctcaactagctaggttggctgaaaaattaattgcggagtggacaagacctattattggtgcttcagataactacagagataagagaataatgcaattagagtttgattctgaaaaattgaggaagaaatccgttatggattctgccaagaataggaaaaagaaatctaagtctggtgaagatcctacctctcgtggttcttcggtacaaaccttgtacgaacaagctgctgcaaggagaaacagggctgccgcaccagcacaaaccactactgattacaagtatgcccctgtgagtaaccttagcgcagtacctacaaacgcaagagcagttggtgttggttccactttaaacaatagtgagatgtacaagaggttgacttcaagattaaacaagaagcataaataa

SEQ ID NO: 79023 - DNA, 153 bp, Saccharomyces pastorianus
atgtttggtctacctcaacaggaagtctccgaagaggagaaaagagctcatcaagaacaaactgagaaaaccttgaaacaggccgcttatgtggctgcgtttctttgggtttccccaatgatctggcatttggtgaaaaagcaatggaaataa

SEQ ID NO: 79024 - DNA, 513 bp, Saccharomyces pastorianus
atgcaagtaaggttattttcccctaccctggtaaagctcttttttgcttcagatattagaagtttatcgccaaaatatctgaagactcggccttgctgttcagcaacgtcttcttttaacctggacgcaatgatatccttatccaaatctccagcatcaaaattgttgtactcgtcgattgttctttccttgagattgtttaaatctttttcttcagcgttcctattatcagttaaaatgtcattagcttcgcttttcaggttctccagatattgctttgcaagcctccttcttttatcggctggattttccccctcgaattcttcttcagattccaatgcgtcttcttcatccgaaacttctagttgttcatcttcgtttgaggatggatctgtgatttcttcgtctactgtgggttttgacggattaacttctcctttggatcttttcctctttttctgttgggtaacatctgacatcttttctagattttctataattttgaaatgctaa

SEQ ID NO: 79025 - DNA, 1722 bp, Saccharomyces pastorianus
atgtcagatgttacccaacagaaaaagaggaaaagatccaaaggagaagttaatccgtcaaaacccacagtagacgaagaaatcacagatccatcctcaaacgaagatgaacaactagaagtttcggatgaagaagacgcattggaatctgaagaagaattcgagggggaaaatccagccgataaaagaaggaggcttgcaaagcaatatctggagaacctgaaaagcgaagctaatgacattttaactgataataggaacgctgaagaaaaagatttaaacaatctcaaggaaagaacaatcgacgagtacaacaattttgatgctggagatttggataaggatatcattgcgtccaggttaaaagaagacgttgctgaacagcaaggccgagtcttcagatattttggcgataaacttctaatatctgaagcaaaaaagagctttaccagggtaggggaaaataaccttacttgcattagttgtttccaacccgttttaaacaaatacactttcgaggaatcatctaatggcgataagaacaaaggtaggttatttgcctatacagttagcaaagacttacaactcaccaaatatgacgttactgactttagcaaaagaccaaagaagctaaaatacgctaaaggaggagcaaaatatatacctacgagcaagcacgaatatgagaataccacagaaggccattatgacgaaatcttaactgtagcagcctcaccagatggtaaatatgttgtcacaggtggaagagataggaagttaattgtatggagcacagaatctctatcacccgttaaagttattccaacaaaggatcgccgaggggaagttttatcgttggcttttagaaaaaattctgatcagttatatgcatcctgcgcagattttaagataagaacatattcaataaatcaattttcccagttggagattctttatgggcatcatgatatagtggaagatatatctgcgttggcgatggaaaggtgtgttaccgttggtgcccgtgatagaacagctatgctttggaagattcctgacgagaccagactaacatttagaggtggcgatgaacctcaaaagctactaaggagatggatgaaagaaaacgctaaggagggagaagatggagaagtcaaatatcctgatgaatcagaggcacctttgtttttctgcgagggtagtattgacgttgtgagtatggtggatgattctcactttataacaggctccgataatggtaatatatgtctatggtctctggcgaagaagaaacctatcttcacggaaagaattgcccatggtattttacctgagccctctttcaatgacatttcgggggaaaccgatgaagaattaagaaaaagacagttgcaaggcaagaaattgctacaaccattttggatcacatctctttacgctattccatattcgaatgtattcatatctggatcatggagtggatcgctaaaagtttggaaaattagtgataatctcagatcatttgagttgctaggtgaattatctggcgctaaaggtgtagttaccaagattcaggttgtagaaagtggtaaacatgggaaggagaagttccgtattttggctagtattgccaaagaacacagactcggtagatggattgcaaatgttccaggtgccagaaatggtatatattcagctgtcattgaccaaacaggcttttag

SEQ ID NO: 79026 - DNA, 1470 bp, Saccharomyces pastorianus
atggctcggggtgacggacatctatggacagagacatatgatagttccacagtcgtttttatgattttaggtgccgccctggttttcttcatggtaccggggctgggctttctttattccggtttagcaagaagaaaatctgctctggctttgatttgggtagtgataatggctaccttagtaggtatactgcaatggtatttttggggctattctttagcattctctaagactgcgacgaacaacaaatttatcggcaacttggattcatttgggtttagaaacgtctatggcaaaatttcggatgattccacgtatcctgaactgatttatgccattttccaaatgatgttcatgtgtgtcgcattgagtattatagctggtgccactgcggaaagaggtaagctttttccacatatggtttttctttttgtttttgcgactttggtttactgtcccatcacttattggatttgggccccaggtggttgggcctaccaatggggggtattagactgggctggcggtgggaatgttgaaatcctaagtgctgtggctggtttcgtttattcttattttctaggaagaagaaaagaaaacctcctgatcaactttagaccacataatgtttccatggtgactttgggtacttctatactttggtttggttggttgcttttcaatgctgcaagctcactgtcaccaaatatgaggtccgtatatgcgttcatgaacacttgtctcagcgccaccacgggtggaatgacgtggtgtttattagattatcgatctgaaaaaaaatggtccactgttgggttatgctccggcattatctgtggtttagttgctgccacgcctagctcgggttgtattactctatatggctctttgatccaaggtataatagcgggtgttgtttgtaattttgcaacaaaaataaagtattatttaaaagtggatgattccttagatctattagctgaacacggtatcgccggtgtggtgggattgatttttaacgctctatttgcagctgattgggttattggaatggacggcacaacaaagcataagggtggttggttgacgcataactggaaacaaatgtatattcaaattgcctatatcggtgcctctgccggctattgtgctgtggtcacggccatcatttgcttcgtattaggtaaaattccgggtgtccatctaagagtcactgaggaagccgaagcattggggttggatgaagatcaaataggcgaattcgcttacgattacgtggaggttaggagagattattaccagtggggtgtagatacagatgcacttcatactacatgcaatggcgctaattctgcgtctgagacaaatcctactgaggacagccaaaactcctcattgtcatcagctacagtaagcagccaaaacgaaaaaagtaataatcctaaattgcatcacgcaaaagaagcatga

SEQ ID NO: 79027 - DNA, 903 bp, Saccharomyces pastorianus
atggaaaagtacaccaattggagagacaatggtacgggaatagctccatttctaccaaacacaatcaggaaacctagtaaggtgatgacagcgtgtttgttgggtatcctaggggtgaaaaccattataatgctaccattgattatgctgtaccttctaactggccagaacaacttactgggtttgatattgaagtttacattcagttggaaagaggaaattaccgtgcaaggaatcaagaaacgtgacgtaaggaaatccaagcattatccacagaagggcaagctttatatttgcaattgtacctcacctttagatgctttttcagtggtgttattagctcaggggcctgttacgttgttggtgccatccaatgacattgtatacaaagtttccataagagaattcatcaacttcatcctcgctggtgggttagatataaaactctatggccacgaggtagcagagctatctcaattgggcaataccgtgaattttatgtttgctgagggtacctcatgtaatggtaaaagcgtcttaccgtttagtataaccgggaaaaaacttaaggaattcatagacccttcaataaccacaatgaaccccgcaatggccaaaactaaaaaatttgaattgcagaccatccaaatcaaaactaataaaactgccatcaccacattgcccatttccaatatggagtatttatctagatttctgaacaagggcattaacgttaaatgcaagatcaacgagccacaagtactctcggataatttagaggaattacgcgttgcattaaacggtggcgacaaatataaactagtctcacggaaattagatgttgaatctaagaggaactttgtgaaggaatatatcagcgatcaacgtaaaaagaggaagtag

SEQ ID NO: 79028 - DNA, 1146 bp, Saccharomyces pastorianus
atgtcttttagggatgtcctagaaagaggagatgaatttttagaagcctatcccagaagaagccccctttggagatttctttcatacagtacatcattactgaccttcggtgtatcaaaactgcttcttttcacatgctataatgtcaaattgaatggttttgaaaaattagaaactgccttggaacgttccaaaagggaaaatagaggccttatgacggtcatgaaccatatgagtatggtcgatgatccgttagtttgggcaacactaccatataagttatttacgtctttggacaacataagatggtctttgggtgcacataatatttgctttcaaaataaatttctggccaactttttctcacttggccaagtcctttcaacagaaagatttggggtgggcccatttcaaggttctatagatgcttcaataagattgttaagccctgacgacactttagacttggaatggacccctcactctgaggtctcttcttcgctaaaaaaagcctactccccgcccataataaggtcgaagccatcttgggtccatgtttatccagaaggatttgtactacaattatatccgccttttgaaaattcgatgaggtattttaaatggggtattaccagaatgatcctagaagcaacaaagccgcccattgtagtaccaatatttgctacagggtttgaaaaaatagcatccgaagcagtcacagattcaatgtttagacaaattctaccaagaaactttggctctgaaataaatgttaccataggggatcctttaaatgatgatttaatcgacaggtatagaaaagaatggacacatttggttgaaaaatactatgatcccaaaaatcctaacgacctctctgacgaattgaaatatggtaaagaggcgcaagatttaagaagcagattagccgctgaactgagagcccatgttgctgaaattagaaatgaagttcgcaaattaccacgcgaagaccctaggttcaaatccccctcatggtggaagcggttcaacaccacggaaggtaaatcggacccagatgttaaagtcattggcgaaaattgggcaataaggaggatgcaaaagtttctgcctccagagggtaaaccaaagggtaaggatgattga

SEQ ID NO: 79029 - DNA, 2190 bp, Saccharomyces pastorianus
atggaatcacttccacgtactcccacaaaaggcagatctacgcagcatctctcgacaccatcgccgaagaatgatgttttagctatgaatggccacaaaagaagaaatacaacaactccaccgcctaagcacactcttctgaagccgcaacgtacggatattcatagacactcattagctagtcagagtcgcatatccatgtcacctaatcgcgagcttttaaagaattataaaggtacagcaaatttgatttatggaaaccagaaaagcaactccggtgtaacttccttttataaagaaaatgttaatgaactcaatagaacacaagcaatcttatttgagaaaaaggcaacactagatttactcaaagatgaactaacagaaacgaaagagaaaatcaatgccgttaatctcaaatttgaaacccttcgtgaagaaaagataaaaattgaacagcaactgaatttgaaaaacaatgaacttatctcgattaaagaagaatttttgtcaaagaagcagttcatgaatgaaggacatgaaatacatttaaagcagctagcggcatctaataaaaaagagctgaaacaaatggaaaatgaatacaaaacaaaaattgagaaattgaaatttatgaagattaaacagtttgaaaatgaaagagcgtcgcttttagataaaatagaagaggtaagaaataaaatcaccatgaacccttccactttacaggaaatgttgaacgatgttgaacaaaagcatatgcttgaaaaagaagaatggcttacagagtaccaatcgcagtggaaaaaggatatagagctgaataataaacatatgcaagaaatcgaaagcataaaaaaggaaatcgaaaatacattaaaacctgagttggcagaaaaaaagaagctcttaacagaaaagcgtaacgcgtatgaagctatcaaagcaaaagttaaagaaaaggaagaggaaactacaaggctgagagatgaggtggcattaaaacagaaaactaatttagaaactttggaaaagatcaaagaacttgaggaatatataaaagacactgaactgggtatgaaggagttgaatgaaattctgattaaagaggaaacggttagacgcacattgcataatgagttacaagagttaagaggaaatatacgagtttattgtaggattcgtccagctctaaaaaatttggaaaattctgatactagccttattaatgttaatgaatttgatgacaatagtggtgttcaatctatggaagtgacgaaaatacaaaacacagcgcaagtgcatgaattcaaatttgataaaatatttgatcaacaggatacaaatgtggatgtttttaaagaagttggtcagttagtgcagagttcattagatggatataatgtttgtatcttcgcatacggacaaacaggatctgggaaaactttcacgatgttaaatccaggtgatggtatcattccgtccacaatatctcatatatttaactggatcaataaattaaagacaaaaggatgggattataaagttaactgcgaattcattgagatctacaacgagaacatcgtagacttattgagaagtgataataataataaagaagacacaagcattggcttaaagcacgaaatacgtcatgatcaggaaactaagactaccacgataacgaatgttacgagttgcaagcttgagtcggaagaaatggtggaaataatcctgaaaaaagcaaataaattaagatccaccgctagcacagcatcaaatgagcattcctcccgttcacacagtattttcataattcatttgtctggatcaaatgcaaaaactggagcacactcgtatggcacactaaatcttgttgatttggccggttccgaaagaataaatgtctctcaagttgtaggggatagattaagagaaacacaaaatataaataaatctttaagttgcttaggtgacgttattcatgctttaggtcagccggatagtaccaaaagacatataccgttcaggaactcaaaactgacatacctactgcaatattcactcactggggattcgaaaacattaatgtttgtaaacatttcaccaagctcctctcatattaatgagactctcaattcgttaagatttgcgtctaaagtgaattctaccagattggttagtagaaaatga

SEQ ID NO: 79030 - DNA, 564 bp, Saccharomyces pastorianus
atgatggggtccttcctgtcgtatgctttcagatgtgatgataaaatagcatttactgcagcagaaaatccagtagaaccatcatcatgtttgctgtttttcgattttttctttcttgggaagtcgtcgtcctcttcttcttcatcatcatcttcttcagcatcactttgttcgttatctataattttagatgattcatcgctagagctattctgctcgtcttcttcggcttcatcaccttccattattgtatctttttccggctcattacttaactcttggttgccactattccttttttcacgcccaaattctgcattctttctggttcttttcttatccttagtgtctactctgtgcttggagcccatgatcaattatgtactgattttccttcggcttctctatcactttattcatagcatctgtttattacctttccttatatcttatgggcatcgaatcttagatttttttctttcaaaattttccaataagagggtaatggagatacaccaaaatgaatctcaaacaaaatcaaaacaaacactgtttacaatttga

SEQ ID NO: 79031 - DNA, 753 bp, Saccharomyces pastorianus
atgggctccaagcacagagtagacactaaggataagaaaagaaccagaaagaatgcagaatttgggcgtgaaaaaaggaatagtggcaaccaagagttaagtaatgagccggaaaaagatacaataatggaaggtgatgaagccgaagaagacgagcagaatagctctagcgatgaatcatctaaaattatagataacgaacaaagtgatgctgaagaagatgatgatgaagaagaagaggacgacgacttcccaagaaagaaaaaatcgaaaaacagcaaacatgatgatggttctactggattttctgctgcagtaaatgctattttatcatcacatctgaaagcatacgacaggaaggaccccatcatggctagaaacaaaaaggtgctgaagcaaagtgagtcagaaaagctagaatacaaggccaaaaaagcattgttggcagaaaaaaaaaagttattaggtaaagccagaaagacggatattattccaattgcttccggagaagacaggtcagaaaatattagaaaagtccttgagaaggagacagcgctcagaaagatagctcaaaaaggtgccgtgaaattatttaacgccattttagcaactcaagtcaagacagaaaaggaagtatccgaaaatttaagcggaattaagaataaagaagaaaagaaagaattgatcactgaagtttccaaagaaaaatttttggatttagttaaagctgccgcaggaagcgacaatgaataa

SEQ ID NO: 79032 - DNA, 1659 bp, Saccharomyces pastorianus
atggtattgcttatatcagaaattaaagatattgccaagaggctgactgctgcggatgacagaaagcagtacaactccattatcaagttaatcaatgaactagtgattccagaaaatgttactcaattggaagaagatgagacagaaaaaaatttgagatttctggttatgtcgctattccagatatttagaaagctgttttcccgcggcgacttgacccttccttcgtccaaaaagagcacattagagaaggaacagtttgttaattggtgtagaaaggtgtatgaagcgttcaagacgaagctgttagctatcatttcggacatacctttcgaaacatcacttgggttagattcgcttgatgtctatcttcaacttgcagagctggaatcaactcattttgcatctgaaaagggcgcaccatttttccccaataaaacattcagaaagttaatcatcgccctatggtcctcgaacatgggtgaaatagaggatgtcaaaagctcgggtgcgtctgaaaatttaatcatagtagaattcacggaaaaatattatacgaaatttgcagatattcaatactactttcaatcagaatttaaccaactattagaggatccagcctaccaggacttgcttttgaaaaacgttggtaaatggttagctttagtaaatcatgacaaacattgctctagtgttgatgcagatttagagatctttgtaccaaatcccccacaagccatagagaacgagtccaaattcaagtccaatttcgagaaaaattggttatcccttttaaacggccaattgtctttacagcagtataagtctattctgttaattttgcataagagaataatacctcatttccacactccaactaaactaatggatttccttactgattcctacaatttgcaaagctctaataaaaacgccggtgttgttccgatcttggctctgaatggcctttttgaattgatgaaaagattcaacttggaatatccaaatttttatatgaaactttatcaaattataaatccagacttaatgcatgttaaatacagagcaagatttttcaggttaatggacgtatttttgtcatcaacacatttatccgcccatttagtagcatctttcatcaaaaagctagccagactcaccctagaatcgccaccctctgctattgtcaccgtgattcccttcatctataatttaatcaggaaacatccgaattgtatgattatgctgcacaacccagccttcatttccaacccattccagacacctgaccaagtggcgaacttgaaaactctgaaagaaaactatgtagatcccttcgatgttcatgaatcggaccctgagttaactcatgcactggattcctctctgtgggagctggcgtcattgatggaacattatcatcctaatgtagccacgttggcgaagatatttgctcaaccatttaagaagctaagttataacatggaagatttcttagactggaactatgattctttgctcaatgcagaatcttcaagaaagttgaagacacttcctacgttagaatttgaggctttcacaaacgtttttgataatgaagacggcgatagcgaagcgtcatcccaaggtaacgtctacttgcctggggtagcatggtga

SEQ ID NO: 79033 - DNA, 915 bp, Saccharomyces pastorianus
atgactgtaaaagagtatactaaatcgaagttgccatgctcaatattgaatatcaaacctacagtcactaaaagtggcgaggatgcgcctcttctagtatggatccctggtaatcctgggcttttatactattatcaagaaatgctacagcatctacacttgaaacacccagattgggaaattcttggcatatcccatgccggaatgacattgaacgctcattctaatacaccgatattttctttacaagatcaagtagatcatcaggtagaggtaattaacaatttctcatgcaagaacaggaaaattattattatgggacattcggttggggcatacatcgtacaaaaagtatgcctttctaacaaattggttggctccgtacaaaaagttggtctcgttacaccaactgtgatggacattcacacctcggagatgggtatcaaaatgacagcggcacttcgttatattccaccattggctcatgtagtatcattgttcagttatattttcttttattggatcttatcagaagggttttcaagatttattattgataaatttatgggctgtggaagtactggttatcaggcagtactatctacaagaatttttttgactcataggcagtttgttcgtcaatctctaggattagctgcccaggagatggaagaaataactacgaactgggagtttcaagatagatttatcaattattgcgaagagaacggaacttctatttggtttctcttcagtagcaacgaccattgggtttctggtaagaccagatcacatttgtcggattattataaggataaagtcaagcaggaacgcttaaaaattgatgtcactgacaaaatacctcattcatttgtagtaaaacatgcagaatatgctatcaatgcatttttttag

SEQ ID NO: 79034 - DNA, 522 bp, Saccharomyces pastorianus
atgctagccctagctgataacattctacgtataataaatttcctatttttggttatttccatcggtttaatcagttcgttgttaaacacccaacataggcacagctccagagtaaactactgtatgtttgcttgtgcatatggtatattcaccgattcattgtacggtgtctttgccaacttcattgaaccattggcatggccactagttttgttcacactggactttttgaactttgtgttcactttcactgccggtacagtgttggccgttggtatcagagctcactcatgtaacaacagctcatacgttgacagtaacaagattactcaaggttccggtaccagatgtagacaagctcaagccgctgttgcattcctctacttctcttgtgccatctttttggctaagaccctgatgtctgttttcaacatgatctccaatggtgcctttggttctggttctttctccaagagaagaagaactggccaagtcggtgttccaaccatttcccaagtctaa

SEQ ID NO: 79035 - DNA, 1386 bp, Saccharomyces pastorianus
atgcgtggagaatggcaggaatttaagacacctgcaggcaaaaagtattactataataagaacacgaagcagtctcaatgggagaaacctaatttgaagaaaggctctaacctagaaagcaatgcgaaagaatcacagacagagaggaagccaacattttcattagaactggttaatggttggcacttaataatatgcaacgatggtacaaaactttactttaatgatgactctaaggagttcaaaaatgacatcagacaagaggacgacagcaggtgtcgctcattaatcgagtcgttagataaggaaaaactggttcttctgattggcgttgccagaggttacactatgcgggaggaggacattgataaaatcctcgaatcttgcaacgaagagattcatctatttaaaagaaatcaagacgaagttgagagaaaagatgagatcagcgaagaggcgggtgacgtaaaatcccctttacaggaaagccacactgggctagtcagcgggtatggttcatcttcgggggaggaagacgaagaggaagacgaagagaatgaagaacaaattgtaaatcaagatatcagcattatcgatgatctgaatcgtattgatacagatgacattgacgagcgtaatatcttcttcgaattattcgataggtataaactagacaagttttccacgtggtcgctgcaaagcaagaaaatcgaaaacgatcctgatttttacaagatcagagatgacacagttcgtgaaagtcttttcgaagaatggtgcggcgagcgcagtggcaatgccaccgctgaagaaagcgatagcgaagataatagcgaagacgatagcgaagtactagaaccaacaaaataccattatctggcacaaattgttgctaatgcgggaacaatcgcacccgacaccatcccacaagatataaggaaacaacaaaaagcgttatacaaggcctacaaaatcaaggagtatataccgtcgaagcgcgaccaagacaaattcgtttcccaactgctgttttattataagacgttcgacttggaacagcggaaagagattttctgcgattgcctacgggatcacgaacgagactttacgggggcagtcgaatcgctgcgtcaggacaaagagcttatcgaccgatggcaaacacttctgaaagcacccgcggacagtagtagtatagaggatatattgctgagcattgagcacaggtgttgtgtcagcccaatagtggtgacggaaccacgctactacgtcgtgggcattctggagaagaccgtggtctgggtgcggtggctagccgccgaggtcgggccatcaagccggtttaccccagtgggcgcggggaacgagccgataaatccggaatag

SEQ ID NO: 79036 - DNA, 435 bp, Saccharomyces pastorianus
atgttccctgtgctcagatcattcgtaacaaataacgatatacctgttggatatgtaacgccaaaattcccctcattatactggcccatcaacaactcgaagtataatactgcattcttatactatatatctgacatttggaaattttcgctgtactggactttgatctttaatggtgcattttacgttactgctggtgtgtatgctagcttgacccatagaaagaaggctggaagtgtatggatattcgtcatgtacgtcttatacggaggcgttcaaggcttgacgactggtacagttatggggtttttaataggagcgatctatagatctggtttattttctatgtctacatgggtcccactttgttgcgcggtagtccaaatccttttcgatgtggtgctaagttattccatggttggttccgttatgtga

SEQ ID NO: 79037 - DNA, 1851 bp, Saccharomyces pastorianus
atgatcatcaataggcgtattttgaaatcttttgaagagataagtcattcattagaggaatcactacgagaggttgcatttgattcacagcaacaattgattcaagacgtacgtgaggaaaatgaagaactaagtaggttacaagatcaattacaattgatcaggtcaattgttgaaaaaatctgcatttcaatcaaaactgacaatattgactcttattgttcggtgccttttgatttgctatacaatatttgcaaggacattgctgatccctcatcctttgaagacggagatttgcaatatcttgttagccaagccatatttgagtacattatattattgtgctactattctgtgaccaacgaatgcgtccaaggtttacctgccgtgtatgaagctgaacagtactacaaaacagtaagtgattcaatcctaaagtcttttctttactgtttacaaaattcagtatcgacaatacgtcttttatctcaaactgttttgaaggatgtaaataagaaaaaactgtcgcatcaaaaatggtccctaaaggccttgtcagttgatttactagaaaaaatacgcccaagaataaacaaatttatggtgattcggaacttcaggtttgtcgggctaccgaagaaaccaattgaaatagcttcattggtttctgatatacctcgcggtatagtgcacgaaagacttgatatggtcactcaatcatcaaagtattatactattaaactggggcagttgatcactgaattcgatcaacaaccagaagaaaatggtatgttcaccgaagtacatttaccgaactacgaaagacgtctaaaatctttacaggacttctttggattagccatgtctgattcgaatttactagatgtgatccgatgctcagcgaaatttcataaagatcatcctttaagaaggttcactaaaccaagtatattgactagatactggccttcaattttgttgtgtcttttatatggaccatcttctgttatgtcgttgtggaattcccggtattttattcaagatttcattaagaccaatgtcgttgactttgcgaaagggctgatcttgaactggttatgggcacccctgaaacaggtttggtctactgttaagcatgacgagggaagcgccatttcagtgacatcacaggagacattaaactctgacatggattctcttaccagaatgattgttagttttgttgtggataatagtgattcgacgtctaacagccccatagaccctattctattgagtactaaagtcgaacatggtgatttgaccgaatttatggaaatatatgaaacacaactacatcatccgataaagaatatagctacgggtggattagtcaggtctttattgattcaactgcaaaaaacaaaagtcgatggatctatggcattgaatggcattgataaaatgctgaaatcgcaacagttggtgtttggagttgtagcattatctccggctttagtgatactatattcttctatagtggcgttaaaaagatttgtcaaactaggcaatgtctggtctaatgaaaaacggtatagggagcaaataagtataagtttgaataatgtggaaagagttttgaattattctaaacaaggtgcggacgccgatgaggaacacttaaaccagggtctactagtgattgaggtttctaacttatacaaattgggaagttttttgatcccgcgttcaagaaagaaagaatggtttagggacgttgaggaactggtggataccaatcttgactccggagctcatataaatgtcgtcaacaggatataccacgtatatggcaggtttttaatccattag

SEQ ID NO: 79038 - DNA, 759 bp, Saccharomyces pastorianus
atggctgccgcatgcatttgtcaacctaatcttcttgagattaatgtatctgatggaccactggatatgatccgcaagaaaagaaaaatacaacagccgcaactacgtccaccccttcgagagaataaatgccaaccacacttttctgtacgaaaggtaaaccagtcttacataatttctctccataaagaaatcacatgccaactcattgcagaaattgtcaaacaaaagttatcgaggatttgggaaaaagtatacataccatcttatgaactgatatcagacaaagacggtaatcaaatttatgtggaacagagtgtcgacgaaaataggctaacttctgagattatggagaaactggaccccaacaatattgatatagaggcgatcgaaatattattcgacgactatcacctagaattatcacgcttgacaaacggtattattatatctagtgccaatgatcacttttacagggaattctccttcaataacataattgatgacaactttaaaatttgtggaacaagcatgtctgcagacagttttgataagatttatggcgttatgtggattgaagtacctttcaatggcaatggcttacagaatgatagcgccgttaatagggtttcaacatctcacaatcagatagaagaattgaatgacatagagcaggagataagagcttttaatattagtcgaagtaatcaagaaagtatcatcaaaaaggaagtatctagaagattgaatgggcggtaa

SEQ ID NO: 79039 - DNA, 2163 bp, Saccharomyces pastorianus
atgcctttgagaaatctaactgaaacgcacaactttagtagcacaaacctggacacagatggtacaggcgaagagcatgatggtgctcctctttcctcatctccttcttttggacaacaaaatgacaatagcaccaacgataatgctggtctcacaaacccttttatggggagtgacgaagaatctaatgcgcgggatggagaatctctgtcttcttctgttcattatcagccacaggggagtgactcttcactacttcatgacaattctcgtctagatctaagtcaaaataaaggtgtatctgattacaaaggttactattccaggaacaatagtagagctgtgagtacggctaatgataactcatttcttcagccaccacatagagctatagcctcttctccttctttgaattctaatttatcgaagaatgatattctctcaccgccagaatttgatagatatcccttagtgggttccagagtcacttctatgactcaactgaaccatcatggtcgctcgccaacatcatctccaggaaacgagtcgtccgcctcattctcttctaatccgtttttgggcgagcaagatttttctccatttggtgggtatcctgcttcatcgttcccacttatgatagatgaaaaggaagaagatgattatttacacaatcctgaccccgaagaagaggcaagactggatagaaggaggttcatagatgacttcaagtacatggataaaaggtctgctagtgggctagctggtgtattgctcttgtttctggcagccatctttatttttattgttttgccagcgttgacctttaccggtgctattgatcacgaaagcaacactgaagaagttacatatttaactcaataccaatatcctcaactatccgccattagaacatctctggttgacccagacacacctgatacagcgaagacaagagaagctatggatggctctaagtgggaattagtattttctgatgagtttaatgcagaaggcagaacattttatgatggggatgatccatactggacagcccctgatgttcactatgatgctactaaggatttagaatggtacagtccagacgcttccacaactgtgaacggaaccttgcagctgagaatggatgcctttaagaaccatggcttatattacagatcaggtatgttgcagagttggaataaggtctgtttcacgcagggtgctctagaaatctctgcaaatctaccaaattatggccgtgtttcaggtttgtggcccggtctttggactatgggtaatttagggaggcccggttatttggctagtacccaaggtgtctggccttattcttatgaatcgtgtgatgctggtattacacccaatcaaagttccccggatggtatttcttacttgccgggacaaaagttaagtatttgtacttgtgatggtgaagatcatccgaatcaaggtgttggtagaggagctccagaaattgatgttttggaaggtgaaactgatactaagattggtgtaggtatagcctctcaatccttgcaaattgcaccttttgatatctggtacatgcctgactatgattttatcgaggtttacaatttcacaacaacgaccatgaacacttatactggcggtccatttcaacaagccgtgtctgctgtctcaactttgaacgtaacttggtatgaattcggtgagtacggtggctactttcaaaaatatgccattgagtatctgaacgatgacgacaatggttatatccgttggtttgttggtgatactccaacttatactattcatgctaaagccttacatcctgatggtaatattggttggagaagaatcagtaaagaaccaatgtcgattattctaaatctgggtatttccaacaattgggcttatattgattggcagtatattttcttcccagtggttatgtcgattgactatgttagaatataccaaccaagtaatgctatatccgtgacatgcgatccaagtgactatccaacatatgattatattcaatcgcacttaaatgcattccagaatgcaaacttaactacttgggaagatgctggttacacgttccctaagaatatcctaactggtaaatgtactagctcgaagttcaagttatcctcttaa

SEQ ID NO: 79040 - DNA, 81 bp, Saccharomyces pastorianus
atggtctacgttatgagtatggtatctttgctcaaaagattattgacggttaccaggtggaaactccagattactggttaa

SEQ ID NO: 79041 - DNA, 1107 bp, Saccharomyces pastorianus
atgttgtctgcagctagattgcaatttgcccaggggtcagttagaagattgactgtgtcagccagagacgctcctagtaaagtgtctactttggctgtcaaggtccatggtggatcccgttatgcaaccaaggacggtgtagcccatcttttgaacaggttcaacttccagaacacaaatgctaggtctgcgttgagattggtcagagaatccgaattattagggggaaattttaagtccactttggatagggaatacatcactctaaaagctacattcttgagggacgaccttccttactacgtcaatgccttggcagatgtgttgtataagactgccttcaaaccccacgagctgtctgaatctgttttgcctgctgccagatacgattatgcggttgctgagcagtgccccgtaaaaagcgcagaagaacagttattcgctattacatttagaaagggcttgggaaatccattgtattacgacggtgtggaaaaagtcagcttgcaagatatcaaggattacgctgacaaagtctacactaaagagaatcttgaaattacaggtgaaaatattgttgaggccgatttgaaaagatttgttgacgagtcactgttaagcactttgcctgcaggtaagtcattggtgagtaaatccgaaccaaaatcctttttgggtgaagaaaacagggtaaggtttatcggtgactccgttgccgccattggtatcccggtaaacaaagcctccctagctcaatatgaagtattggccaactatttgacctctgccctatccgacctttccggcttagtcagctcggctaaacttgataaattcactgacggcggcctgtttactctgtttgtaagagaccaagacagcgccgtggtatcttccaacatcaagaaaattgttgcggatttgaagaagggcaaggacttatcccctgcaataaattacacaaagttaaagaatgccgtccaaaatgaatctgtttccagcccaattgaactaaattttgacgccgtgaaggactttaagttgggaaaattcaactatgtagctgtcggtgatgtttccaacttgccatatttggacgaattgtaa

SEQ ID NO: 79042 - DNA, 471 bp, Saccharomyces pastorianus
atgtccaacactagcgaagataacattaccgtaaggtttgtaaccgaaaacgataaggagggttggcaaaggctttggaaatcctatcaagatttttatgaagtctcttttcccgatgacttggacgatttcaatttcggcagattcctagatcctaacattaaaatgtgggcagccgtagctgtggaaagttcgagcgaaaaaattattggaatgataaactttttcaaccatatgactacttgggatttcaaggacaagatatacatcaacgatctctatgttgatgagaattctagggtcaaaggcgcgggcggcaaactaatccaatttgtctacgacgaagctgataaactgggcacaccaagcgtgtattggtgtacggatgagtcaaaccatagagctcagctgctatacgtcaaggtcggctataaagccccaaaaatattatacaagaggaagggatattaa

SEQ ID NO: 79043 - DNA, 2634 bp, Saccharomyces pastorianus
atgagtgaaacagtcaaagataaagttataattgatgagaaggtatccacaaaaggtactgttgattacgccgagggtgctgagtactctgagaggctttcaaatcattcatcagacttttctcagtggtatacggatgaacagatactgcactttatgaagaagctgggttatgaaaatcgcactctttatgatattccggaagacgttgcgtatatcctcaaaaaaatgcctgaattgacacttgaggattccttcaaaatactaaaagactctatcatctatttcaaggatgatgagaacattccacacgatcaatatgaggagtggaagagattggttgacttggaggacttggattcaaaagaggggataaatgaatatgatagctttgacattagagcatttgcttctgctattaaattccattcgccttaccaagaggttagagctgttgttgatccagaagatgatcccaccattccagtggagacattccgagcatattttctggcaataatttggtctgtcatcggttcaggatttaatgagtttttttcacacagggtggtttcaatttcactgggtactccaattatccaaatgtttttatatatctgtggtaaggcttgggctaaaactatcccctgttgggctataaccataaggggcagaaagtatggtatcaatatcgataaaccatggacccaaaaagagcaaatgttttcaaccttgttatatgcaatttgtcaaggcacgttctatactcattacaatattctaacgcaaaaactcttttaccattctgctttctcgtttggctaccaatttttactttcgttatccgtacaatttattggatttggatttgctggcatccttagaaaattcgttgtttatccagcccgtgcactatggccaacagtcatgccaactattgctatcaacaaggcactattgggtaaagaaaagcatgaatctggaatgagcaggtataagttctttttcttgactttttttatcatgttcatctataactggtttcccacttacattattaatattctaaacactttcaattggatgacctggatcaagccaagtaacattaatctcgcaaacatcacgggaggagtcactggtcttgggattaatcctatctcatcttttgactggaatgttatttcgtataattctcctttagtttacccattttggtcatacttaacacaatatcttggttgcatattagcagctttaattgttattgcagtatactatagtaattatatgagttgccaatacctgccaatattcacaaattctttgtatactaatactggcgattcctttaaagttactgagatattagacagtgacaataagctagatgtgaaaaaatatcaaagctactcgccaccatactatagtgctggaaatttggtaacatatggtgctttcatttgcgcatatcctctgatgattacatggtcgtttattgtacactcaaagttattgttcaatgctttcaaagattgggctttgaatttgtgggccatgagaaaacttaaatcttgggtcacaatgttcaaaagcgattacagggcgctcgacgattatgatgacccacattctaatgccatgaaaaactataaagaagttccagattggtggtattttgccatattgataggctcacttgttgttggaatagctgttgtagagcactacccaacaaatacaccagtttggggtctttttgtttgtttaggatttaattttgttttcttgattccaactactatccttcaagcaaccactggtttttcgtttggtttgaatctactaattgaaatggtgatggggtacgctttaccaggtaatccaatcgccataatgattttgaaggcttttggttataacatcgacggccaagcagataattacgtttctaacttaaaaatagcgcattattgtaagattccgccaatggcgctattcaggggacaatgtgttatagttctcattcagatatttgtcaatctaggtgttctgaattggcaaatctccaatatcaaagacttttgcacacctcatcaaaacgcaaaattcacctgtcctgatgctgtgacctactataatgcttccgttgtctggggtgcaattgggccaaaaagaattttcaattacatttatccaatatttaaatggtgttggttgataggcgcatgcattggcatattttttggtgtttggaagcgctggggtaagttttatcccagatattttgacccaatgttatttgtaggtggaatgcttaatatgagccctccatataacctgatgtattacacttctggtatgattgttagttacatttcccagtactacatgaaaagacaccatttaaatctgtgggagaaatataattatgttttatcggcaggcttttcaacgggcttggttttatcagctattatcattttctttgctgtccaatataaagacacagcttttaattggtggggcaatacagttccgtatgctggtgccgatggcgttggctatcctctaaagaacataactgatacagcaaatggctatttcggctatgctccaggacactatccatga

SEQ ID NO: 79044 - DNA, 330 bp, Saccharomyces pastorianus
atgaattctctcatccctcttttagtggaagcatcaacatacattgtaagaggagaaagcagcatctcaattgccattggaatagggcctcaagctagcaggagtgtgccgtaccacattctttgcaggggatgtgacggcacggtaacaacttttcgtacgtggcatacgcaaccactcgggccttgcaatacaatcatcataggcagaaaaggtaatgagacaaccggcggcgcagaacagaggaggcagcagcacttaacgtctgattcagcaacaaaagcgtcattggtgggtttttgtgggctgtattactatttcaggaaatag

SEQ ID NO: 79045 - DNA, 1413 bp, Saccharomyces pastorianus
atgggtattgcgaaacagtcttgcgactgctgtcgcgttcgtcgagtaaagtgtgacaggaataaaccatgtaatcgctgcactcagcgcaatttgaactgcacttatcttcaaccgttgaaaaagagaggtccaaaatccattagagcaggaagcttaaaaaaaatagcggaagtgcagatggtgagtatgaataataatattatgaccgctccggtggtatgtaagaaggttccgaaaaacctgattgatcaatgtttgaggttgtatcatgataacttatatgtaatttggccaatgctttcctacgatgatcttcacaagcttttggaggaaaattatgaggactgcagcacttattggtttctggtatccctttcggcagctactcttagcgacttgcaaattgaaatagagtatgaggaaggagtcacttttactggagagcagttatgcactctttgcatgttatctcggcaattctttgacgaccttagtaacagcgacatatttcgaatcatgacatactattgtttgcaccgttgtcacgcgcagtttgctgatacaagaacttcatacagactttcttgtgaggctattggcctcatcaagatagctggattccatcgggaagaaacctatgaattccttcccttcggtgaacaacaactcagaaggaaagtttactatttacttcttatgacagagagattttacgctgtatatattaagtgtgtcacgagcctagatacaacaatagcgccaccactaccagaggttgtaacagaccctcgtctttctctggaaagcttccttgaggtgattagagttttcactgtacctggaaagtgtttttatgatgctttggctactaactgtgtcgatgattcctgcaccgaagactctctaaaaaggatatggaacgaacttcataccacatcacttgatatagagccatggtcttacggatacatcgattttctgttttcgaggcattgggtcaggacactagcgtggaaactagtacttcatatgaaaggtatgcggatgaattttctttcgaatactaataacacacatataccagtcgaaattgctagggacatgttgggagacacgtttttaactccgaaaaacctgtatgatgtacatggtcctggaataccgatgaaggcattagaaatagccaatgcattggtagatatcgtaaataagtatgatcacaatatgaagttggaggcttggaatattttgtgcgatgtatctaagttcgttttctccctgaaacattgcaatcataaaatgtttcaaaggttttcaactaaatgtcagagtgctctaatcgatttgcctatctctagaccactgcgcctaaatgatgattccaaagatgaagacgacataattccttaa

SEQ ID NO: 79046 - DNA, 1413 bp, Saccharomyces pastorianus
atgagtattgtaagacagtcatgtgattgctgtcgcgttcgtcgagtgaagtgtgataggaatagaccgtgtgatcgttgccgtcaacgcaatttgagatgcacttatttacaaccgttaaggaaacgaggtcccaagtccatcggagaaagcaaccttgaaagagcagctgaaatacagatggtgactgtaaacaataacatcatggcagccccagtaatgtataaaaaggttccaaagaaggtgattgatcaatgtttgagactatatcacgatcaactatacgtgatttggccaatgctcagttacgatgatctttacaagcttttggaggaaaattatgaggactgcagcacttattggtttttagtgtctctatctgcagcaactcttagtgatctgcatacaaaaatagaatacaagaagggatttttttttactggagaacaattgtgtaatctttgtatgtcatcgcgacggtttttcgacgatctcagtaatagtgatatatttcgaattatgacatactattgtttgcatcattgttatgcacagtttgctgatacaagaacttcatacagactttcttgtgaggctattggcctcataaaaatagctggatttcatcgggaagaaacttatgagtttcttccaattggtgagcaacaacttataagaaaggtttactatctgcttctcatgacagagaggtactatgccgtatacattaaatgtgtaacaagtttggataccactatatctccaccacaacccgaaatcgtaactgattccagactttctttggatagttttcttgaggtgattaaagtattcactgttcctgggaaatacttttacgatgccttagctaccaacagtgttaatggttcctatactgaagactctctaaaaaggatatggaatgaacttcacacaacctcacttgatatagagccatactcttacggatacatagactatctcttttctcggcactgggtcaggactctaacatggaagttggtactaaataagaaggatatgcggatgaattttttttcgaatactaacgtcacacacattccagtcgaaatagccaaggatatgttacaggatacacttttaactccaatcgacctatatgatgtgcatggtcctggcgtaccgatgaaggcgctagaaatagccaatgcattggtagacgtcgtaagtaagtatgatcacaatatgaagttggaggcttggaatattttgtgcgatgtatctaagttcgttttctccctgaagcattgcaatcataaaatgtttcaaaggttttcaactaaatgtcagagtgctctaatcgatttgcctatctctagaccactgcgcctaaatgatgattccaaggatgaagtcgacattattccctaa

SEQ ID NO: 79047 - DNA, 885 bp, Saccharomyces pastorianus
atggcaaaaccgcgtggaagaaaaggcggtaggaagccttcacttactccacctaaaaataagagagctgcgcaacttagagcatcccaaaacgcatttagaaaacgaaagttggaaagattagaagaactagagaagaaagaagctcagctaacggtaacaaatgatcaaattcacatattaaagaaggaaaatgaacttctccattttatgttgaggagtcttttcactgagaggaacatgccttctgatgaacggaacattagtaaggcctgttgtgaagaaaaaccgcctacatgtaacaccctcgatggtaatgtggttctttcctccacatataattcccttgaaatacaacaatgctacgtatttttcaagcaactgctctcagtgtgtgttggaaggaattgtacagtgccgtcaccgttgaattcctttgatcggtccttctatcccataggctgtacgaatctctcaaatgacataccaggctattcttttgtaaatgatgcaatgagtgagattcatacgtttggtgactttaatggggaacttgatagtacctttttggagtttagtgggactgaaataaaggagccaaataatttcattactgaaaacagtaatgcaatagaaacagcggcagcgagcatggtgattaggcagggtttccatccaagacagtattatacagtggatgcttttggaggggacgtcctattaagtgcaatggatatttggagttttatgaaagtgcatccaaaggttaacacatttgaccttgaaattttgggaacagaacttaagaaaagtgctacgtgttctaattttgatattttaattagcctcaagcatttcattaaggtcttttcgtcaaaattataa

SEQ ID NO: 79048 - DNA, 393 bp, Saccharomyces pastorianus
atggtaagtttcataacgtctaggcaactcaagggcctaattgaaaatcagaggaaggatttccaagttgttgatcttcgaagagaagattttgcacgtgatcatattacaaacgcttggcatgttccagtaacagcacagattacagagaagcaactgaatcaattaataaaaggtttatcggatactttctcaagttctcaattcgtcaaagtgatatttcattgtactgggtccaagaataggggaccaaaagtagctgctaaattcgaaacctacttacaagaagaagatattacaagtaagtttgagagttgcatcctcgttggaggtttttacgcttgggagacccattgtagagagagtaaccttaaattgattgttagtggttga

SEQ ID NO: 79049 - DNA, 1215 bp, Saccharomyces pastorianus
atgtcagaagatcaaaaaagtgaaaattcggtaccttctaaggttaatatggtgaatcgcgccgatatacttactacaatcaagtcattgtcatggcttgacttgatgttgccatttactataattctctccataatcattgcagtaataatttctgtctatgtgccttcttcccgtcacacttttgacgctgaaggtcatcccaatctaatgggagtgtccattcctttgactgttggtatgattgtaatgatgattcccccgatctgcaaagtttcctgggagtctattcacaagtacttctacaggagctatataaggaagcaactagccctctcgttatttttgaattgggtcatcggtcctttgttgatgacagcattggcgtggatggcgctattcgattataaggaataccgtcaaggcattattatgatcggagtagctagatgcattgccatggtgctaatttggaatcagattgctggaggagacaatgatctctgcgtcgtgcttgttattacaaactcgcttttacagatggtattatatgcaccattgcagatattttactgttatgttatttctcatgaccacctgaatacttcaaatagggtattattcgaagaggttgcaaagtctgtcggagtttttctcggcataccactgggaattggcattatcatacgtttgggaagtcttaccatagctggtaaaagtaattatgaaaagtacattttgagatttatttctccatgggcaatgatcggatttcattacactttatttgttatttttattagtagaggttatcaatttatccacgaaattggttctgcaatattgtgctttgtcccattggtgctttacttctttattgcatggtttttgaccttcgcattaatgaggtacttatcaatatctaggagtgatacacaaagagaatgtagctgtgaccaagaactacttttaaagagggtctggggaagaaagtcttgtgaagctagcttttctattacgatgacgcaatgtttcactatggcttcaaataattttgaactatccctggcaattgctatttccttatatggtaacaatagcaagcaagcaatagctgcaacatttgggccgttgctagaagttccaattttattgattttggcaatagtcgcgaggatccttaaaccatattatatatggaacaatagaaattaa

SEQ ID NO: 79050 - DNA, 309 bp, Saccharomyces pastorianus
atgaaggatatgaatagtattagatatgtattcttttttttttccagggacataaagagttgtttttataaggtgcggagttatctcaatttgcttctgattttagaagctattctatgcccggtcgactctttgatttcgatcccaaacggcatcatggtagtttcggagccagattcgccattttccaactctaatccatctcgaagactttttcgaaaggtaaacccttcttcttgtctcagcgtgttatatttggacttatgctgtagcggcttgatcattgccgaagcaggtattggcgtataa

SEQ ID NO: 79051 - DNA, 2130 bp, Saccharomyces pastorianus
atgagtaataaggaagagcatgttgatgagacttccgcaagtggtgtcaaggaggttagttctatagctgctagacatgacaattgttacgcgccttcgttaataacgtcgacgtcgggcatggactcctttcaatcgcacgcgctactgaatgatccaaccctaatagaggattattcagatattattaataataggcctacaagtggaagtaaacttactttaggaaacgaggattcggagagtatgggcggaagtgttgtggtgactccgacttcgaataagagttcgcccttcaattcgaaacttaatatactgagtaatgcggcagaaaagggccatgatgttctgcgaaatagagatgatgacaaagagttagaggaggagaacgtggaaaaacatatgcatagcaacagtaaaagggatcagcgacattacaaagaaaattcttcggaattgcccgactcatatgattattcggattctgaatttgaggacaatttggaaagaaggctacaagagatcgaaactgattccgtggatagcgccgataaggatgaggtgcatttttcagtgaataatacaatgaaccctgacgttgacgattttagtgatggcttgaaatacgccatctcggaggacgaggatgaagaggaaaactactctgatgacgatgactttgacagaaaatttcaagattcagggtttcaaggggagaaagacgatttggaggaggaaaacgacgattaccaacccttatcgccgccaagagaactggaccctgataaactatatgctttatatgcgttcaatggccatgattcttcacattgtcaattagggcaagacgaaccttgtatacttttgaatgaccaggatgcctattggtggctggttaagaggatcactgatggtaaaatcgggtttgcgccagcggaaattctagaaacctttccagaaagactagctcgattgaattgctggaaaaatgaaaacatgtcttctcaatcggttgcttcctccgattcgaaagatgattccatcagctctggtaacaagaatcaaagtgatgcagagagtataattccgacacctgcactgaatggatatggtaaggggaacaaatctgttagtttcaatgatgttgtcggttatgcagacaggtttatagatgatgcaattgaagatacctcgttagatagtaacgatgatggcggtgaaggcaatggacagtcctacgacgatgatgttgataacgacaaggaaacaaaagtaacgcaccgggacgaatacactgaagcgaagttaaattttggcaaattccaggatgatgatacgagcgatgtagtgagcgacgtctcctttagtacatctttgaatacaccactaaatgtgaaaaaagttcggagacaagacaacaaaaacgaaagtgagcctaagacatcatcgagtaaagacagagaagatgattataatgcaaatcggtatgtggggcaagaaaagtctgaaccggttgacagtgattacgataccgatctgaaaaaagtatttgaagcgcctcgtacgccatttgcgaatggtatggcaaaatcagactctcaaaattccctttcaacaattggcgagttttcaccgtcgtcgtcagaatggacaaacgaatcaccatccactccaatagttgaagaaagcagcagtattccatcatctagagcaataaaggacatttcacaatatattcatgcaaaatcgaaaattgaagagacaacaaacgtggaaaacacagaggggcaaattcaagccagcttggggtctagtggaggaatggcaaatcaaactgacgcagaacaacctaaagaggagctagaaaaacatcacagtacccccgaagaagaaaagcaatcaaccttatcgttacactcatcatctgaagaagatttttacatggatgaacaaagggcggtatcatcagcaagcataaatagttcactttccggatcaagggcattgtctaataccaatatgtccgatccggcttcgaagcccaattctttggttcaacatctctatgctccagtttttgacagaatggatgtgttgatgaaacaattggatgaaattattcgtaaatga

SEQ ID NO: 79052 - DNA, 348 bp, Saccharomyces pastorianus
atgaaaatggtattgaggcgacataagttgttagcacagcgaacatggttgcaggttaagttctctggtcgttctgggagagtatttacgttaaaaaataggaatcaattaagcataatcatgccgttttgtgtgctacatatctgtttcccactatataaagtcacgttagaatgcaatttatctaatctactaccccattttagcgtcagtggattggtaaatccctttgctagcaaggtactgtcagaatatttctccttcctttcaaataattgcaccaatatcttgccaatacttcacttgagattgttctacaatatccgctgtcttggaaagcaattttga

SEQ ID NO: 79053 - DNA, 1719 bp, Saccharomyces pastorianus
atgctgaggaattgtttgaggaaattgggaaatcatcaaacgaaatgttcggtaaaaacgttacacaccccaatctatagaacaaaaaaccttcaggttctcagagatacgctctctggtattaagctgttggaaaaaataataacttcatcctcctacaataaaacattaatatatgaacctaagtataaatccaagccacaggtcgttagttctcatgataccatgagacttcacaatgtaatgcgtgagttactggattccctacaagtagatgaagctaccaacacacgacttcaatcaaacaggcctcgaaagctggggagggttggtctacaattattcatggattgcattcgggacaacttaacagcaacttcaacatctttgacatgctctttactggagcactatttcaagtatcccgaaaaagaagtgaccaatgggatcaaggccggattacggtatatcagagattttcttgcgaagaacaagattatagtgaaaagccaaaacgatgttgatgttctggtcgagcaattgactatgtcctcctcagacagccaaagcatcaaaagggttttgaaagccattaattatgaattgttttcggatgacattgtgcgggtcataaacggcaacaaaacttacgatgaggttgatgtatccaagggttggaaatatccagctggtattttagatagtaatgaagcctatttaaggtccctggagttgcctactaagaaattagtttccattgataaagatatgctagttcttatgtatgatgggacgttacgagacgctaataaaattctacccacgataacgtatgcaagaaagttgagaaaatctgtcctcttaatcgttaacggagattgcacgggtgatgcattaacatccgttacaattaacaataacagaaacaagagagaaaataatgaaagccgaatagtggttttgaagtactctaaaaaggcgaacaatgacttagcgccacaggagaatcttgattttataaagttcttacggttgccttgcggatatgacagtatctactcaccagaatatagtcctttagtgccaagcaaaatgtgtgcggataaatattacggcagtatcgaatccataaaggcgaccacaggggaggcattcttatataactccattgacgctgaagcgattccaaataaagttccgaaatccttcctccaaaatacggtcactttaagcattggtggacataacgaaatcgaaatcgacagaagaagaaatgcaatagataattgcttaaataacgtcctatgtcatgggctggccaaaggtttcatcccaggttacggcatctccctactgaaggcaattccaggtttgaatgaactgaaagcaaatgaacccaatttcatgactaaggtaggcatcaatgctgttttatcagcagttattctcccatcagaagtggcgtttaagaatgcatatgggtacaactattatgagatcaatagcctgatagcaggcgctataaacgaaaaattgtttccaatggccaagttttctccaaattcagaaccggtgaacacagtaaaggatggaaacttggagccatggagcaaaatggattcttgtttagccggtgtagaaacgttcattgaattacttacaagctgtaatacaattatcacatgtgtatacaaaaagcctgaacggcacaaagcctag

SEQ ID NO: 79054 - DNA, 1449 bp, Saccharomyces pastorianus
atgagtgagaaagaaacaaattacgtggaaaatctccttacgcaattagaaaatgaacttaatgaagataacttgcctgaagatatcaacacactattaaggaaatgttctttgaatcttgtgactgttgtctcccttccagatatggatgttaaaccactactggctacgatcaagcgttttctgacgtctaacgtatcctatgattcattgaattacgattaccttttggacgttgtggacaagcttgttcccatggctgattttgacgatgttctagaagtttatagcgcggaggacttagtgaaggcccttaggtcagaaatagatccattaaaagtagcagcatgtagagtcattgagaattcgcagccaaagggtttattcgcgaccagtaatatcatcgatattctattggatattctatttgatgagaaagtggagaatgataagctcattacagcaatcgaaaaagcgttggaaaggttgagtacagatgaattgattaggcgtcgattatttgataataatttgccatacctggtgagcgtaaagggtagaatggaaacggtttcttttgtcagattaattgacttcttgactattgagtttcaattcatcagcggacctgagttcaaggatatcatattttgctttactaaagaagagatactgaaatccgttgaagatatcctcgttttcatcgaattggttaattattatactaagtttttgctggaaatacgaaatcaagataaatactgggctttaagacatgtaaaaaaaatactgccagtatttgctcaactttttgaagacacggagaactatcctgatgtcagggccttttctacaaattgtcttttacagttattcgcagaggtgtcacgaattgaggaagatgaatattctttattcaagactatggacaaagattctttaaaaattgggtccgaagcaaaattaataaccgagtggttggaattaattaatccgcagtacttggtaaaatatcataaagatgtggtcgaaaactattttcacgtcagtggctacagcattggaatgttgagaaatctttcagcagatgaagaatgtttcaatgctataagaaacaagtttagtgctgagattgtcttaagactaccgtacttagaacaaatgcaagtagtagaaaccttgacaagatacgaatacacttcaaaatttctgctcaatgaaatgccaaaggtgatgggcagcttgataggtgatgggagcgcaggtgctattatagatcttgagactgtacattataggaattctgccttgagaaatttactggataaaggtgaagaaaagttaagtgtatggtatgaacctttattgcgagaatactccaaagcagttaacggaaaaaattattccacaggcagtgaaactaagattgcagatgattatgttgcataa

SEQ ID NO: 79055 - DNA, 1695 bp, Saccharomyces pastorianus
atggatggtaacaaaaccatgttcagcctttcaacaattggtagaagaagccaaaaaaaaaaaaaaacagaaacgccaaccatgcacttttctttgaagcaattggctgtcgctgcgttttacgctaccaatttaggctctgcctatgtcattcctcaattcttccaggaagcctttcaacaagaagagccaattgagaattatcttccgcaattaaacgacgatgatagctctgccgttgctgccaacattccgaagccacatattccttacttcatgaaaccacatgtagaaagtgaaaaattgcaagataaaatcaaagttgacgatttgaacgctactgcttgggacctctaccgtttagctaactattctactcctgactacggtcaccctacccgtgtgatcgggtccaagggtcataacaagactatggaatacatattgaatgctttcgatgacatgcaggactactatgatgtttctttgcaagagttcgaagctttatccggtaagatcatctctttcaacctctctgacgccgaaaccggtaaaagctttgctaacactacagctttcgcactttctccacctgtggacgggttcgtaggtaagctagtcgaaattcctaacttgggatgtgaagagaaggattacgcctctgtagtcccaccaagacacaacgaaaagcaaattgcccttatcgaaagaggtaagtgtccttttggcgataagagtaatttggccggtaagttcggtttcaccgctgtggtcatttacgacaacgaacctaaatctaaagaaggactacacggtacattaggcgaacctaccaagcacactgtcgccaccgtcggtgttccatataaagttggtaaaaaattgattgccaatattgcattgaacatcgattattcattatattttgccatggactcttatgtagaatttatcaagacccagaacatcattgccgacacaaaacacggtgatcctgataatattgttgcccttggtgctcattcagactctgttgaggagggcccaggtatcaacgacgatggttccggtactatttccctattgaacgtcgctaagcaattgacccatttcaagatcaataacaaggtccgttttgcatggtgggctgctgaagaagaaggtttgctaggctctaacttctacgcttataacttgaccaaagaagaaaactccaagatcagagtatttatggactatgacatgatggcttctccaaactatgaatacgaaatttatgatgcgaacaacaaggagaaccctaaggggtctgaagagttgaaaaacctgtacgtagactactacaaggctcatcacttgaactacactttggtcccatttgacggtagatccgattatgtcgggtttatcaacaacggaattccagccggtggtattgccactggtgccgaaaagaataacgtcaacaacggaaaggtcttagacagatgctaccatcaattatgtgatgatgtctctaacttatcctgggacgcattcattaccaacaccaagttgattgctcactctgtggccacctatgctgactctttcgagggtttcccaaaaagagaaacccaaaagcacaaagaggtggacatattgaatgctcaacaaccacaatttaagtacagggccgacttcttgattatttaa

SEQ ID NO: 79056 - DNA, 582 bp, Saccharomyces pastorianus
atgtcgacgtcactgctcttttcactttcgccgtcatcttcgtcctctatgagattgcgtgcctcgaattcttttcccatattgaacttcttcttagatttggacgctacaccttcattatcatcgtcttctgcctcattatcggagctctcagcaccattgtcaatagtttctaggcccttttgcacaagagatgacccgcttccttctgatttgatgaatcctcttctaaaatcacccttctcacttacaaaattcccagccgccaatggaccgctagagataacgtgtgtgttatttaagtatttggccattcgcctttgctggccgccagcgccggttactcttttattcttgttattgaaatgtttcttgtcattacctctcttagattcctcctctagctttactttggacgcagctgcttctctttcttccttggactttcttgcaactgcttttggtttaaactttaatgagggcttggcagatcctcctccattggaggaggaatcttttaatgatggcaagcgcccatttcctttattactgctcatacttaatgaatgctatcccggttaa

SEQ ID NO: 79057 - DNA, 1866 bp, Saccharomyces pastorianus
atgaattctagctatacacagagatatgcactgccgaagtatatagcaatatcagattatcttttccatcggctcaaccaactgaacatacataccatatttggactctccggagaatttagcatgccgttgctggataaactatacaacattccgaacttacgatgggccggtaattctaatgagttaaatgctgcctacgcagcagatggatactcacggctaaaaggcttgggatgtctcataacaacctttggtgtaggcgaattatcggcaatcaatggcgtagccggatcttacgctgaacatgtaggaatacttcacatagtgggtatgccgccaacaagtgcacaaacgaaacaactactactgcatcatactctgggcaatggtgatttcacggtatttcatagaatagccagtgatgtagcatgctatacaacgttgattattgactctgaattatgtgccgacgaagtcgataagtgcatcaaaaaggcttggatagaacagaggccagtatacatgggcatgcctgtcaaccaggtaaatctcccgattgaatcagcaaggcttaatacccctctggatttacaattgcataaaaacgacccagacgtagagaaagaagttatttctcgaatattgagttttatatacaaaagccagaatccggcaatcatcgtagatgcatgtactagtcgacagaatttaatcgaagagactaaagagctttgtaataggcttaaatttccagtttttgttacacctatgggtaagggtacagtaaacgaaacagacccgcaatttgggggcgtattcacgggctcgatatcagccccagaagtaagagaattagttgattttgctgattttatcatcgtcattggttgcatgctctccgaattcagcacgtcaactttccacttccaatataaaactaagaattgtgcgctactatattctacatccgtgaaattgaaaaatgccacataccctgacttgagcattaaattactactacagaaactattagcaaatcttgatgaatctaaactgtcttaccaaccaagcgaacaacccagcatgatggttccaagaccttacccagcaggaaatgtcctcttgagacaagaatgggtctggaatgaaatatcccattggttccaaccaggtgacataatcataacagaaactggtgcttctgcatttggagttaaccagaccagatttccggtaaatacactaggtatttcgcaggctctttggggatctgtcggatatacaatgggggcgtgtcttggggcagaatttgctgttcaagagataaacaaggataaattccccgcaactaaacatagagttattctgtttatgggtgacggtgctttccaattgacagttcaagaattatccacaattgttaagtggggattgacaccttatatttttgtgatgaataaccaaggttactctgtggacaggtttttgcatcacaggtcagatgctagttattacgatatccaaccttggaactacttgggattattgcgagtatttggttgcacgaactacgaaacgaaaaaaattattactgttggagaattcagatccatgatcagtgacccaaactttgcgaccaatgacaaaattcggatgatagagattatgctaccaccaagggatgttccacaggctctgcttgacaggtgggtggtagaaaaagaacagagcaaacaagtgcaagaggagaacgaaaattctagcgcagtagatacgccaactccagaattccaaccacttctaaaaaaaatcaagttggatactgatctgatctctccgccctactaccagggaccctcatga

SEQ ID NO: 79058 - DNA, 1449 bp, Saccharomyces pastorianus
atgcctctatcaaaggtggagcactacctttcataccatacgcgcttactcttaccccatgttttgtctcttcagtcatcacatcgtgttgcatacatcttttcgctattatctgcggtgtcagctggcttcattactttgatatctctttactctcaaccgtggcagaaacatttaaattattccttatggcaaatcaacaccatcgctagtatgactaatttggggatgtacttgacgccaccaatcttggggatgatcgctgattctcatggccccattactttaagtcttttagccatcatagggttcatacctagctattcatatctggcttacgtttttaatcatccggagttatctctcggaggaaatggtgactcatcattcaatctatccatcatttgtttcgttttcataggtatatcaacaagcgctttatactttagcgctttactgacatgcactaagctatatcctcatacaaaactactatccattagcttaccaacgacatgttatggtatttcttctgtagtcggttctcaactgctaagaatcaaatggttctggtcctctaacgcaagttcttcctcgtccaatagtgacttaaacctgggaagagtattccaaacatttgccctcgtttatgtcgttattgggctacttgcatggatagccaccagcgtggtatcacttttgcattttaatgaagagcaagacaaccaaaaacggctggatgatcaaactgatgtggaacaatcaccgctgttagaacgaagtaatcatgttcaagaaaagtttacgcagacgatgctaaggatctttagtgatcctgtgacatatatcctagcggtatcaattttgttatcacttgggcccctcgagatgtttattgccaatatgggatcactgactaacctgctagtccaattagatgcgccaaccttatctacaaagttgttatccacatacgcgctatcttccacttttacgagattgctcacaggcgtagtggcagacttcttcgccaagaaaaaaatatcaattaaatggatcctgttgactttcctttcattaggggtatgtgcacaactgtttttattgaaaatgacctcttcagcgtcaccctgggggctagtacctacaggatcattggttggaattgtatacggtggacttttcactgtttatccgacgctggtcctgttagtatggggcgaacgctcattcgggactgtttacggtagcttactaattgcacctgctataggttctatgatattttgcatgttgtatgccaaattttacgattctcgctgtatgagtggcggaggagatctgcgaaatccgtcctgtatttcggctgtctacaagtacagcagtatcgcattcgttgtatccgctgttctttcagctgtagtattttggaaattaaaaagtagaaaa

SEQ ID NO: 79059 - DNA, 693 bp, Saccharomyces pastorianus
atgcctgcaggtcagagaaatgctagaattttaagcgttacaacgctattattgttgttagtgtttttcgtagcgcaaaatgcgaacttcttgacggtagagataaaagaggaaacttctaaagcatttagtactaatatggacaatatggctgcaggatcttccagggaatatgctgctatgccgacttctaccacgaataaggggagctctgaagtagacgaagaaattaatgaaataaaacagaaggtgggactccaacagcccatagcatcggttgatgatagtttgtcggccattaaaaacgataaagggtcgcgaataaccaaagcttttaatgttcaaaaagaatactccctcatactagacttgtctccgattataatatttagtaaaagcacctgttcatatagcaagggcatgaaggaactgcttgaaaatgagtatcagtttatcccaaactactatatcatagaacttgacaaacatggacatggggaagagctgcaagaatatatcaagttggtgaccggtagaggaactgttccaaaccttttggttaatggagtatcaagaggaggtaatgaagaaattaagaaactgcacactcaagggaaacttttagaatcattacaagtctggagtgatggtaaattctcagttgagcaacgtgaaaaaccttccaataattga

SEQ ID NO: 79060 - DNA, 366 bp, Saccharomyces pastorianus
atgtctgatattttggatgagattgtcatagaagatgttgtggcaaattgcccccaggagtttctgcaatatcataaatgcataagagataatgaggaaaatcctgggaagtgtaaagatggaagaatgatattatctacatgcattagagaaaaagtgcccagtgtgaaaagtatcatgagcgaatgtagtgagccaatgaagaaatatgaccaatgcattcgtgataatatgggtacaagaactattaacgaaaactgtctaggattcttacaggacttaaggaaatgtgcggaattgcaggttaaaaataaaaatattaagccttcaattaatggagtaaacttggaattaatcaaggactga

SEQ ID NO: 79061 - DNA, 1482 bp, Saccharomyces pastorianus
atggataagtacggacatatagctcatcaagaaggcgatgtttgttattatattccaaggctgttcaaatacaacagttattatagtgggacagaggacgttcgaatatttgttggagatttaaagtaccggatgagagtttctttgcaaatttgcgaaaagtattatgataggcggttgtcgatgttgttctggaaaaatcatcctttacagcaaatacaccttattggctgcatcattggactccagttcaaatggattgggaaacaagaatacattttttttcagttggacgattgtacttcagactcttcattggtgggttatactagtgacatgagattcttaacatgtaaagttaagaaggatagcatcctatcatgggggttgaacataaccgatttgataggcttaactcttcatgtctacgggcaagcaagtttgaactatcaagagcttcaagttgaatatttaagattatgctacagtttaacggaagaaatagatcattggaaaatcacaatgaacatgcgtgagcaacttgacacgccttggtccttaagcgattttgtaattggagaattgttcacgcaagagcaagagtggacacctgaggcatcacagattgaggtagtaaacccggattttgtaggtttagggtacaaaaccccagaaagtaaaagaaatgaaactactttcatcgagcaactgcaagaggaacgcttgaaggatgaattagaaattattagtccatacaatagcacagatacttcgaatagtgtgcattccttgtcatttcggtttgtatcgtctctaaaggattttcctgaaactcacttttcgaatccaggtgatcaaattgacaacggcaatgacgaacagttaaaaaaactagaatatcaaagcgctaatctacctgtgatgattcccaataggacatcagcaaagtcaaacttgatgtttatcctattaggactacaaatgaaagagatttctaattctgacctttacaaactaaaggaagtacgcagcgtagtaactagcttagcatcgtttttgtttcaacaacaaaatgttggcgtcatgaaatcttttgactctttggaaaaggaagcgtttcgagacctggttaatcgtctagtctgccagggtttgatcggactaaaagataaaacaagtgagacatttgatttgcttcctctaaaaaatctttttgaatatgctgaaaaacgtatattagttctaatgaagctacaatgttatacgggcactgtgcaattaagtcatgttcaggaaaagctacatttgccgtacataacaacgaacggcatcgttgatgttttcaaagaatgtcttaaaaggacaaagaaacagtatcctgaggtactaaaaaattggtggattgatcttgatccgaaaaatggtatggaagaccaaaacagtggaatattattacatttggaatacgcagcatattcataa

SEQ ID NO: 79062 - DNA, 3729 bp, Saccharomyces pastorianus
atggccccagctacccctaaaacttctaagactgcacacttcgaaaatggctccacatcttctcaaaagaaaatgaagcaatcgagtttgttatcttttttctcaaaacaggtaccttctggcacaccgtcaaagaaggtccagaagcctactccagcgactttagaaaatacagctactgataagataacaaagaatccacaaggaggaaagacaggcaaacttttcgtagatgtagacgaagacaatgatttgacaatagctgaagaaacggtatcaactgtaaggagtgacataatgcattctcaagagccccaatctgatactatgttaaatagtaacacgacagaacctaaaagtaccactacggacgaggatttatcatcttcccaatctcgaaggaatcacaaaaggagagtgaattatgccgaaagtgatgatgatgactcagatactacattcactgctaaacggaagaagggtaaggtagttgatagtgaaagcgatgaggatgaatatttaccagataaaaatgacggcgatgaagatgacgatattgcagacgacaaagaggacatcaagggagaattggcagaagatagtggtgatgacgatgatttaatctctttggcagaaacgacttctaagaaaaaattttcaaacaacacttcgcattcttcatcgccctttacaagaaatatatcccgtaataactcaaaaaagaaaagcaggccaaatcaggcaccaagtagatcatacactccttctcatagtcaaccatcagcgacttctaagtctagcaaattcaataaacaaaatgaagaacgatatcaatggttagtggatgaacgagatgctcagcgccgtcccaagagtgatccagagtacgatccaagaacactgtacatcccatcttctgcatggaacaagtttactccgtttgaaaaacaatattgggaaattaaatccaaaatgtgggattgtattgtctttttcaaaaagggtaagttctttgaattatatgaaaaggatgcattattggctaatgcattatttgacttaaagattgcaggtggaggacgtgctaatatgcaactagctgggataccagagatgtcatttgaatattgggccgctcaatttattcaaatgggatataaagttgcgaaagtggatcaaagagagtcaatgttggctaaagaaatgagggaaggttctaaaggtatcgttaaaagagaactccagtgcatattgacatcgggtacattgactgatggagatatgttgcattcggatctggctactttttgtcttgccatcagggaagaacctggtaacttctacaatgaaactcagctagattcatcaacgatagtgcaaaagctgaatacaaaaatattcggtgcagcattcattgatactgcaactggtgagcttcaaatgctggagtttgaagatgatagtgaatgcaccaaattggacacattaatgtcgcaagtaagacctatggaggtcgtcatggagaggaataacttaagcacactagctaacaaaattgtaaaattcaattcagcacccaatgcaatttttaatgaggttaaagccggtgaagaattttatgactgcgataaaacctatgctgaaatcatatcatcagaatacttttctacggaagaagattggccagaagttttgaaatcctattatgatacgggtaaaaaagttggctttagtgcatttggtggattattgtattatttgaagtggttaaaactggataagaatttaatttcgatgaaaaatatcaaagagtacgattttgtaaaatcgcaacactccatggttttagatggtatcactttacagaacttggaaatattttccaattcgtttgatggttctgataagggtactttgttcaaattattcaacagggctattactccaatgggtaagagaatgatgaaaaagtggttaatgcatccattattacgtaagaatgatattgaaagcaggctcgatagtgttgactctttgttacaagatattactttaagagaacagctagagataacattttcaaaattgccagatttggaaagaatgttggcccgtatccatagtaggacaattaaaatgaaagattttgaaaaggtaattaccgcttttgaaacgattattgaattacaagactctttaaagaacaacgatttgaagggagatgtttcaaaatacatatcctctttccctgagggacttgtggaagctgtcaaaagctggactaatgctttcgaaagacaaaaagcaatcaatgaaaatatcattgtaccccaaaggggatttgacatagagtttgataagtcaatggatagaatacaggagctagaagacgaattgatggaaattctgatgacttataggaagcaattcaaatgttccaatatacaatataaagattccggaaaggagatatacactattgaaattcctatctctgcaactaaaaatgtcccatcaaattgggttcaaatggctgcgaacaaaacgtacaaaagatactactctgatgaagtaagagctttagcaagatcgatggcggaggctaaagaaatacacaagacgttagaggaggacctaaaaaatagattatgtcaaaaatttgatgcgcattataatacaatttggatgccaaccatacaggccatctctaacatagattgtttgttagcaattacaaggacatctgaatatctaggtgctccctcttgtaggccaaccattgtagatgaggtggactcgaaaacgaatactcaattaaatggttttctgaaatttaaatctttaagacatccatgctttaacctcggcgctactacagcaaaggacttcattcctaacgacattgaattaggtaaagaacagcccagattaggattgttaacgggtgccaacgcagctggtaaatccacgatattgaggatggcatgtattgccgtaattatggcacaaatgggatgttatgttccttgtgaatctgccgttctgacgccgattgatagaatcatgactcgtttaggcgctaatgataatatcatgcaaggtaaatctactttttttgtggaattggcggaaacaaaaaaaatattagacatggctaccaataggtcattattagttgttgacgagttgggaagaggaggttcatcgagtgatggttttgcaattgcagaaagtgtgctacatcatgtcgcgacacatattcaaagtctgggcttttttgccacacattatgggacattggcatcaagtttcaagcaccatcctcaagtaagaccactgaaaatgagcattctagttgatgaagcgactaggaacgttacatttttgtataagatgcttgaaggacaaagtgaaggctcttttggtatgcatgttgcgtcaatgtgtggcatttcaaaggaaattattgataacgcgcagattgccgctgataatttagaacatacttctaggctagtcaaagaacgtgatttagctgcaaataatttgaatggtgaagttgtctctgtgccaggtggcttacaaagtgatttcgttcgaattgcgtacggagatggactgaagaatacaaaattaggttctggtgaaggggtcttgaactatgattggaacataaaaaggaacgttttgaaaagtctatttagtataattgatgctttacaattctag

SEQ ID NO: 79063 - DNA, 2949 bp, Saccharomyces pastorianus
atgtcctcacgtccaagttcagcagtgcctaattcggcatcactcagtgaggaccagagcagtgatagaagtaaatttcctaaggcagatgacttaattgatgaaagagatagaaaactgaccgaactatactgcgtatcccgcttgaaccagctgctagagttaacagatgaaaacaaacttcggaaggaaatagatgcatttttaaagaaaaacgatatacgaaggggtataaggtttgacgaggcgtcactgccgaagctcctacatacagctgcgactcccataacaaaaaagaaattgaaggatgtaaatttaataaatgtacctaaccagaggctatccgattctaaaatgagtagggaactgccagacaatagcgaaaatgtatcagtcaaatcagagagtcattttgttccaagccacgataattcaatccgtgaaaatatggtggattctttgaggccagctgaaaagacaggaggtatgtggaacaaaaggccactcgagtcaactatgggaggtgaagaagagcgacatgaaaaaagacagaagatgcaatctcagtcattggaatcttctaataattcggaaatggcttcattacctatttcgccgcgtcccccagtgcctaatgcattagcacactacacttattatgagaacatcgagtacccaccagcagatcccactgaggtgcaacctgcagtaaaattcaaggatccgttgataaagaacattatggcaaaagagatagatacatcagaccattataacgagaacaatgttgacgcatcagagaccgtatttttattaatgaacgattatataccatcgaaaataccccaggctttgcccttagcagaattgaagtacatgtcacaaactctgcctcttattaatctaataccgagagctcacaaggctttgaccactaatattataaataacgccttaaacgaggccagaattactgttgttggctcgcgaatagaagaactaagaagacttggattatggtctttaagacaacctaaaagattcatcgatccgtggaaacaacacaatacgcatcaaaacatacttttagaagaagctaaatggatgcaagcagattttaaagagggccacaaatataaagtagctatctgcacagcaatggcacaggcaatcaaggactactggacctatggggaaatatgctgtgtaaaacgtaaaacacttccacctggtaaggaaaataaattatctgacgacgggcgcatatctgaaaagtccggtagaccatcagatacttcaagaaatgattccgatattagcatagccggtaaggatgacattggaattattgcgaacgttgacgatattactgaaaaagaaagtgctgctgctaacgataatgatgagaatggaaagaatgaagcaggagctaggagtgattttgattttgcagatggtttgttatctcaagaaggtgcccacgatcaaattatatcttctattgacaccaagttacttctaaaaaagccatcctcctcaagcgaagttgttttaatacaacatgaagtagctgcatcatcagcgttgatcgaaaccaaagaatcagagaaagagctagcccccccatttaaactttcaatctttgttgacgaactcaatgcttttgagaaaacattaatacaggatttaccgctgtataatggtattaatgaagaacggccaaaaaaagatgattctttaccatttattccaatttccaaatcagtagtgtcactggatgataatggattttataagttacttgagcgtcaattgattgacgaagaaccatcaatatcacaattgagcaaaaggcggggtatgttctatggtaatagaagaaatcattatttaagaccaccagcagtaccttcattacgctatcttcaaaatagaataccgactatatggctgtctgaggacgatcaggaactggtcaaaaatattaacacatatggctacaattgggaattgattagtgcacatatgacacatcgcctcacatattcttatttgtcgaatattgaacgtagaacgccatggcagtgttttgagcgttttgtacaattaaatgaacgattcaattttagtgacctcaagggtcccagagcacatagtgctcaacagtggttgattgaagcccataaatttcagcagagacagaatagaagaatatcgcctttaggtgtaaatacagaatccatacaaagaggtcataggagactccgttgggcgagcatgtttgaggcgattagaaaatgtatgaaaaaaagagaaaatacgccgcgtcccaatccaacccagccaaggaaaccgttagattgtaaaaacatgaaggtccctaccccagcagaaatgtcgcttttgaaagcccaaagagatgaggcattgagaagggatatacaattgagaagaacagtgaaaaatagattacaacagaggcaacagcaaagtcagcaggcacattcatcgcgagctcaaagtccaataccttcaaatggcaaatcttcttcaaatttggctagaaatgggcaagcgtcggctccaagaccaaaccagaaacagtatactgagcaagatatcattgaaagttactcgaggaagttgttggagcaaaaaccagacattggtcctgagatggcccttaaggcggcaaaaaactattatagaaccttgagagaacaacagcaacagctaaagcagcaccagattcaacagcaaaggcagcagttacaggaggagtccagtcatgtgcagcaactgcagcaactacaaccagggtctcaagctccgccaccgaaatcatctccatctcaatcttctctttccaatatttctaacattaattctgctccaaggataaagtcaccaactccacaggagattttacaaaggttccaaaaacaatga

SEQ ID NO: 79064 - DNA, 495 bp, Saccharomyces pastorianus
atggaagaaaagagagaaataatgtctgacgaagcaaaggaaaagcgtgaattagaaagccaaaaggaattaagtcataataaatccgaaaagtctgtggaacctaagccaaagagaaggagaagaagaaactatgacgattatgacgctgaagtagcaaaagaggagactaaggctaaaaatggtttgacgaagagcgaaaataatggtactgttgaagattctgaatctgatatggacgatgccaagttagacgcattgatgggaaatgagggagaagaagaagaggacgatttggcagaaattgatacctctaatatcatcacatccggaagaagaacacgcggcaaagtaattgactataaaaagactgcagaagaattagacaagaaggaacctagcacagactctaaagatgatgtaggatatggtgaaaaagaagaagacgaagaagacgaagaagacgaagaagacgatgattttaaagagcagtaa

SEQ ID NO: 79065 - DNA, 387 bp, Saccharomyces pastorianus
atggaagagctcatttgtacatatccatatcattcaaatcttttcatgttcctattcttgttcttttgtcccagcaaacgcacacggcggggtcaccccaaatttttatttaccttatgttataagagcaaccatctcatccccaaacttctccctccctcccttttcacaaagagagtaatgctcaacccaagtagccatccgccttccccggattttcccacaggatcttctgcaagtcctagggtcaaactgagaccatccacgttgtgggcaccaccactcacagtatcctctgcctttgcggcttccagtagttctactgcccctgtcaccgtcacagataaacctgtcacacccgctgtatcaaagcggtatcaacgttaa

SEQ ID NO: 79066 - DNA, 705 bp, Saccharomyces pastorianus
atgaaagcagacgcgaaacaaataacacatctactcaaacctcttcgacttttattattgggggctccagggtcaggtaaagggacacagacttcgagattactaaagcaaattccacaattatcttcaatttcgtcaggcgacattttacgtcaggaaataaaatctgaatctaccctaggccgagaggctactacctacattgctcaaggcaagttattaccggatgatctcataacgcgtctgataacttttcgtctttcggcattgggttggttaaaaccatctgccatgtggttgctcgatggatttcctcgaactactgcgcaagcttctgccttagacgagctgctgaaacagcatgacgccagcttgaatctagtggtagagctagatgtacccgaatccaccatattagaaaggatcgagaacagatatgttcacgttcctagtgggagagtgtataacttacaatataatcctcccaaagtgccaggattagacgatatcaccggagaaccattgaccaagaggcttgatgacacagcggaagtgtttaaaaaaaggctagaagagtacaagaaaacaaatgagcctttaaaagattattacaaaaaaagtgggatttttggtaccgtctctggggaaacatcagatattatcttcccgaaattattgaaccttataaccagcaaattcggctaa

SEQ ID NO: 79067 - DNA, 486 bp, Saccharomyces pastorianus
atgattgtaaggttacatgcaatatatcaagatattactagagattatttaccgccagcttctctaaaccacctgatacttctatctaaacaaacacagcataaactttcatttaaatcagctcccataccagatctccaaccttttttcaaaaacttcacgtcaaagacaccaggttcagctaaagaatctccatgttcatcaacagctaagatatcctcttcaatttcaatatcatcacaatgcatattcaatgtagtgattctttcctttgtttttatatcccaaaatctcaatttaccatcccatccggcactgcataatgtttcaccagaatcattaaacgatagactcatgacccagctagaatgtgcaaattcacccagacttgcctgcgagctatgggttggtacggataaggagcctattctttcaccaaattcagtttcatatagagtgatgcaaccaaatgaatttgaatcgtga

SEQ ID NO: 79068 - DNA, 306 bp, Saccharomyces pastorianus
atgtacatcgtatatgaatatgccatttcaacaaattggatatggttgtatgtttggctttttcttttcctggattccggctgtcaaatactactacgaatagagtcagaacaggcttttctgtcccttcctcctattgtttcctttgctctgtccgtggctactctcatctttttctattctaagagaatttccatctgttaccacatgcttcacatgtacagaaagtggtcaatggttcatccgcagatcttgtttgcaattgatagtaagataccttcttctctttacatttaccacaagtaa

SEQ ID NO: 79069 - DNA, 2751 bp, Saccharomyces pastorianus
atgactgataatacatcctcttcatcctctgcatcctctgcttccgctcatcagcctactcaagaaaagcctgccaagacttacgatgatgctgcatctgaatcctcagatgatgatgatattgatgctttaatcgatgaattacaatctaccccaggtgtcgaaggttccgaaagtgaagacgacggtccagtcgctgccggtgaagctagattagttccagaagaacttttacaaaccgatccatcttatggtttgacttccgatgaagtcatgaaaagaagaaagaagtacggtttgaatcaaatggctgaaaacaatgaatctttagttgttaaattcatcatgtttttcgtcggtccaattcaattcgttatggaagccgctgctattttggctgccggtttgtccgattgggtcgatttcggtgttatttgtggtttgttaatgttaaacgctggtgttggtttcatccaagaattccaagctggttctattgtcgaagaattgaaaaagactttggctaacactgctgttgttatcagagacggtcaattagttgaaattccagctaacgaagtcgtcccaggtgatatcttgcaattggaagatggtactattatcccaacagatggtcgtattgtcactgaagaatgtttcttgcaaattgatcaatctgctattactggtgaatctttggccgtcgacaaacattacggtgaccaagctttctcctcttctactgttaagagaggtgaaggtttcatggttgttaccgctaccggtgacaacactttcgttggtagagctgccgctttggttaacaaagcctctggtggtcaaggtcatttcactgaagttttgaacggtattggtattatcttattggttttggttatcatcactttgttggttgtctggactgcttgtttctacagaactaacggtattgttagaatcttgagatacactctaggtattaccattatcggtgtcccagtcggtctaccagccgtcgttaccaccactatggccgtcggtgctgcttacttagccaagaaacaggctattgttcaaaaattgtctgctattgaatctttggccggtgtcgaaatcttgtgttccgacaagaccggtactttgaccaagaacaagttgtctttgcacgaaccatacactgtcgaaggtgtttctgctgatgacttgatgttgactgcttgtttggctgcttccagaaagaagaagggtttagatgctattgataaggctttcttgaaatctttgattcaatatccaaaggctaaggacgctttgactaagtataaggttttggaattccacccattcgaccctgtctccaagaaggttactgctgttgttgaatctccagaaggtgaaagaattgtttgtgttaagggtgctccattattcgtcttaaagactgtcgaagaagatcacccaatcccagaagatgtccatgaaaactacgaaaacaaggttgctgaattggcttctagagggttccgtgctttaggtgttgctagaaagagaggtgaaggtcactgggaaatcttaggtgttatgccatgtatggatcctccaagagacgatactgctcaaactgttagtgaagctagacatttaggtttaagagtcaagatgttaactggtgatgccgtcggtattgctaaggaaacttgtagacaattaggtttgggtaccaacatttacaacgctgaaagattaggtctaggtggcggtggtgacatgccaggttctgaattggctgattttgttgaaaacgctgatggtttcgctgaagttttcccacaacataaatatagagttgttgaaattttgcaaaacagaggtttcttagttgctatgactggtgacggtgttaacgatgctccatctttgaagaaggctgataccggtattgctgtcgaaggtgctactgatgctgccagatctgctgctgatattgttttcttggctcctggtctatctgctattattgatgctttgaagacctccagacaaattttccacagaatgtactcttacgttgtttaccgtattgctttgtctctacatttggaaatcttcttgggtctatggattgctattttggataactctttgaacatcgatttgattgttttcatcgctattttcgctgatgttgctactttggctattgcttacgataatgctccttactctccaaagccagttaaatggaacctaccaagattatggggtatgtctattatcttaggtattattttggcagtcggttcatggattaccttgactactatgttcttaccaaagggtggtattatccaaaacttcggtgctatgaacggtattatgttcttgcaaatttccttgactgaaaactggttgattttcattaccagagctgctggtccattctggtcttctatcccatcatggcaattagctggtgccgtcttcgctgtcgacatcatcgctaccatgtttaccttattcggttggtggtctgaaaactggactgatattgttactgtcgtccgtgtctggatctggtctatcggtatcttctgtgttttgggtggtttctactacgaaatgtccacttctgaagcctttgacagattgatgaacggtaagccaatgaaggaaaagaagtctaccagaagtgtcgaagacttcatggctgctatgcaaagagtctctactcaacacgaaaaggaaacctaa

SEQ ID NO: 79070 - DNA, 1545 bp, Saccharomyces pastorianus
atgaagtcaaaagggagtcggttgtcaacagactgtcctgtcgaatttcccaagatagtctatggattcgctgaggaagtgaaaatacgtagacaaagttcccaaggacagtacgccgtcgattcacatcctccgaaaagccctgaactgaaacacagaagacagaggtcatcctcttttgttaacggtaaatgcaggaacagggaccttccattgttagataacaagaaagcacaagaaataaacaccaattcacacggccaagacatcggtatcaaaaacttaccacgtcaacgtgagttgttgaatgccaaaaatggaattgattttacgctgatggtggcgggtcaaagtggattgggtaaaaccacgtttatcaattccttattttctacttctttaattgatgatgacatcaaagaaaacaaacctattattcgttataaaagcattgtagaaggagatggaacacaccttaatttcaacgtcatcgatacacctggttttggtaacaatatggataatgcatttacgtggaggacaatggttaactatattgatgaagaaataagatcgtacattttccaagaagaacaacctgataggacaaaaatggttgataatagagtccattgttgtttgtactttctgagaccttcaaataagggaattgatactttagacgtcgtaacaatgaaaaaattagcgaagagagtgaatttaatcccggttattgctaaatcagatttgctaacgaaagaggaattgaaaaacttcaaaacacaagttagagaaataataagagtacaagatatccctgtatgtttctttttcggcgatgaagttttgaatgcaacacaagatatttttcaaaaatatccattcagtataattgcatctaatgagtacatttttaatgaaaagggcgaaaaagttaaaggaagacaatacaaatggggcgctgttgacattgaaaatgaaaagtactgtgacttcaaaatcttgcaaaagacgatttttgattggcatttaattgatcttgtagaaagtaccgaggattattacgaaaaatgtagatctgaaatgctaagaactaggctattaaaggccagagattgcttaacaacgaaaagtgttgatataacggaagaacaaaggaaatttttggaggaagaaatgaacttcgatgaaatcgaggaaaacaaactcaaaaattacaagtgctatgaaataattaataaaacggtcatggataaggtggccacagaatgggatcctgaatttataactagacaattagaagctaagaaaaaattcaacgagctgtccaacagagaaatttcaaaatttcgagactgggaaaagagcctattcatgggaccagagaattttaacccagagattggaccattgaatcaccagttgggaaacttaccactggaatgtccggacttgggaaacaagctgtttatcgggaaaagttcccacaaccattccacagatagtgctactttagttaacgttcacatccaaagggaggattaa

SEQ ID NO: 79071 - DNA, 1524 bp, Saccharomyces pastorianus
atgactaaatctgagcagcaagccgattcaagacataacgttatcgacttagttggtaacaccccattgatcgcactgaaaaaattgcctaaggctttgggtatcaaaccacaaatttatgctaagctggaactatacaatccaggtggttccatcaaagacagaattgccaagtctatggtggaagaagctgaagcttccggtagaattcatccttccagatctactctgatcgaacctacttctggtaacaccggtatcggtctagctttaatcggcgccatcaaaggttacagaactatcatcaccttgccggaaaaaatgtctaacgagaaagtttctgtcctaaaggctctgggtgctgaaatcatcagaactccaactgctgctgcctgggattctccagaatcacatattggtgttgctaagaagttggaaaaagagattcctggtgctgttatacttgaccaatataacaatatgatgaacccagaagctcattactttggtactggtcgcgaaatccaaagacagctagaagacttgaatttatttgataatctacgcgctgttgttgctggtgctggtactggtgggactattagcggtatttccaagtacttgaaagaacagaatgataagatccaaatcgttggtgctgacccattcggttcaattttagcccaacctgaaaacttgaataagactgatatcactgactacaaagttgagggtattggttatgattttgttcctcaggttttggacagaaaattaattgatgtttggtataagacagacgacaagccttccttcaaatacgccagacaattgatttctaacgaaggtgtcttggtgggtggttcttccggttctgccttcactgcggttgtgaaatactgtgaagaccaccctgaactgactgaagatgatgtcattgttgccatattcccagattccatcaggtcgtacctaaccaaattcgtcgatgacgaatggttgaaaaagaacaatttgtgggatgatgacgtgttggcccgttttgactcttcaaagctggaggcttcgacaacaaaatacgctgatgtgtttggtaacgctactgtaaaggatcttcacttgaaaccggttgtttccgttaaggaaaccgctaaggtcactgatgttatcaagatattaaaagacaatggctttgaccaattgcctgtgttgactgaagacggcaagttgtctggtttagttactctctctgagcttctaagaaaactatcaatcaataattcaaacaacgacaacactataaagggtaaatacttggacttcaagaaattaaacaatttcaatgatgtttcctcttacaacgaaaataaatccggtaagaagaagtttatcaaattcgatgaaaactcaaagctatctgacttgaatcgtttctttgaaaaaaactcatctgccgttatcactgatggcttgaaaccaatccatatcgttactaagatggatttactgagctacttaacataa

SEQ ID NO: 79072 - DNA, 2280 bp, Saccharomyces pastorianus
atgagtaaagtcaagggaacgggattttcgtcaattgatactgaagatgaaaacttacgcgaacgttatgttaatcaatcaaaagctaatgcctccgatattcaagatgaacaattagattgctttgagcaactggaagaaaaacataggacaaaaaaaaatgaagaatacactgcgttgaaaatcttaagggatgtcataggtccccttttattaactataacttcgttttatctaagattccaacgtatagatcagaacaattatgttgtctgggatgaggctcattttgggaaattcggatcatactacatcaaacatgagtactaccacgatgtccaccctccacttggtaaaatgcttattgcattgagcgaatggatggcaggatttgacggtcaatttgacttttcctctaataatgcatatccggaaaacgtaaactttaaactaatgagacaatttaatgccacatttggagctctatgtacaccagtggctttctttacagccaaatggatgggatttaattatttcactgtttatttgattgctacaatggtaacgttggaacattcatacattgtcctgtcaaaattcatattactagattcaatgctgctttttttctcgatgacgacttttgcctgtatgataaagttgtatacgttgagaaagcaacaaatgacgaaaaaatggtcgttatggatgttattaactggtttatctattggctgcgtttgttctgtgaaatgggttggtctttttatcacagttgtagtcggcctctacacatgtatagaactatttttgctctattgtgataaagaattgcctagaataaaatattacaaacattggcttatcagaatcattaatctgatagtaattccttttcttatctatctctattgcttcaaaattcactttgtgttgttgtacaaatctggcacgggggattctactacaaatacgttatttcagataaacttggagggaactcagattgaggcgggtcctcgtgatgtagcatttgggtcagagttaaccataaggtcgcatggtttaagcccgaatctgctgcattcacatattcaagtatacccagaaggctctggacagcgccaaatcactggatatggattcgcagactctaataatgtttggaagtttgaattttctaggtcttctggattggaactagatcagaacgggactttgaatggcaaaataatcccaataacggatggtgtggaagttcgtctcagccataaaaatacaggatcgaatcttcactcgcatgatgtaccttctcacgtctctagaggaaattatgaggtttcaggctatgggtcacaaagtgttggcgatgaaaaggatgattggatagtggagattgtgaaacaaatggattcaccaaatcccgtctattctaatgagaattcaactattttacatccagtttctactttcttcaggttgagacacaaagttttaggttgttacttggcttctactggattgacgtatccagcttggggatttaaacaagctgaaatcgtctgcaaagactcctggagtcgtagggacaaatcgacctggtggaatgtagaagatcactggaaccacaatttagaaaccgcagaagattacgttccaccaaaatccaatttttggaccgattttattctaactaattttgccatggcctcctctaataacgcgttagtgcctgatgaggataaatatgatagtttatcgtctgatgcatgggaatggccaaccttacataaagggctaagaatgtgttcatgggcgggatatatcactcgatattacttgatgggatctcccttcaatacatggatttctactgtctccttaatcatcttcccatttattattctttttatattataccgttggaggagacaaacgctttatctctcagacgatcaaatctggcaaataacgatacagggtattttccctttcatttcctggatgacacattatctgccttttgcaatgatggggagagtgacgtatgtgcatcactacgttcccgctttatattttgcaatgcttgttttcggatttgtgcttgatttcactttgacaagagtccattggatggtcaaatatcccatctatttgtcattgtttggcggatgtatatacatttataatttatttgctccaatatgtcagggtatgcatggtgataaagcggaatacttacctttgcaatggctatctacttgggatatcgcattttac

SEQ ID NO: 79073 - DNA, 690 bp, Saccharomyces pastorianus
atgtctaataattatcctttgcatcaagcctgcatggaaaatgagtttttcaaggtacaagagctgctacactccaaaccttccttgttgctacagaaggaccaggatggcagaatccctttacactggtcagtttctttccaagcacatgaaattaccagttttttgctttctaaaatggaaaatgttaacttagatgattatccagatgattctggatggacacctttccatattgcttgttcagtggggaatttggaggtggtaaagtctctttacgacagacctctaaagcctgatctaaataagataaccaatcaaggagttacatgcttgcacttggcggttggtaagaaatggtttgaagtatcccaatttttaattgaaaatggtgcgtccgtaagaattaaagataaatttaatcaaattccattgcatagagctgcgtcggtgggttctttgaaattaattgaactattatgcggtttgggcaaaagccctgtaaattggcaggataagcagggttggaccgcactatttcatgctttggctgaagggcacggtgacgcagctgtattgttggtggaaaagtatggtgcagaatatgatcttgtagataataaaggcgctaaggcagaagatgttgcccttaatgaacaggttaaaaagtttttcctaaataatgtataa

SEQ ID NO: 79074 - DNA, 369 bp, Saccharomyces pastorianus
atggtcaaattaacttcaatcgctgctggtgtcgctgccatcgctgctactgcttctgcaaccaccactctagctcaatctgacgaaagagtcaacttggtggaattgggtgtctacgtctctgatatcagagctcacttggcccaatactacatgttccaagccgcccacccaactgaaacctacccagtcaaagttgctgaagccgttttcaactacggtgacttcaccaccatgttgaccggtattgccccagaccaagtgaccagaatgatcaccggtgtcccatggtactccagcagattaaagccagccatctctagtgctctatccaaggacggtatctacactatcgcaactagggagtga

SEQ ID NO: 79075 - DNA, 1854 bp, Saccharomyces pastorianus
atgtctaaacaatttagtcataccaccaacgacagaagatcatcgattatctactccaccagtgtcgggaaggcagggcttttcacgcctgcagactacatcccacaggagtcagaagaaaacttaattgagggcgaagagcaagagggtaatgaagaagaaccttcctataccggcaatgacgatgagacggagagggaaggtgaataccattcgttgttagatgccaacaattcgcggacattgcaacaagaagcgtggcaacaaggttatgactctcacgaccgtaagcggttgcttgacgaagaacgggacctgctaatagacaacaaactgctctctcaacacggcaacggtgggggagatatagaaagtcacggacatggccaagcaattggaccggacgaggaagaaagaccagctgagattgcaaatacgtgggagagcgcgatcgagagtggtcagaaaatcagcacaacttttaagagagaaacgcaagtgatcacgatgaatgcgttgccgctaatcttcacctttatcttgcaaaattcgttgtcactagcatctattttctccgtctcacatttagggacgaaagagctaggtggtgttacactcggttctatgactgctaacatcacgggtcttgctgctattcaaggtctgtgtacatgtctggacacactgtgtgcgcaggcatacggtgccaaaaactaccacttggtgggtgtgctagtgcagagatgtgccgtgatcaccatcttggcgttcttgcccatgatgtatgtttggtttgtttggtcggaaaagatcctagcactcatgattccggagagagaactatgcgcgctagcggctaactatctacgtgtaaccgcattcggtgtgccaggattcatcctttttgaatgtggtaagaggttcctacaatgtcaaggtatattccatgcatccacaatcgtgctctttgtgtgcgcacccttgaacgcattgatgaactacttacttgtttggaatgacaagattgggattgggtaccttggtgcgccattatcggttgtgatcaactactggttgatgacgctcggattactaatatacgcaatgaccaccaagcacaaggagagaccactcaaatgctggaatggtatcatccctaaggaacaagcatttaagaactggcgtaagatgattaacctagctattcccggcgtggtgatggtggaggcagagttcctcggatttgaagtgttgacagttttcgcttcccatctgggcaccgatgccttgggcgctcagtcgattgtggctacgattgcgtctcttgcataccaagtgcctttctctatctccgtttctaccagtacacgtgtagccaattttatcggcgcgtcgctatacgacagctgcatgatcacgtgccgcgtgtccttattgttgtcctttgtgtgctcctcaatgaacatgttcgttatctgccgttataaggaacaaatcgcaagtctattttctactgagagcgctgtagtgaagatggtcgtggacacactacctcttcttgcgttcatgcaattattcgatgcctttaatgcgtccaccgccggatgcctacgtggtcaagggagacaaaaaataggtgggtacatcaacctagccgcattctactgtctaggtgtgcccatggcatatgtgttagcattcctgtatcatctgggtgtaggcggcttatggttgggtataactagcgcgttggtaatgatgagtgtgtgtcaaggatacgccgtttttcatggtgacagacgccgtattctcggagcggcacgcaagcgcaatgctgagacccatacatcatga

SEQ ID NO: 79076 - DNA, 696 bp, Saccharomyces pastorianus
atgatgattttaaccacagctagattaaattgtagaccagttaccgttcctcgtctatttaatcgttcttttagtcaatctttcataattttgaagaaaaaaagttctgcccctactgagaaagtcgaagaagatgaaattgacgtgaatgaactgctgaaaaaggcagaaactcaattcaaaaaaactttagaagttcaaaaacagaaaatgaatgaaataaaacagggaaattttaatcctaaggtattcaatagtttggtgttcaaaaataacagaaagtttacagatattgctaccacatccttgaaaggtaaaaatgcacttttaataacagttttcgaccccaaagatgtgaaaactgtgatcagtggggtgcttgctacgaacctgaatttaactcctgaaagggtcccaaataacgatttgcaattgaaagtttcgttaccaccaccaactacagaatcccggttaaaagtagctaaagacttaaagagagtatttgaagaatataagcagtcatcgctaaaagactcattaggaactatcagaggcagtattctaaaggaattcaaaagtttcaaaaaggatgatgccgttcgaaaagctgagagggatttggaaaaactgcataaggattacgtgaacaagcttcatgaccaattccagaaagttgaaaaaagcattgtaaaatga

SEQ ID NO: 79077 - DNA, 534 bp, Saccharomyces pastorianus
atgagtgaaacaaggatggcacagaacatggatactacagatgaacagtacctgagacttattgagctactctcaaactatgattccaccttagagcagttgcagaaggggttccaggatggctacatccaattgagcagatcaaactactataataaagactcattacgaggaaactatggtgaagattactgggatgaaacgtatataggtcaactaatggcaacagtggaagaaaaaaactccaaggtagttgtcgaaatcgtcaaaagaaaagctcaagataagcaagaaaagaaagaggaagaagataataaattgactcagagaaaaaaaggaacgaagccagaaaagcaaaaaactcagagtcacaaacttaaacaagactatgacccaattttgatgtttggtggagtactgtccgttccttcttcattgagacaatcgcagacaagtttcacaggttgtattcccttaatagcccaattgattaattacaagaacgaaatattaacgttggttgaaacgttgtct

SEQ ID NO: 79078 - DNA, 1731 bp, Saccharomyces pastorianus
atgtctgaagaagctgcctatcaagaggatacagcagtccaaaatactccagctgatgctttgtcgccagttgaatccgattctaattccgctttgtctactccatccaacaaagctgaaagagatgacatgaaagatttcgacgagaatcacgaagaatctaataactacgttgaaattccaaagaagcccgcctccgcctacgttacagtttccatctgttgtttaatggttgctttcggtggttttgttttcggttgggatactggtaccatttctggttttgttgctcaaactgattttatcagaagatttggtatgaagcaccacgatggtacttattatttgtctaaggttagaactggtttaattgtctccattatcaacattggttgtgccattggtggtattattctttccaaattgggtgatatgtacggtcgtaaggtgggtttgattgtcgttgttgtcatctacatcatcggtatcattatccaaattgcctcgatcaacaagtggtaccaatatttcattggtagaattatctctggtttaggtgtcggtggtattgccgttttatctcctatgttgatttctgaagtctctccaaagcatattagaggtactttggtttcatgttaccaacttatgattactttgggtattttcttgggttactgtacaaactacggtaccaagacctacagcaattctgttcaatggagagttccattaggtctaggtttcgcttgggctttgtttatgattggtggtatgacactcgttccagaatctccacgttatttagttgaagtcggtaaaattgaagaagctaagcgttctattgctctttcaaataaggtcagcgcagacgatccagctgttatggctgaagtcgaagttgttcaagctacagttgaagctgaaaaattagttggtaatgcctcctggggtgaaatatttagcactaagactaaggttttccaacgtttgatcatgggtgctatgattcaatcattgcaacaattgacaggtgataactatttcttctattacggtactaccgttttcactgctgtcggtttggaggattcttttgaaacctctattgtcttgggtattgttaactttgcttccacctttgttggtattttcttagtcgaaagatatggtcgtcgtagatgtttattatggggtgctgcttccatgacagcttgtatggttgttttcgcttctgttggtgttacaagattgtggccaaatggtaagaagaacgggtcttctaagggtgctggtaactgtatgattgtcttcacatgtttctacttattctgttttgccaccacctgggctccaattccatttgttgttaactctgaaactttcccattgagagttaagtccaagtgtatggctattgctcaagcttgtaactggatctggggtttcttgattggtttctttactccatttatttcaggtgctattgatttctactacggttatgttttcatgggctgtttggtcttttcttacttctacgtcttcttcttcgttccagaaactaaagggttgactttagaagaagttaacaccttatgggaagaaggtgttttgccatggaaatcaccttcttgggttccaccaaacaagagaggtactgactacaacgctgatgatctaatgcatgatgatcaaccattttacaagaagatgttcggaaaaaagtag

SEQ ID NO: 79079 - DNA, 495 bp, Saccharomyces pastorianus
atgctgcaggtccactggataaccctcgttgcatttattgctacattcttcaacctagctgctacctcgatcaacaatagttccctccctgatgttgatcttactaatcctttgagattcttcactaacattccagcaggacttaattttaatgaagtcatttttctcgaaagaaacggattctatcttggtggaatagactctccctcaatctaccacttaataaatggtacagctgtgtattttggggatgtcagagataatatcatgccgggtacagttggcactactaggaatgttacagatgtcgactatggctccttactgacagagtatggttatgaagctaatacagattatgtctcgcgttggatcgccactcatgtagtaatctctccattgaacgctacagagtttttccaaacaccggtaccagtaccagtgccagtgccgataacaataccgcaccaacaggtgaactcaaaactacattag

SEQ ID NO: 79080 - DNA, 1602 bp, Saccharomyces pastorianus
atgatgcttttgcaagctttcattttccttttggctggctttgcagctaagatatcagcattaatgacaaacgaaactagcgatagacctttggtccacttcacccccaacaagggttggatgaatgatccaaatggattgtggtacgatgcaaaagaaggtaaatggcatctctactttcagtacaatccaaatgacactgtttggggtttgccactcttctggggtcatgctacttcgaatgatttgactcactggcaagatgaacctgttgctatcgcgcccaagcgtaacgactctggtgcttattctggttcgatggtgattgaccacaacaacactagtgggtttttcaatgatactgttgatccaagacaaagatgcgtggcaatctggacttataatactccagaaagtgaagaacaatacattagctattcccttgatggtggttacacttttactgaataccaaaagaaccctgttttagctgccaactccactcaattcagagatccaaaggtgttctggtatgaaccttctcaaaaatggattatgacagctgccaaatcacaagattacaaaattgaaatttactcctcggacgacctgaagtcctggaagctagaatctgcatttgccaatgaaggttttttaggttaccaatatgagtgtcccggtttgatcgaagtcccaactgagcaagatccttctaaatcgcattgggtcatgtttatttctatcaacccaggtgcacctgctggcggttccttcaaccaatattttgttggatccttcaatggtactcattttgaagcgtttgacaatcaatctagagtggtagattttggtaaggactactatgccttgcaaactttcttcaacacagacccaacgtacggttcagcattaggtattgcctgggcttcaaactgggagtacagtgcctttgtcccaactaacccatggagatcatccatgtctttggtccgcaagttttctttgaacactgaatatcaagctaatccagagactgaattgatcaatttgaaagctgaaccaatactgaacattagtaatgccggtccatggttgcactttgccagcaactccactttgacgaaagccaattcgttcagcgtagatttgagtaattctaccggcacattagagtttgagttggtttacgctgttaacaccacacaatctgtttctaaaagtgtcttttcagacttatctctttggtttaaaggtttagaagatcctgaagaatatttaagaatgggttttgaagccagtgcttcttccttctttttggaccgtggtaactctaaggtgaagtttgtcaaggagaacccatatttcacaaacagaatgtctgtcaacaaccaaccattcaagtctgagaacgacctaagttactataaagtgtacggcctactggatcaaaacatcttggaattgtacttcaacgatggagatgtggtttctacaaatacctacttcatgaccaccggtaacgctctaggatctgtgaacatgaccactggtgtcgataatttgttctacattgacaagttccaagtaagggaagtaaaatag

SEQ ID NO: 79081 - DNA, 1602 bp, Saccharomyces pastorianus
atgatgcttttgcaagctttccttttccttttggctggttttgcagccaaaatatctgcatcaatgacaaacgaaactagcgatagacctttggtccacttcacacccaacaagggctggatgaatgacccaaatgggttgtggtacgatgaaaaagatgccaaatggcatctgtactttcaatacaacccaaatgacaccgtatggggtacgccattgttttggggccatgctacttccgatgatttgactcattgggaagatgaacccattgctatcgctcccaagcgtaacgattcaggtgctttctctggctccatggtggttgattacaacaacaccagtgggtttttcaatgatactattgatccaagacaaagatgcgttgcaatttggacttataacactcctgaaagtgaagagcaatacattagctattcccttgatggtggttacacttttactgaataccaaaagaaccctgttttagctgccaactccactcaattcagagatccaaaggtgttctggtatgaaccttctcaaaaatggattatgacggctgccaaatcacaagactacaaaattgaaatttactcctcggatgacttgaagtcctggaagttagaatctgcatttgccaatgaaggtttcttaggctaccaatatgaatgtccaggtttgattgaagtcccaactgagcaagatccttccaaatcctattgggtcatgtttatttctatcaacccaggtgcacctgctggcggttccttcaaccaatattttgttggatccttcaatggtactcattttgaagcgtttgacaatcaatctagagtggtagattttggtaaggactactatgccttacaaactttcttcaacactgacccaacctacggttcagcattaggtattgcctgggcttcaaactgggagtacagtgcctttgtcccaactaacccatggagatcatccatgtctttggtccgcaagttttctttgaacactgaatatcaagctaatccagagactgaattgatcaatttgaaagccgaaccaatattgaacattagtaatgctggcccctggtctcgttttgctactaacacaactctaactaaggccaattcttacaatgtcgatttgagcaactcgactggtaccctagagtttgagttggtttacgctgttaacaccacacaaaccatatccaaatccgtcttccccgacttatcactttggttcaagggtttagaagatcctgaagaatatttgagaatgggttttgaagtcagtgcttcttccttctttttggaccgtggtaactctaaggtgaagtttgtcaaggagaacccatatttcacaaacagaatgtctgtcaacaaccaaccattcaagtctgagaacgacctaagttactataaagtgtacggcctactggatcaaaacatcttggaattgtacttcaacgatggagatgtggtttctacaaatacctacttcatgaccaccggtaacgctctaggatctgtgaacatgaccaccggtgtcgataatttgttctacattgacaagttccaagtaagggaagtaaaatag

SEQ ID NO: 79082 - DNA, 615 bp, Saccharomyces pastorianus
atgggcaatgcgtctgcggcagtgggaacggcagttgggattccaattgctgtgggcgtaataatagccctgatattttggtgtaaattacaacgacgttacaaaaaagaagagattagagatgctgatttggagaagatggtaatggaagaagtggcagtgtcggtatatgatggttttaaagccgaaattaacagctcaagtgaagcttccacgataaacgaaaaggaagcaaaccaggatcttaaaccctgccaagaaaaaaccgccaaggcagggtacacaccagcatacagaaggcaattgaacgctagtatggggactttgcgtccaaaaaagcagagcactgcatatatcaatgtccccgtcattttcagcggcgaaaaggtgaattatgggatggtcagagatccttcctatagttttatgtatccactgacgctatcgcgcaaagaaacgagtagtttgagatcagcttctacgtcaaacttatcatcgagcacagaaaatactgcgttacacgaagaaataaaactggatgacccatatgaaaacgattttacgaattatactgtcaacaagagagaatttattgacagcttacggccacgctaa

SEQ ID NO: 79083 - DNA, 375 bp, Saccharomyces pastorianus
atgaatttctccacagtttttcaagcaataatcgcggttttaggtttaactacagtcacagctttagcagaatttgatttcgacgtaggctatgaagagtttgtccgtaacaatcctgatacgattttcttagagagtgatattggcctgcacgttggatataccgagggtggcgaacgacagatagcaacgataccacacaattccacgctagggacttcactacgtgagtatagtggctgtggtggtaatggtacagaaacctccatcgcgacctccgcacctacaatgagtgaggtacctatcgctatcttcgtgaaacgcagaaaaagtgtacctatcttgctaccgcaggtatgtatgggaggtatatga

SEQ ID NO: 79084 - DNA, 594 bp, Saccharomyces pastorianus
atgttccgtctcttaatgtcattcaacaatttcaaagacttaatctcgttaatgtcattgagctttgctttccaaaactcattttccttgttcaattgctctatacgatcgcgaagtttgttgatttgcgtgtttaagttctgcagcttattcatgttctcaaaattcttttgtttcttgcgaatgcggaaccgctgcgacgcctctgtgttctttcttctccgctcttgcttaatcttatccagttcgttagaagtgctcacgggagcttcctcttcttttacaacaactgctgttgttgcggcaaccttcccctttctcggctcgcggagcttcttaaactgcgagacatcctggccattatttatcatgctaatgagctcctccgcgttgccactgctaaccagcagcaatgatagcaagcgcgagcccagctctgaatcgcttgatatcaggttctgtagatgttccgaaagattgttcacgttcatacccttcctgcttgcaatgtcaatgtttgttgatttcttttcccacccttgtttcgcactcgtattgacgaacaaaacaatttgtcttcataactaccactga

SEQ ID NO: 79085 - DNA, 1746 bp, Saccharomyces pastorianus
atgacgattattcataacccaaagtggtggaaagaagccacaatctaccaaatatatcctgctagtttcaaggactccaacaatgatgggtggggtgacttggctgggatcacttccaaacttgactacatcaaagagctaggagtcgatgcgatatgggtctgcccattctatgactcccctcaggaagatatgggctatgatatagcaaattatgagaaggtttggcctcgttacggcacgagcgaggattgttttcagatgattgaggaatctcataaaagaggtatcaaagtgatcgtggatctggttattaatcattgctctgaagagcatgagtggttcaaggagagtagatcttctaaaaccaacgccaaacgtgattggtttttttggaaaccacctaaaggatacgaaatagatggtactccaatcccaccaaacaactggagatcattctttggtggatcggcttggaaatatgatgaaaacactgaagagtttttcttacacgtatttgctcctggtcaaccagatttcaattgggaaaacaaagagtgtcgtcaagccatctacgattcctctgtagggttttggctccgtcataatgtcgacgggtttcggattgatgtaggtagtatgtactccaaagttgagggcttaccagatgcttctattacagatcctactgttccatatcaagacggaactgatttttttgtgaatgggccacgtatccatgaatatcataaagaaatgcgtcaatacatgtatacccaaattccagaaggcaaagaaatcatgactgtaggtgaagttggtattggaaatgagaaagatttcaaagactatactagttccaaagaagaagagtttaacatgatgttcaacttcaagcacacttctgttggtgaaagtcccgagtttaaatatgaactaattcctttcaccttaaaagattttaagttggcccttgctgaaagctttttattcatcgaggggactgactgctggtctacaatttatcttgaaaatcacgatcaacctcgtagtgtttcccgttttggttctgattctcccgagtggcgtgagatttcctcaaaaatgttggctactcttattatttccttgactggtactgtattcatttaccaaggacaagagcttggcatgccaaacttcaaaaatagaaagattgaacaaattaagtgtgttgaaggtaccggtacttatggtgccatcaaacgtgattatggtgaagactcagagaagatgaaaaagttttacgaggcattggcattaatatccagagatcatgggagaactccattcccttggagtggtgaaaagccctacgctggtttttccaagaatgcgaaaccatggatcgatattaatgaatcatttgtagaaggaatcaatgcggaggctgaattaaacgatgaaaactcagttttctttttctggaaaagggctttacaggttagaaaagagcacaaaaatatgcttgtgtacggggacaatttccagttttacgatttagataacgaaaagctgttcatgtttacaaaggattctggcgacaaaaaaatgttcgccgtttttaacttctgtagcgacagcacggagttttcagttcctgacaataaggcttcttacgacatgtttttcggtaactatgcaaactctgatggcaagtcatatactttgaagccatgggaaggtagactttattattcaaattga

SEQ ID NO: 79086 - DNA, 2100 bp, Saccharomyces pastorianus
atggtcagattttttggtttaaacaagaaaaagaacgaagaaaaggaaaatacagacttgcctgcagacaatgaacaaaacgcagcagaaacgtcgtctagcaacgtatctggaaatgaagaaagaatagacccaaacagtcatgatacgaaccctgaaaatgcaaacaatgatgatgcgtctacgacttttggttcgtccatacaatcgtcatccatattttctagaggaagaatgacttacggaacgggagcctcttctagtatggccacatcagaaatgcgtagtcacagtagcggacatagtggatctaagaatagtaaaaatttacagggtttcaaagatgttgggaaaccattaagagcggtgagcttcttgaatcctgttaaggaggaggaatctcaggatacgcagaatactttagacgtcagctcttcaacgtcctcaacattagccacttcaggaaatgcgagagaaaacagtttcacttccagaagaagtatcactttggagtacattcacaaaagtttgtctgagctagaggaaaatttggttgatataatggatgatattcatcaggatgtcatcagtatttcaaaagcggttattgaagccatcgaatattttaaagaattcttaccgacaacacgagacaggataccgtacaggataagtttagaaaaatcgtcttcattacgaaaaattaataaaattgtattacattttctggataatttattggtttccgacgcattttcgaattctaggtcgatactgttacgaagattttacttcttcctgaaaaaactaaaccttattacggatgacgatttgatatcagaatcgggcgttttaccatgcttatcagtcttttgtattggcagccattgcaacttaccaagtatggataaattaggcatgattctagatgagttgaccaaaatggattcttcaataatctctgaccaggaaggtgcttttatagcacctatacttagaggtataaccccaaagagttcaattcttacaataatgtttggcttacccaacttgcaacatgaacactatgaaatgataaaggttctttattcgttgttcccagatgtacacatgtattgtgtgaaagattacattaaaaaagctgcatcagcagtaggcagtattccatctcataccgcagcaactatcgatacaatagccccaactaaatttcagttttcccccccatatgcagtttcagagaatccacttgaattgccaatttctatgtctttatccactgagacaagcgctaaaattacaggtactttagggggttatctattccctcagactggtagtgataaaaaattttctcaatttgcaagctgctcatttgccattacgtgcgcccacgttgtattatctgagaagcaagattatccaaacgtcatggtaccttctaatgttttacagacttcttacaagaaagttttaacgaaagaatcagataggtatcctgatggttcggtggagaaaacagcatttttggaggaagtgcaaagaatagatcaaaacttgaactggcagaaatcaaacaaatttggtcaagtagtttggggcgagagagcaatcgtagatcacagattatcagattttgctattatcaaagttaattcatcattcaaatgtcagaataccctaggtaatggcttaaaatcattcccagatccaacattaagatttcaaaatttacatgtgaaacgaaaaatttttaaaatgaagcctgggatgaaagtatttaaaataggggcttctacgggatacacttcaggcgagttaaattctacaaaattagtttattgggccgacggaaagttacaaagtagcgagtttgtcgttgcatctccaactcctttatttgctagtgcgggggattcaggcgcatggatcttgaccaagttagaagatcgtctaggtttggggcttgttggtatgttgcattcatacgatggtgaacagaggcagtttggtttgttcacacctataggtgatatcctggagagactacatgctgtaactaaaattcaatgggacattgatccacaactagatggatga

SEQ ID NO: 79087 - DNA, 396 bp, Saccharomyces pastorianus
atggacagagaccatattaatgaccatgaccatcgaatgagctattccatcaacaaggacgacttgttgttaatggttttggcggttttcattcccccagtggccgtctggaagcgtaagggtatattcaacagggatacactattgaacgtacttctcttcctactgttattcttcccagcaatcattcacgcttgctacgttgtatatgaaacgagtagtgaacgttcgtacgatctttcacgcagacatgcgactgcgcccgccgtagaccgtgacctggaagctcaccctgcagaggaatctcaagcacagcctccagcatatgatgaagacgatgaggccggtgccgatgtgcctttatggacaccaaaaaaagtctcttcggcgtattag

SEQ ID NO: 79088 - DNA, 2166 bp, Saccharomyces pastorianus
atgaagtttggtgagcacttgagcaagtctcttattagacagtacagctactattatattagttatgatgatctgaagactgagctagaagataacttatctaagaataacggtcagtggacgcaagaattggaaacagattttttagaatctttggagatcgagttagacaaggtttacacattttgcaaagttaagcatagtgaagtttttagacgtgtaaaagaggttcaagaacaagtgcaacatactgttcgtttgttagactccaataatcctcctactcagctagattttgagattctagaagaagaactaagtgatatcattgccgatgttcatgatctagccaagttttcgagactaaactacactggtttccaaaagattatcaagaaacacgataagaagacaggttttatcttgaaaccggttttccaagttagattagactctaaaccatttttcaaggaaaactatgacgagctagtcgttaaaatttcccaactatatgatattgccagaacttcaggtcgcccaatcaagggagactcatctgctggtgggaagcaacaaaatttcgttagacagacaacaaagtattgggttcaccctgataacattacagaattgaagctgatcatcttgaagcatttaccagtgttggtcttcaacactaataaggaattcgaaagagaagattccgctattacttcgatctattttgataatgaaaatctagacctttattatggcagattaagaaaagatgaaggtgcagaagcccacagattgagatggtatgggggtatgtctacagacacgatctttgtagaaagaaagacccatagagaggattggactggtgagaaatctgtcaaggcaagatttgcgctaaaggaacgtcatgttaatgacttcttaaagggtaaatatactgttgatcaagtatttgccaagatgcgtaaagaaggcaagaagccaatgaacgaaattgaaaacttggaggcgttagcatccgaaattcaatacgtcatgttaaagaaaaagttgagacctgtagtgagatcattctacaatagaactgcttttcaattacctggtgatgcaagagttcgtatctcccttgatacagagttaactatggtgagagaagacaactttgatggtgtggatagaactcataagaattggaggagaactgatattggtgtcgattggccattcaagcagctagatgacaaggatatttgccgtttcccatatgcagtcctggaagttaaattgcaaacccaactaggtcaagaacctccagagtgggtacgtgaattagtcgggtctcacttagttgagccagtcccaaaattctccaagtttattcatggtgtggctaccttactaaatgataaagtggattcaatcccattttggttacctcaaatggatgttgatatcaggaaacccccactaccaacaaatattgaaataacaagacccggtagatccgataacgaagataacgacttcgatgaggatgatgaggatgacgctgctttggttgctgccatgacaaacgcacccggtaattctcttgatatagaagaatctgttggttacggggctacttcggcccccacctccaacactaatcatgttgttgagagtgctaatgctgcttattatcaaagaaagatcaggaatgccgaaaatcctatctccaagaaatactatgaaatcgtggcattttttgaccactattttaacggtgatcaaatatctaaaatcccaaaaggtactacttttgatactcaaattcgtgccccaccgggaaagacgatatgtgtgccagttcgtgtggaaccaaaagtttactttgccactgaaagaacctacctgtcttggttgtccatctcgatattgttgggcggtgtctccactactttattaacatatggttcaccaacagccatgattggctccattgggttctttattacttccttggctgtgttgatacgtactgttatggtttatgccaagagagtggtaaacattaggctaaagagagcagtagattatgaggataagatcgggcctggcatggtttctgtgtttctaattctctctattttattttcctttttctgcaacctagttgctaaatga

SEQ ID NO: 79089 - DNA, 381 bp, Saccharomyces pastorianus
atggaccagcaagctgcatacagtacaccatacaagaagaacacactatcgtgcaccatgtcagccaccttgaaagactacttaaataaaagagttgttataatcaaagttgacggcgaatgcctcatagcaagcctaaacggcttcgacaaaaatactaatctattcataaccaatgttttcaaccgcataagcaaggaattcatctgcaaggcacagttacttcgaggcagcgagattgctcttgttggcctcatagatgcagaaaatgatgacagtctagctcctatagacgaaaagaaggtcccaatgctaaaggacaccaagaataaaatcgaaaatgagcatgtaatatgggaaaaagtgtacgaatcaaagaca

SEQ ID NO: 79090 - DNA, 1590 bp, Saccharomyces pastorianus
atgttcaggcagtcaaaaagaagaattgcctcaaggaagaattttagttcatacgatgatattgtcaaaagcgaattggacgtaggcaacacaaatgcagctaaccagatcatcttaagttcaagttcatctgaagaagagaaaaaactttacgctaggctgtatgagtctaaattatcgttttacgatttaccaccacagggagaaataacattggaacaatttgagatctgggcaatcgatcgtctcaaaattctgttagagatcgaatcttgcctttcaagaaacaaatccatcaaagaaattgaaaccattatcaagccgcagttccaaaaactactgcctttcaacacagagagtttagaagacagaaaaaaggattactactctcacttcattttaagattgtgcttttgtcgttcaaaagaactgcgggaaaaattcgtcagggctgaaacgtttttgttcaaaattagatttaacatgctaacctccaccgatcaaacaaaatttgttcaatcattggacttacccttactacagtttatctcaaatgaagaaaaggcggaattatctcatcagttgtatcaaacagtttccgcgtctctacagttccaattgaatttaaacgaggaacatcaaagaaaacagtattttcaacaggaaaaattcataaaattacctttcgaaaatgtgatagaactggtaggaaaccgtttagtgtttttgaaggacgggtacgcatatttaccacaattccagcaattgaatttactttctaatgagtttgctagcaaattaaaccaggagttaataaaaacgtaccagtacttaccaagactgaatgaggatgaccggttgttaccaattctgaatcatctttcgtcaggatacacaattgcagactttaaccagcaaaaggcaaaccaattcggtgaaaatgtagacgatgaaataaatgcacaaagtgtgtggtccgaggagatcagctcgaattatccattgagtatcaaaaacttaatggagggtttgaagaaaaaccatcatttgagatattacggtaggcaacaactaagcctgtttctaaagggaattgggttgagcgccgacgaagctttgaaattttggtcagaagctttcacaagaaacggcaacatgacgatggaaaagttcaataaagagtaccgctacagttttagacacaactacggcctcgaaggtaacagaatcaactacaaaccgtgggactgtcacaccattctatctaagcccagacccggccgcggcgattatcacggatgcccattccgtgactggagccacgacagactatctgcagaactgcgttccatgaaactcacccaagcacaaatcataagtgtcctagattcgtgccaaaaaggcgagtacacaatcgcttgcaccaaagtattcgaaataacacacaattccgcctcagcagacttggagatcggcgaacaaactcatatcgcacatcctaacctctattttgaaaggtcaaggcaactgcaaaagaaacaacagaaaccggaaaaggaaaaactttccaatagtgccaataaccagtag

SEQ ID NO: 79091 - DNA, 1038 bp, Saccharomyces pastorianus
atgttacgcaacatcatcaggttcaaaggatttggaaaagggaccagtggaggatttttaaaacctgtatcatttcgtgttcagttaacgcgatgttaccgctatgacaatggtccttcatatcgtcgatttaataatggagagtattcccaaaaatcatcgtttaaaagcattcttctcgataagtcatcaagaaaatacttagctttattatttggtggatgctctctcttttattatacacatttggataaagcaccggtaagcgataggtccaggttcatctgggtatcgcgtccattagagttaactatcggaaattacacatacaaatcaatttggagacaaacgcagcaggaaatattacctccacagcatccgctgtccatcaaaattgagaatattttcatgaaaattgtcgaagctgcttataaggaccctagtgtagacaactcactactggacgggatcaagtgggaaattcatgtggtcaatgatccaactgcttcaccaaatgcattcgttttaccagggggtaaggtctttatattcagctctattttacctatttgtgctaatgatgatgggattgccactgttttagcacacgaatttgctcatcagctagcaagacacacagccgaaaatttgtcgaaggctcctatatattctcttttgggtttggtgttatatactgttactggagctcatgctatcaacaatatactattggatgggtttttgcgaatgccagcatcaagacagatggaaaccgaagctgattacattggcctgatgataatgtcaagggcatgttttcaaccacaggagtcaataaaagtgtgggaaagaatggcaaattttgaaaagcaaatgaatagagggggtgttgtgaatatggagtttctaagtacacatccagcaagcactcgtagaatagagaatatgtcgaaatggttgccaaaagctaatgaaatttatgaacaatctgattgtagcactatgggtaactattataaaagttttttctcaatgtaa

SEQ ID NO: 79092 - DNA, 501 bp, Saccharomyces pastorianus
  modified_base (491)..(491): a, c, g, t, unknown, or other
atgagttctcaaagtaatactggtaattctattgaggcaccacaactacccattcctggtcaaactaatggctctgcgaacgttactgttgatggagctggtgttaatgtcggtatccagaatggttcgcagggtcaaaagaccggaatggacctttattttgatcaagctttgaactacatgggagaacatcctgtgataacaggttttggggcctttttaactttatattttacagccggtgcatataaatcaatatcgaagggacttaacggtggaaaatccactactgccttcttgaaaggcggatttgacccgaaaatgaattctaaagaggctctacagattttaaatttgacagaaaatacattgactaaaaaaaagttgaaagaggttcataggaaaattatgttagctaatcatcctgacaaaggtggttctccatttttggccactaagataaacgaagctaaggactttttggaaaaaanggggtattag

SEQ ID NO: 79093 - DNA, 750 bp, Saccharomyces pastorianus
atgaaggaaaaaaaaaaaattcttcaaagggaacaaaacagattaatcactgagattatacgcctcgaaaacatactaaataagcataggaaggctgaagctaagaataatattaacaaacttgaaaagaagttgagtgaaacagatggttttacatctgtaaacacatcagtgccagtaactcctattatgccggtcttaaatacgagaacttcttatcccaatatcgactttcatggtactaaggtttctgatgttctagatgcctttgaatttgaaaagcatgatgatcccttaagggataaatggaacactttacagtttttggaaaagagctttgaatctaaatttgaatctgcatcagagttaatccaaggaggcgagctagctgctattaaagaaagaaattttcaattagccaaactaaataatctttgctttcgggtacgagagtccatcaaaagaagacaagacctggagaaaaagttaagaactttatcgcaggacactgacaacgaattgctttttctgatgttggaaaatgagagaagaaagaaaagttcagtgataatagagtttctttctgagataatcagagagaaatccaaaagattaactgcagaagagcaaggctttgtaaatcaaaatgaagtaaaacccctcattctggacctttctgcacggataaacagattgaattctattctagaaacaaaaaatacttgtattagaagattaagtaatcaataa

SEQ ID NO: 79094 - DNA, 576 bp, Saccharomyces pastorianus
atgcaaacgctaaagtgtgttgttgtcggtgatggtgctgttgggaaaacgtgccttctaatctcctatacaacgaatcaatttccagccgactatgttccaacagtgttcgataactatgcggtgactgtgatgattggtgatgaaccatatacgttaggtttgtttgatacggccggtcaagaagattacgatcgattgagacccttgtcatatccttctactgatgtatttttggtttgtttcagtgttatttccccaccctcttttgaaaacgttaaagaaaaatggttccctgaagtacatcaccattgtccaggtgtaccatgcctggtcgtcggtacgcagattgatctaagggatgacaaggtaatcatcgagaagttgcaaagacaaagattacgtccgattacatcagaacaaggttccaggttagcaagagaactgaaagcagtaaaatatgtcgagtgttcggcactaacacaacgcggtttgaagaatgtattcgatgaagctatcgtggccgccttggagcctcctgttatcaagaaaagtaaaaaatgtacaatttcgtag

SEQ ID NO: 79095 - DNA, 1164 bp, Saccharomyces pastorianus
atgtcagaagaagacgatcattggaatttagttagattacgtagattacgtaaagggagagaaggggaagaacagtcatcgaagtcagaaatatctttggatagtttgcatgaaagctcctttgcaggagaggacgacgaggacttcgatgcagatgtcctatcgaacactagcagtgaagagtctgcacagaagaatcgtatttacgattttagaacatctaatgaatttagtaatgctggagttaatattgatcaaactggagttcccactatttcagagtcatttgatactttgtccggctcaaatgttggcggaacggtattgccaagtatggaggggtcgaaactgaaggatagtacgataaggaattctagcacacgatcggatcatatcatagataaaagtgagggtaaatctgctaaattgaagatgtggcatgttatcatgctatcttcattgctttccatgaccttttcatacctcgccctcgaatattccctgactggtgatgtgttggcaggttttaaatcacaacagtcattacgtaataatgaaaggaagctgttgtacggcaatatcgattttgttgataaaaaatcttacgattcatcaagtgactctttaagtcagtgggctccttcaggaaaatactacgtcgacttcgacaatcatattgcatacccattaaaggatgatgacctaatgggctggagacgatacaaaacagacttagttattttatggtatacaacaaaagctcgaatgaaagacggttggcacaagagaattaacaaaataaacggaggaagaataaagttacacctatttctcaagaattcttttaaatccgctcaagaaagtttaagggtattgcataaagaacagaaacgccgctggaaaaggctctttgtgctacttcataataaatacaggcaattttctccacatattaaaaggtatttcgatcattcttgccaaaaagcaaaacaatgttggtcgggatccagattgcagttgcgcaagcttcgtttcaagtcaatgaaaccattccgagtttttcagtttaaagttcgcaaagataccaactggtttgtaaagcagctgaaacggttcggattgaaattacagcaagcgaggaggtataaagcgatgtcagaatag

SEQ ID NO: 79096 - DNA, 687 bp, Saccharomyces pastorianus
atgactgtttctacttccaagaccccaaaaaagaatattaagtataccttaacacatactttacaaaaatggaaagaaactttaaagaaaattacccacgaaacgttgagtagtatcgatgactctagtggaagcgatgaaaaaatagaggctctgtttactgtgtctcagcctgccgtcgtagcctccaagggtatagacagagatagtggtgcttctatgtcgcaggtaggaggaggtgtcaatagtacattggagatgaagctcacagatgagagtgaggaatctagctctgctaataacacgaccacaaccgcctcgcatactctatcgaattcgaagaagtctacgcagaactttgaaaactataacgtagtggaggaacgcataaaattagcacagaaaagtaaggcgccgttttgtaacgctgagaaaatctggaaacgaagaagacaactctggacacaacccactgagcaaagtgaaagcgccaataatgacggagttactcgaagggagattttccaagctatacctcaggaatattatgctcgagtttacaagaaactggtggtagatgataagccattgagagagcctctaaatctggaagatgctttacaagtcataaatgcaggctggacggaaacgagaaagtgggctaatgctgccaagggcatgccatga

SEQ ID NO: 79097 - DNA, 1851 bp, Saccharomyces pastorianus
atgatgtcatctatctctttgaaggaaattataccacctcagccttcgacacagcgtaactttactacgcatttatcgtatgaccctacaaccaacgcaattgcttacccatgtggcaaatctgcatttgtacgttgtttgggcgatggagacagtaaagtacctccagtagtacaatttactggtcatggctcttcggtagtcacaacggtaaagttctctccaattaagggttcccagtacctatgctccggtgacgaatctggaaaagtgattgtttggggatggacatttgacaaagaaagcaattctgttgaagtgaatgttaagtctgaattccaagttttagcaggtccaatcagcgatatctcctgggattttgaagggcgaagactctgcgttgtgggagaaggtcgtgataactttggtgttttcatatcctgggattctggtaattccctaggtgaagtttcaggtcactcacaacgcatcaatgcttgtcatttgaagcaatctagacctatgagatctatgacagttggagatgatggatctgttgtcttttatcaaggacctccatttaagttctctgccagtgacagaacacaccacaaacaaggctcatttgtcagggatgttgaattttcacctgacagcggtgaatttgttattacggtagggtctgacagaaagatttcttgctttgatggcaaatcaggtgagtttcttaaatacatagaggatgatcaagaaccagttcaaggtggtatatttgcactatcgtggcttgattcccaaaagtttgctaccgtaggagcagacgctaccattagggtttgggacatcacgacttcaaaatgcgttcaaaaatggaccttagacaagcaacaactgggaaatcaacaagttggtgttgttgcaacaggaaacggaaggattatttctctttcactggatgggaccttaaacttctatgaacttggacatgacgaggttttaaaaaccattagtggtcataacaagggtattactgctttgacagtcaacccactaatcagtgggtcatatgatggtaggattatggaatggtctagctcttccatgcaccaagatcactccaacttgattgtatcattggataatagtaaagcgcaagaatactccagtatttcttgggatgatactttgaaagtgaacggtattactaagcatgaatttggatcgcaaccaaaggttgctagtgcgaacaatgatggcttcactgcagtactaacaaatgatgatgatttgttgatattacaatcttttacgggcgatataatcaagagtgtaagactgaactcaccaggctctgccgttagcttgagccaaaattacgttgcagttggtttggaagaaggtaatactattcaggtatttaaattatcagatttggaagtcagttttgatttaaaaacacctcttcgcgcaaaaccctcgtacatatcaatttcgccatctgaaacatacatcgctgctggagatgttatgggcaagatattgctatatgatttacaatcaagagaagtgaaaacttcaagatgggctttccacaccagtaaaatcaacgccatttcatggaaacctgctgaaaagggagcaaacgaagaggaaattgaagaggacttagttgccactggttctttagacaccaatatttttatttactccgtcaaaagacctatgaaaatcattaaggcgttgaatgctcacaaggacggtgttaacaaccttttatgggaaacaccatctaccttggtcagttctggtgcggacgcttgcattaaaaggtggaatgttgtcctcgagtga

SEQ ID NO: 79098 - DNA, 2577 bp, Saccharomyces pastorianus
atgattttaccgttagacttcgatgaagatgaaaattaccgtgattttaggcctcgcatgcctaaaagacagagaatcccacctgttgtacaactgtgtaaagaaatgatgcccgatattcgcactattggtgaatctgttaaagcttttgaagatgatatcaaattcttgagtgaagctataatgaatgagtatggccatgaggactactttaataatgctttactgagcactttaaacgctgttgttgtggagcaaccacagaagcaagctgctatcgctctcttaaccatggttgttaattcgaaaaataatgttgccggaaagagtattatcaattacttcttcgaagaattacaaaaatggtgcaagcaaacatataatgatgaattcaagagtacgtcaaatgaaactggaccatggaacaagatcaagttaatcctgagatttttatccattctatcgcccatgtttttagttgatgaactaatcaatatctacaagagcttatttgaattgagtatcgaattaaacaatctggatccaggtaacagagttcctttatctgaagcaatttacaccaatacattattaaatatcccgtatttgttcttttttaataggaataatgacggtttgaggacaaaagtggaggagttacttgcatacgttgaacaaaactatctagttaaaacaacggatataaacctattaagagaatacaatggtgaacctccatatgaaatggtagaacttgtccgagtcgtattaccaaacgtcaagaaggcgctaatcaataacttggaacagctgaatgaattatttcctgattggaatcatttattaactccccaaaccggtgatgaagggttcaatgacgctttaacccttccatcagtagatgatctaaagtctttcgtgcgcttgaataaaaactttggttcagttgatagcatgtggaagacaccaaggtatgcttttcatgtttacttgccaaactccgctggtaatttcgaaacagttgtaccaaccagcacttatgctggtcaattattcaacgatatcattattgatctggtggaaagtttagaattcaatagaaaggaagtagctagacaagtgataactttggatctttttttcaaagcaggtatatttacagaacctggtgaatctattgcccaattaattgccacttatgaagagaacccattggctcctacatttaagatagaagatttggctattgaaaccattttgggacttatttttaaattacctagtgtttcccagccttttgcatacttttacactttattggtggatatttgtcaaaattctccaaaagcaattgctcctgtctttggtagagcctttaggtttttttatagtcatttggattcattagattttgaactaaaattaagatatttggactggttttcaattcaaatgagcaactttaatttttcttggaagtggaatgaatgggaagacgattcgatcaaatttggcaagtatttttataatccaaaggtaaattttgctaaaaatttgattcaaaaagaactacgattgacctctaacttttcagaagtagaggacagcctaccacaagaattcacgaaatatttggatacttcttacattccaagagatcaactgattaactactatcaatcattattcaccggttatacggtagaagaagattccgttagaaaaaatgatctatattttagacaagaaggtgtacctatggaaaacacagtccgtaaaattttagattatacccacaaagcaaacaattctagggaagttactgaattagaaagtattctaggtgagttaaagaatgagtatggttccataatttccgactttaacagatttgttatcatattgttagtccaggccgttacagactctggtagtagatctttatcacatgctaataaatatattaatgatttaaaagaagatctcaaaaccatatttgcgaagattgaattggatatcgagacaaaagagtatatcataattgaagccgtcctaacattttggaacgccaaccctcagacaggtttcttagtagcagatgcattcaaatatgcaggtttacttacttccagaaccatttttacatttatatttaacgaaactggtttgaagaataatggtttgattgaagctacagcaattgaagcggtctttagaaatttatctcaacaaatctcggaagagaacgaaagtggaaataattttgagttcgttttcgaaagattatgtaccatcgccaacagtactatagacttactagatgtcaatgctgatgaagatattgagatacctaaagtcaacggggaaatggacatcgacgatattgaagatgataaactggatttgaaatggaaatattttacagtgattgggtttattaaaagtatattaagaaggtattcccacgaatatcgtgagttagcagacaaattcattgccaacattgataacgctattccacacgaatccactaggagaacaatttcgaattggattcaagaaacaaaggaagtttaa

SEQ ID NO: 79099 - DNA, 606 bp, Saccharomyces pastorianus
atgattatagctatctccaagaatttaccaattttgaagaaccacttcagaaagcactggcaagaacgtgtcaaggttcactttgaccaagctggtaaaaaggtttctagacgtaatgctagagctgccagagccgccaagattgctccaagaccattggatttgttgagacctgttgtcagagctccaactgttaagtacaacagaaaggttagagctggtagaggtttcaccttggctgaagttaaggccgctggtttgactgctgcttacaccagaaccattggtattgctgttgaccacagacgtcaaaacagaaaccaagaaatctttgacgctaacgttcaaagattaaaggagtaccaatccaagattatcgttttcccaagagacggtaaggctccagaagctgaacaagttttgtctgctgctgccactttcccaattgctcaaccagctaccgatgttgaagctagagctgttcaagacaatggtgaatctgctttcagaaccttgagattagccagatccgaaaagaaattcagaggtatcagagaaaagagggctagagagaaggctgaagctgaagctgaaaagaagaaataa

SEQ ID NO: 79100 - DNA, 636 bp, Saccharomyces pastorianus
atggatagcaaagaatatctgatatcatatggttggaaagaaggagaagcgtttagagaaggtggtttgaaaagacccatactggtaaagcacaagagagataagaagggattgggtaatgctcctggcgggaatgatggcgaagcatggtgggaaaggctatttgatggacatctgaagaacctggatgtaagcactgattcgaataatggcagtattaaatttactcaaaatgaggcagttgctactgctgtatcgaaaagtagctcacctctatacaggtggtttgtaaagggagaagggctgaaaggaaccattactaatcttggtaaaaaggaggaagccagctttgttgtatctagtgcaagttcgagtaaagggaagaagagaagaaggcgtgatgaagatgataacaaggtcaagagaaaaaaattgaaaaaagataaaaagactagtaacgacagtgagagtaagaagaagaagaagaagaaaagcaagaaggagagtaaaaaaggaaagaaaagtaagcatagcagcgatgaaggtgataaatcgaagcataaaaaatccaaaaagtcaaaaaaacataaaaaggaagaaagttcagcaagaagagatagaaaggagcatatatga

SEQ ID NO: 79101 - DNA, 834 bp, Saccharomyces pastorianus
atgaaggtaaatttaatgttgaaaagagggcttgctactgcaactgcaactgccagttccgctccccccaagattaaagtcggagtactactgtcaagaatccctataattaaatcagaattaaatgaactagagaaaaaatactatgagtaccaatcagaactagaaaagagactaatgtggacgtttccggcatatttttatttcaaaaagggtactgtagcagaacacaaatttctatccctgcagaaaggacctatctccaaaaaaaatggcatttggtttcctagaggcataccggacattaaacatggcagagaaagaagtactaagcaagaagttaaactttctgatgacagcacagtagcatttagcaacaatcaaaaagagcaaagcaaagacgatgttaataggcccgtgattcccaacgacaggataacggaagcagataggtcaaatgatatgaagagccttgaaagacaattgagcaggaccttatatcttttggttaaggataaaagcggtacttggaaattccctaacttcgatctttctgatgaatctaagccgttacacgtacacgcagagaacgaattgaaattgttgagcggtgatcagatatacacttggtctgtttctgctacgcccataggtgttttgcaggacgagagaaataggactgctgagtttattgtgaagtcacacattttggctggaaaatttgatttggtggcgtcgaaaaatgatgcattcgaggattttgcttggctgacaaaaggtgagatcagtgaatatgtaccaaaagattactttaacaaaacagaatttctttta

SEQ ID NO: 79102 - DNA, 1773 bp, Saccharomyces pastorianus
atgaagacctgctactatgagcttttaggggtcgaaacgcatgcttctgatcttgagttaaaaaaagcttaccgtaaaaaggccctacaatatcacccagataaaaacccagataatgttgaagaagccacacaaaaatttgctgtgattcgagccgcttatgaagtactgtctgacccccaggaaagagcatggtatgactcacataaggaacaaattttaaatgatactccaccaagcactgatgattactatgattatgaggtagacgctacagtcacaggtgtcacaactgatgaattactcttattttttaactctgctctttatactaaaatagacaactcagctgctgggatatatcaaattgcaggaaaaatatttgccaagttagctaaagatgagattttaagtggtaagcgactggggaaattttccgagtatcaagatgatgtattcgaacaggatattaatagtattggctatttgaaagcctgcgataactttattaacaagacggataaacttttatatcctttatttggatattcgccaacggattatgaatatttgaaacatttctataagacttggtcagcgttcaataccttgaaaagttttagctggaaagacgagtacatgtactctaaaaactatgacagaagaaccaagagggaagttaatagaagaaatgagaaggctaggcaacaagctcgaaatgagtacaacaaaaccgtgaaaaggtttgtagttttcattaaaaagctcgataaaagaatgaaagaaggtgcaaaaattgcagaagaacagcgtaaactaaaagaacaacagaggaaaaatgagttaaataacagaagaaagtttgggaacgacaacaatgacgaagaaaaatttcatttacaaagctggcaaacggtaaaagaagaaaactgggatgaactggaaaaggtgtatgataattttggagaattcgaaaattctaagaatgataaggaaggtgaagtattgatttacgagtgttttatctgcaacaagacatttaagtcggaaaagcaattgaaaaaccacataaacactaaactgcataagaaaaatatggaagagatacggaaagaaatggaagaggaaaacataacgcttgggttggataatctctccgatctcgagaaatttgattcagcagatgaaagtgttaaagaaaaagaagatattgatctgcaagcattgcaagctgaactcgctgaaattgaaagaaaactggcagaatcgtcttctgaagacgaaagtgaagatgacaatctcaacatagaaatggatatagaggtagaagacgtcagttcggatgaaaatgtacatgtgaatacgaagaataaaaagaaaagaaaaaagaaaaaaaaagcaaaggttgacacagaaacagaggaatctgaatcgttcgatgatactaaagacaaacggagtaatgagttggatgatcttttagcatcactaggagacaagggcttacaaacggatgacgatgaagattggtctactaaagcgaaaaagaaaaagcgcaaacaacctaaaaagaattctaaatccacaaaaagcactccgtccttgtcgactctaccgtcctctatgtctccaacctccgcgatcgaggtgtgcactacatgcggagaatcatttgatagtcgaaataagctattcaaccacgtgaagatagcagggcatgcggcagtgaaaaacgtagtgaaaagaaagaaagtcaagaccaaaagaaaatag

SEQ ID NO: 79103 - DNA, 600 bp, Saccharomyces pastorianus
atgtctgcaaacgaattctactcaagtggccaacaaggtcaatataaccagcaaaacaaccaagaaagaactggtgctccaaacaacggtcaatatggtgccgacaatggtaaccccaacggtgaacgtggtttattttccactattgtaggtggcagtgccggtgcgtacgctggatctaaggtgtcgaacaaccattctaagttgagtggtgtgctgggcgccataggtggtgcattccttgccaacaagatatctgatgagcgtaaagagcataagcaacaagagcaatacggcaactcaaacttcggaggtgctcctcaaggtggacacaacaaccatcaccgtcaggacaataacaacaataacggtggatttggcggtccaggcggccctggcggtcaaggtttcggaagacaaggcccacaaggatttggaggtcctggtccacaagagtttggtggtccaggtggccaaggattcggtggtccaaatcctcaagaattcggcgggccaggtggccaaggattcggtggtccaaaccctcaagaattcgggggccaaggtcgtcaaggattcaatggcggttcacgttggtga

SEQ ID NO: 79104 - DNA, 999 bp, Saccharomyces pastorianus
atgagttcaccagcgaacctactccctggattaaacgacataactgacgtgctggaggaattcccactggccacctccagatatttaacattattacacgaaatagatgcaaaatgtgtgcattctatgccgaatttgaacgagaggatagataagttcttgaagaaagacttcaataaagatcaccaaacacaagtaagactgctcaataatatcaacaagatttatgaagaactgatgccatcgctggaggagaaaatgcatgtctcatccattatgctggataatctagacagattgacgtcccggttagaattggcgtatgaagtcgcaatcaagaacacagaaattcctagaggtttaagactgggtgtggacaaccatccagcaatgcacctccatcatgaactaatggaaaaaatagagagcaaatcaaacagcaaatcgtcgcaggcactgaagagcgaatcaagaagagaagccatggctgccaacaggaggcagggcgaacattactccgccagcacacaccaacaagacgactcaaagaacgacgcaaactgcggaggcagcaggcacgagagccaagaccacactggtaacaacacaaactcaagaaaaagagccaacgctgccaataccaacaacgccgatccagagaccaaaaaacgcaagaggagagttgccaccacagccgtttcaccaagcactatcagcacggcaactgccgtcaataatggcaggataggtacatctacagcgtccaggggagttagcagcgtcggaaacagcaacaacagcaggatatcaagaccaaaaaccaacgactacggcgaaccgctctactgctactgtaaccaagtggcatacggggaaatggtggggtgtgatggcgcagactgtgagctagaatggttccatttgccatgtattggactcgaaactctacctaagggcaagtggtattgcgacgactgcaaaaaaaaaactgtgaaatag

SEQ ID NO: 79105 - DNA, 1290 bp, Saccharomyces pastorianus
atgtctgcattgagaaacatcaagttcaatgaagaagaagatggtgaactaccctgcctcgtaacaggtgaagaaaataatctacaagaaattttggaaaatgtctcgtatgatggtggaaatattgttagcgatgcaaaagttgaaagggtaaacaagcaagtggagaacacttctgcaggcgcaacagatgtgcacgagaaaaagcgtattcctgtgagcattattaccggctatctaggatcaggtaaatcgacgttgctggaaaaaattgcattaaaaggtgcagataaaaaaattgccgtaattttaaatgaatttggagattctagtgaaatcgaaaaagctatgaccattaaaaatggatcgaacagctaccaggaatggttggatttgggtaacgggtgtctgtgttgttcgttgaaaaatataggtgttaaagccatcgaagatatggtggaacgttcacctggtaaaatcgattatatccttttagagacctctggtattgcagatcccgcccctattgcaaaaatgttctggcaggacgaaggattgaatagcagcgtttacattgacgggatcatcacggttttggattgtgagcatatactaaaatgcttagatgatatttccatcgatgcccactggcatggtgacaaagttggtttggaggggaatttgactatcgcacacttccaactagccatggctgatcgaattataatgaacaaatacgatactatcgaacattcaccagaaatggtcaaacaattaaaagaaagagtacgggaaataaattctatcgcaccgatgttcttcaccaagtatagtgataccccgattcaaaatttactagatattcatgcatacgacagtatacggatatctgacatcttagatagtggtagcggaaacggtaccattcatgatgatcgaatgggcacaataatgcttaatttcagaccattaaaaaacgaggaagaatataataataagtttattaagcaatttttgcaacctttattgtggaagaattttggagccatgtcagtgctgggagggcatcgccgagatgacggccgtgattgggaagtacaaagaactaaaggtctgatacttattgaaggagagaatcccattgctcgtgtaatccaaggcgtccgcgacacctacgatgtctttccaggcaaatatgacggatccaataaagagtgtaaaattgtgctgattgggaagtacctagaaaaggaatccatagaggaactgttacgtaaaaccttgggatga

SEQ ID NO: 79106 - DNA, 1038 bp, Saccharomyces pastorianus
atgctacacttacaaccacaaaaccttctcatccaaaagacactgaatgaagcgatagaggcacttcgcaagggttcgccgttgaccatggacagaattgtttccgatttcgactataccacctaccacatttcaaacacagcagaagataagtccattctgttgttgagtgttaagaccaaagcttgggtaagtgtctctgagtgccaattggacggttctttgacgttactgaagtttctggccgaccactactcctctttgggtggggtgactatcccaagtgaagtggagcccggctatgactacactcttcacattacgttggccgaattggttcaagaatcgattttacaactgtctgttttgaagaccattatattgagttttcccttcgaattggccatttcgaagtttattgaactaagccagcagcaaccggcacctgtcgaagcagaaattactggcggtgaggttgctgccaatggagacaacactttgttcacaatcaagtatcgtgacgaggagaacatcttcatcaaaccttccaatgacagagttaccataatcttcgagactatttttcaagacgaaacagataaaatttttggcaaggtctttttacaagaattcgtggatgcacgtaagagaaaccgtcaaatccaatccgctccacaagttttatactcacatgaaccaccattggagttgaagagactatatcaaccacctaaagttgcagagcaaagtagaagatttatcacgtttgttcttttcccacgtcatttccagacaaaagagttgcaattccattcaatttgccagttaacattgtttagaaactacttccattatcacataaagtgctctaaagcctacatgcactccagaatgagattcagagtggactcgttcatcaaagtcttaaatagagccaaggtggacgaagatgatgaaaatgatgaattgagtgcagaaggcagacaacaggcaagaagaaccttcaccggtagaaagattgtctactcgaaagattaa

SEQ ID NO: 79107 - DNA, 714 bp, Saccharomyces pastorianus
atggtctgcgatacagtagtatatcatccttccgtgatgaggttcgtcaaattcctagatggctcggccggtagagaaaagattctgaggttgctacaatacttggcaaggtttttagctgtacagaactcgtcagtgttggccagactattgcaaactcaattcactactgtaaggaagttcttgaggtttttgaaacctttgaaccacttgcaagctgctgccaaattttacgacaacaaattggctagtgataacgttattagagtctgtaacattttgaaaaacgtcttctttgctgcgtatttgtcactggaccaagtaaatcttttaagaatcttaaaagtgatcccggtgaccatccttaccggtaagaaggtaccccgttggtctaactggtgttggttgttcggccttttaagtgggttggttatggatcttcgcaagatccaaacatctcaatctcagatcactgcattcgtaagtgccaaatcgcaaggccaaggcggcgagaaggaagatcacaagaaagtgttgggaaaagcttatcaagacagatatgccgctttgagaagactggtctgggacgctgcagactcgttcatagtcctcaacaacctaggctatttgtctagcaacgaggaatacgttgcattgtctggtgtggtcacttctgtttttggtatgcaagacatgtggaaagctacttcttaa

SEQ ID NO: 79108 - DNA, 2091 bp, Saccharomyces pastorianus
atgatgaagaatctgaccactataaagcaaacgaacaagaatgtcaaacaagaaagacgtaaaaagtacgctgatttggcgattcaaggcacaaataactcctcaattgcttctaaaagatcggtagagttattgtatttgccaaaactgacttcagctaataatttccaaatggataagaataataaactattggaatattttaaattctttgttcctaagaaaattaaaagatctccctgtattaacagaggttattggttgaggttatttgccatcaggtcaagattgaactccatcattgaacaaacgccacaggataaaaagatagttgttgttaaccttggttgtgggtatgatccattaccatttcaactattagacaccaataacatacaaagtcaacaatatcatgaccgagtttcctttattgatattgattactctgatttattgaaaattaaaattgagttgatcaaaacaatacccgagctttcgaaaattattggtctttctgaagataaagattatgttgatagtagtaatgttgattttttgacttctccaaagtatctcgcccgaccatgcgacttgaacgattctaagatgttcagcacattgctaaatgagtgtcaattatacgatccaaacgttgtcaaagtatttgttgctgaagtatcactggcgtatatgaagccggagcgttctgatagtataatcgaggcaacttctaagatggagaatagtcattttattattcttgagcagttgattccaaagggaccttttgaacccttttctaagcagatgctagctcatttcaagagaaatgattctccgttacagtctgtattaaagtacaatactatcgagtcacaggttcaacgattcaataagttaggtttcgcttacgttaacgtgggtgatatgtttcaactgtgggaaagcgcagatgaggcaaccaagaaggaacttttaaaggtagagccttttgatgaattagaggagttccatttattttgtcatcattatgttttatgccacgctacgaactataaagaattcgcatttactcaagggtttttgtttgacagatcaatatctgagataaacctaactgtggatgaagactatcagcttctagaatgcgagtgccccataaatagaaaatttggcgatgcagatgtcgctggaaatgatgtgttttacatgggaggtagtaacccatacagagtaaacgaaatattacagttgagtatacatcacgacaaaatagacatgaagaatattgaagtaagcagcagcgaggttcctgtagcaagaatgtgtcacacttttactactatttctaaaaataaccagctactgcttattggaggtagaaaggcaccacaccaaggtctctctgataattggatatttgatatggaaacaagagagtggtcgatgatcaagagtttatcacacacgagattcagacatagtgcatgtagcttaccggatggaaacgtcctgatccttggtggggttacagaaggacctgtcatgctgctatacaatgtcaccgaagaaatcttcaaagacgtaactccaaaagatgaattcttccaaaattcgccagtatcagcgggtctagaatttgatccggtttccaaacaaggcataatattgggtggtggatttatggatcaaacaactgtctcggacaaggtaattattttcaaatatgatgcggaaaatgctactgaaccaattacggtgattaagaagctccagcaccccttatttcaacgttatggatcccagataaaatacattactccaagaaagctattaatagtcggtggaacaagtccttccgggctatttgaccggaccaactctataatcagccttgatccgctgagtgagatgctaacatcaattcccatatcaagacgcatatgggaagatcactcactaatgcttgctggatttagtttggtgtccacttctatgggcaccatacatatcattggaggcggtgccacttgctacggctttggatcagtgactaatgtaggtcttaagctcatagcaatcgcgaaataa

SEQ ID NO: 79109 - DNA, 1272 bp, Saccharomyces pastorianus
atgattctccttctgatactttttccctgtatatattttctccccttctgtataaatcgtacagtcagaaatagtccagaatatagtgctgcagactattacaaaagttcaatacaatatcataaaagttatagtaacatgcctcactcagttacaccatccatagaacaagattcgttaaaaattgccattttaggtgctgccggcggtatcgggcagtcgttatcgctgcttttgaaagctcagttgcaataccagttaaaggagagcaaccggagcgttacccacattcatctggctctttacgatgtcaaccaagaagccatcaacggtgttaccgccgacttgtctcatatagacacccccatttccgtgtcgagccactctcctgcgggtggcattgagaactgtttgcataacgcttctattgttgtcattcctgcaggtgttccaagaaaacctggcatgactcgtgatgacttatttaacgtgaatgctggtatcattagccagctcggtgattctatcgcagaatgttgtgatctttccaaggtcttcgttcttgtcatttccaaccctgttaattctttagtcccagtgatggtttctaacattcttaagaaccatcctcagtctagaaattccggcattgaaagaaggatcatgggtgtcaccaagctcgacattgtcagagcgtccacttttctacgtgagataaacattgagtcagggctaactcctcgtgttaactccatgcctgacgtccctgtaattggcgggcattctggcgagactattattccgttgttttcacagtcaaacttcctatcgagattaaatgaggaccaattgaaatatttaatacatagagtccaatacggtggtgatgaagtggtcaaggccaagaacggtaaaggtagtgctaccttatcgatggcccatgccggttataagtgtgttgtccaatttgtttctttgttattgggtaacattgagcagatccatggaacctactatgtgccattaaaagatgcgaacaacttccccattgctcctggggcagatcaattgttgcctctggtggacggtgcagactactttgccataccattaactattactacgaagggtgtttcctatgtggattatgacatcgttaataggatgaacgacatggaacgcaaccaaatgttgccaatttgcgtctcccagttaaagaaaaatatcgataagggcttggaattcgttgcatcgagatctgcttcaccttaa

SEQ ID NO: 79110 - DNA, 1479 bp, Saccharomyces pastorianus
atgataatgtcatcaactatgtcgacagaagccgccttggtaccgaacgaaagtgtttttgacacagtttcgtcattcaacgaagacgatgccaattatagcgttcttgatttatacgatgacgacgatgaaggggatgatagttctacagtagaacgaaaagaaatattgacaacacgtgagcttgaaaaagcaaaggcgtttaccagcttaatcatggcagatcctgagaattttgatagatatggatttagcaagaaaggatatttcattagtcaggaagaatacgacaaatggtggacagaatataatagatacaccgaaagaagaaaaaaaaagtgggagaactttcttcttaagaataagattgagctccacaatgataatcctctagtatatcctgcaaggacagatgaattgtcaaaatttgttagaaaaggtataccagcagaatggagagggaatgcctggtggtattttgctggtggacaacgacaattagacgcaaacgttggcgtttatgatagactgaaaagtgactgtcgcgagggtgccgtatctggtaaagatatggaagctatagaacgggatctttatcgaacgtttcccgataatatacatttccataaggagtccttccaaaatggagagccggcgatcatccgatcgttgcgtcgagtattaatggccttttctgtttatgacaagactattggatactgccaatcgatgaattttctcgttggattgttattattgttcatggaagaagagaaagcattttggatgctggttattattaccggtaagtatttacctggcgtgtatgaatcagatttagagggtgcgaacgtggatcaaggggtgttggtgttatgtatcaaggaatatttacccgagatatggtcacacattgagtcatcgtatatgaatggcaatggcagcactgaccagatatcagggccagcatcgggggaagagtatctctgcaggctgcctacgctgacgctgtgtacggcaagttggtttatgagctgttttgtgggcgtggtgcccatcgaaacgaccctgagaatatgggactgtttattctatgaagagtctcattttttattcaaagtggctttggggatactgaaattgagcgagagcgagtttttggagagtaaaagccagaaactgtttagacagtactcttcgtacaccttcggtggtagtaatgactctgattcaactttcaaaagattaaagaacaagattaagacgcaggaagaggcagatatggagattttgcaagtgattcaaaatttcccaaaaagattgctcaatccgaatgatatctttgagaaagtcctgatgaagaaaaaggttgcgttgaatggtattacccaggaaaagattgatcgcggtagagagtatgtggcgatggcgagaaatagacaaagggcgagtagccgcccaaaggaaagaggaagatag

SEQ ID NO: 79111 - DNA, 2622 bp, Saccharomyces pastorianus
atgagattattaaagtatcctttggatattcataatgaacaagtgaatgccttagctgcccttggtccctatatcatattggcaggcagtgggggtcacgtgatggcgtggagacaacaacaactagtcgatactgcattcgatagggttatgattaaggatttaaagccagaagtttctttccaggtggatcaggatactaccggtgatatttttttcataacaggtgatctcgaaacattgtatatcggatctgaacatcgtctgtggggttattcaggttggctctgtagagatacaaataccatcaattctgtcgaaaaaatgaacagtaagcttctgttcgagtgtaaatctccaagcacaataacggatgtgaaatatgacataaacttaggtatcttatttgttcttttaagtaatgaaaataagatactattatttcggcataaaacctttgataaactctctgaaataactattgacaaggcgagcaaacctattacaggcataatagatcctactggccaaacttttactgttatgacttcagatagatcaattttagtctatcaaattaacaaaacgggtacacacaaactcataaataaacttacgcagcatgtacaaatgtatccattacattatagaatctcaatgtcacctcaggcagacattttaccagtgataaactcggtgaaaggtgtgccgaataatgctaccaactgtaccgctttacttgacagaaataacaactacaaagttacaaaaacactggtaacaccttcttcaaatggatgtagagttcttgtttattctccagcattttatgaaaagcctaatttgaaaaagggcaccagcacacgctataatttaatcgccacttcgggatctacagacggtactattttggtttggaatacgaagagaatgaaacctttgtttaatgctctccaggtttcctccaccgcaataaacgatatgtcttggtcacaggatgggttcaccttgtttgccatttcaaacgacgcgacattgtatacattcgcattccaagagaaggatttaggtgtagcattgcctcaaacggaaatcaaatcgttacaagaagtaaacaaaaagcttccaaagcttgaagagccgttagcagaacaaataccgaaaagtttcccagaaaacatcaaattagaagaatctgcaagcgcagcacctattccaaacgatattggtagatctgccgtgggcaagaaaccgaccaaaaaaaaaacggctaacaatcaaactaatggcatcaaaactatccagagcacatcaatggaattcaacactccatcatacactgtgccaagggatttgaagagaaagccaaaagaggcaactccaagtaacattgcccctggcagcaaaaagcagaaaaaagagctacagccaattgactttttagataccggcttgctcctacccaatacgtctttctcaaggattagacttgcaacaccgaaaatcagatctacatttaaatactctccaattaataatccgaatttaatcctcgatgttaagaatggatctggcaatgaacaaaggccgacaattgtcaagcttacctcaaaagttctcgatcaagatcaagttctatttcaagattttattccaaaactcataacaatctgcacagcaggtgacaccttttggtcattctgtagtgaggacggaagtatttacatatattctgattcgggtagaaaactaatggctcccctagtattaggagttagcattagtttccttgaagcatgtggaacttatttactttgcttaacaagcataggggagctttattgttggaacatagagcagaagaagctggcttttcccaccaacactatttatccattgttaaacccgtcattgcgatactcagatgatatattgaccagagctgaaaatataacattgtgctctattacaaaaaagggtgtgccactagttacactgagtaatggcgatggttatttgttcgataagaacatggaagcatggcttctggtaagcgatgggtggtgggcctatggttcgcagtactgggacactactaatactactgggttgtcttctagcaaagcaaataccgactcttttaatggcagtgaatctaatattaatgaaatagttagtgatatcaagaatgataatcaaagtatcattaactttttggaacgcaaaacgaatgacgaacttaatagaaagggtaggattaagaatttacagagatttgctaggaccatattaatgaaagagggatttgaaaatatggaggagatcgtaactttgtctcacctggaaaataaaatcctaataagtatcagattggaggagcctgaagagttttcgaagctaatgatggtttattgcatccgtctgagtgaattggggtatatggaccgtttgaacgatgtttttcaatggttatatgatgatctccccatcagtggtaccgggtcagcatttgccgataaagattttaagaggaaccttctaaaaaagatactaattgcctgcggtgatatcagacaggtttcaagagtttataaacgttatgccaaggaaatgaatattata

SEQ ID NO: 79112 - DNA, 657 bp, Saccharomyces pastorianus
atggaacatctcgccaacgaaaactcggattcggatatcaggtacagtttccttagcactttggatcatttaccatgtgaactaataagatctcttcgactgatgcaaacaatcgacttattcaagaatgaagaggatgagcctggtatggaaagggcctgtagggatctgttgctggtagcgacttatattaatgatctggtcgatgatcagattcatttcttaaagcagcataagaaggaactagagatacagaagtcagtgacaaaaaatttcaactcttcgctagagaatatcaagtcgaagttgacgttagaagaaccaggagcatataaggagccaaaactgcttttaaagattaacttgaaaaaggctaaatcgagggaaagaaaagagagcataactagccccacaattgggattaaccagggtgatgtaacagagggtaataataatcaagaggaggtttattgtttctgtaggaatgtatcttatgggccaatggtggcttgtgataatccggcttgtcccttcgagtggttccattatggttgcgtaggcctgaaacaagctcccaagggcaaatggtattgtagcaaagattgtaaggaaatagcaaaccagaggtccaagtcaaaacggcaaaaaagaaagtaa

SEQ ID NO: 79113 - DNA, 717 bp, Saccharomyces pastorianus
atgaaaatgttaggattatatctatcctccctgttcttcgccttttttatggcacaagtgtttgctaccaaatactcaattacttttacatcagatgagtatgaagaagatgaaacaggacaaaatgaacctggccctttagttttccatttgaataaaaactcattaccaccagctctgctaaatcaaatggagtttaatccatacttagtattagcagatttaccggaggagccgcgagctgttgattctcaagaacataccgatacggtccttgcttccaaatctgttatagattttctgttggaacatcctctaacaatagtggagcacaaaaagttttctcaaattgaaagtattctacatgaaattatggaagatagcatacagaagaaagtcggggcagacgaggtatttgaagagattgcgaaaccgaaaatttacgcgtatgaagatattttagtaactaatatgagcatcatcaataatagtgaaatgccgacaagtactgcaacattaacgagcaccattccttatttatctagtacgacaagtttagctttatccacgggtgttaccagcgttgagattttcccaacaatcaccccgggaaatattacaactattgggggatacgaaaattcatcatcctccttaatgccgtcgatgggaatcttatcttttctatttggtctgtacttgttacttcacccttaa

SEQ ID NO: 79114 - DNA, 1362 bp, Saccharomyces pastorianus
atgattcaaacgcaaagtacagcgatcaaacgacgtaattctgttcataaaaacctctttgatccatcactgtatcaaataccagaaccaccacgtggggggttccaacaccaaaaaaaagaatacagtaaggagacattcagtaatcaagtctttggatatgatattactagtcttaaaaaaagattcacgcaactatttcctagtaatatacaagggtacttacctgaagttgacctaagaataaccattatttgttctatatggtacgtcacgtcatctatttcaagtaacctttctaaagccattttaagaactttcaaccatcccatagctctcacagaattgcaatttcttgttagtgctgttctatgtgttggatttgcttccatcgtaaatttattccgactacctcgtttgaagcgtacgaagttttcaaaggcactcaatagtttccctgacggtatccttcctgaatatctcgatggcaatttccgaagttctatcctgcacaagtttttagttccctcaaagctggttttgatgaccactttccctatgggaatattccaatttattggtcatatcacatcgcacaaggcggtatctatgataccagtatcactagtgcattccgtgaaggcattatccccaataataacagttggctactataaatttttcgaacatcgttattacaattccatgacttattataccttgttacttttaatttttggcgttatgactacttgctggtcaacacatggcagtaagagggcttcagataacaaaagcggatcttcattaatcgggttgctttttgcctttatttccatgataatatttgtagcgcagaatatttttgcaaagaatattttaaccatcagaaggaaggtaggaatactgccgtcttcttctacggatgacgtcacgtcgaaggaagggcaaccgagtctagacaaaacaagattttctccattgcaagtggataagattaccatattgttctactgctcctgcattgggttttctttaaccctattaccttttttaaccggcgaattaatgcatggcggtagcgttatcaacaatttaacgctagaaacagtagcccttgtagcgattcatggaatagcccattttttccaagcaatgcttgctttccagttgatcggtttactatcttccattaattattcggtagcaaacatcatgaagaggattgtcgttatatccgtggcactcttttgggaaacaaaggtaaatttttttcaggtgtttggtgttatcttgacaattgccggattgtacggttatgacaaatgggggctttccaaaaaagatggacgtcagacataa

SEQ ID NO: 79115 - DNA, 636 bp, Saccharomyces pastorianus
atgaatagtacaaacacagttgtatatatcaaagttaagggtaagagaccacagggattcttggatcctcccaaatttgagtggaatggaacaaaggagcgacagctttggacaatggtatcaaatttgaattattcacaagatcaaatagattggctgaatttatcaaaaatatttgaaacgcctgaattttttcttaaaaagagaacatataaattatttgctgaacacttagagcttttacaactacaattggagaaaaaaagagatcttgagaagtattcaaatgatcaagtgaatgaagggatgtctgatttaatacataaatatacccctactttacaaaatgataatctattaaatgtatccgcaagcccactgaccacggaaagacaggattccgaagaagttgagacagaagtaacaaatgaggcgttacaacatttgcaaacttccaaaattttgaacattcacaagaaaacatcggatagtgagaataagcctaatgacaaattggataaggatggtattaataaggaaatggagtgcggtagttcagatgacgatttatcttcgagcttaagtgttagtaaatctgcgttggaagaagcgctaatggacagattgcaattctga

SEQ ID NO: 79116 - DNA, 456 bp, Saccharomyces pastorianus
atgattgtgatgttagtaaagacgattagccgaactattgaatcagaatctggatttctacagccgacgctggatgttattgctactctacctgcagacgatcgttctaaaaaaatacctattagtctggtagtgggatttaaacaagaggcctcgctgaattcatcttcatccttatcatgttattactacgccattcccttaatgagggatagacatatgaacctcaaatcaggcggaagcaacgttgtggggataccgttattagatactaaagatgaccggattcgtgatatggctagacacatggccacaataatatctgaaaggttcaataggccgtgttatgtaacgtggtcatcgctgcctagtgaagatccctctatgctagtagcaaaccatttatatatcttaaagaagtgtctcgatctcttgaaaactgaactcggtgagtaa

SEQ ID NO: 79117 - DNA, 498 bp, Saccharomyces pastorianus
atgaccactcgaaaaacagtagattcaagacttttagaatggcaaaccacatgcaagcatccagtgataaacttgacgccagagaaagtcgataaattataccacttgaaattgaaaagtgaaagcaaaaatatcagttcaaacaggctattgcccatttcattatcaagcttacaaaaaaaaatggagaaacttttcatcaaagataaaagtcactcacacaagccttcccttccagatcctaaggtgccaacccttcgcacttataaagatggtggatttttcattagcggaaaaggttcaatgaaactaccagatatcgaaagcgctattcataaatttttatggaagaaatacgggaaaggattggtttactgttatgggtgtgatccaactggaaaaaagaggcatacagagtggttcaatgtgcctgtattggagctaccatcagtactaagacttattgattcttattgccttggaggagaatcttgttag

SEQ ID NO: 79118 - DNA, 2472 bp, Saccharomyces pastorianus
atgtcgtcttcctcacttcgagttttagctattgggaacaacccgaatatcttgttctacacctcaaggtttcaactggccaagaatatagacctctaccacgtcaacgattcaaaatcatgtcaatttgaaattgaaactgaatactacggcaaagaccggttcgaattggaaaatcatttcacctctatcgagcacttgactgaagctttgagctccaaatcaagtgaagccgtcttcgacataatcatcatgagtgctccatctttacaggaattatcctcgttagcgtccaagttaacgtccataatcgattcgaacaccaaaattttcttagaaagcagtggtttcatccaattggaaccgtttgtcaaattatcgatggaatctccgcatgtaaacgttttcagtattttgactgatttggatattcgtcaaatcggtccaaaccatttcaagcactttcctagtactgcaaaggagaacacgatttacctcggcgaaagtaagtccagcactgagaaatattcatcaggcgttataacattattaaccacttttgaaaaactgtttgctaaattgttttccaacataaaaatcaatttgtgcaatttctcatcaattgagtttctatcacaacaatggaagctggcgatttccagaatttgttttgatccgttgttaatcatgtttgaacaagaaaacccaagtgatctagaccagcagatcattgccaaacctttaatatcaggtctggtaactgaaatcatcactgtagcaaaaacaatgggagccagactaaacagtagttatgataatgaaaactctcttttatctctatggaagaattcttatcattcaaccaataagccacctgcattggtttatcatttcattcatcaaacaacgcctttaaacatcgatatcctgttgttacaaactattttattagccgatgactttggtatcaaaactccgtacttagaatttttatactctgttttgtcccaatttgaaagattgaatagtggcaaatctaaatggtttattaggtcagatgaaaaaactcaaatcttacaaagcttgcaaaaatcacaaaaaaatgaatctgctttacagactcaaattacctccttacaaggtcaaattagtaaactaagacaagagttgcttatgcaggccaagcaacatgaaatggaaactaatgagttaaaggagaaacatcaagttgctctaaaagcccaagcccaagcccaagctcaagcccaagctcaagcccaatctcaagctcaaacatcaattgaagcactaacgccaactgaagcaacaaaccaatccgatacaaatgaatataaagcaacaggaactccgaatttgagggacatcgaagatatggcactatatagtgtaaactacggagactctccagtgagatctccaccacctgttgtaagctctcagccacaaatgaactcaccattatcctcacattcacaaactttcggagagactaatggcacgaatgacaaattactacaagaacgcgaattgcaactccgtaaaaaggaattagagctacaagaacgtgaactggagttccagaaaagagcattacagcaacaaagatttaataatagcaataattcaattccaagaaagccttccttccctcaattacagcagtctgcaaacgttcgttctaacagcagaggaatgcatggcaccaatggcgctatgtctcaacctgcatccgccggaaattttgtagatccaatttcttcaagtatcgctgcatatgacccgcaacaacctccttccttacccctacagcagtcacaacaatcggtacaagtacaaccttttcactcacactctatcaagcccacaagtaggaagaatagaaatagtaatatgcctaatattggtaatccttccagtataaatatgagtgattttggcagaccaccgaacaattcaagtcaaactcgcttaaattccatgccaacgcatagcatcgtaaaccagaatagattgagatcacaacaatcgaaaaacaaactgaatatgccacatgccaccaacccaaacaatacttttaaccaagtccctgctcctagtttaaacaatcacgttcccacacaaaggcaatttagctccagtaccatgatagaagttacaaataataacaacaaagttaataacagtagtagcaaccctgatatttccaccaattcggtagttcataacgcaatgcaatttacaaatacaaacaacaatacaagtagcactgtggatataaacgatcccaaaaatattgcaccccctcctacaacctctgtttcagccccaagcactccaaccttgtcctcatcaagtcaaatggtgaatatggcttcgcctagtaccgataatggtgacaatgaggagaaaaatggtggtaagaagaagagatttggcctattcaaaaaaaaa

SEQ ID NO: 79119 - DNA, 480 bp, Saccharomyces pastorianus
atgacaattgaaaaaccaaaaatatcggtcgcattcatttgtttgggtaacttctgtagatcaccaatggcggaagccattttcaaacatgaagtcgaaaaggctaatctagaaaatcgattcaacaagattgattcatttggcacttctaattatcatgtgggggaaagccctgatcatcgtacagtgtccatttgtaagcaacatggcgtcaagattaatcataaagggaaacaaataaagaccaaacacttcgatgaatatgactatataatcggtatggatgaatccaacattaatagcctaaaaaaaatacaacctgaaggttctaaagctaaagtttgccttttaggtgatgggaacactaatgatggcactgtgcagaccattattgaagatccttggtatggtgacatacaagatttcaagtacaatttcaaacaaatcacctatttctccaaacagtttttaaaaaaagag

SEQ ID NO: 79120 - DNA, 804 bp, Saccharomyces pastorianus
atgggtttacctgaagttaactttcttcgaaaaaactgcatacttgtggagttaaaattattctatcaaacagtatacccaccgaaggaactatattggaataaccgaataaccgcagaattgagtacattctccaatattaagtatgcaaggccgactttcgcagtaaataatggcacatttcagagaacaagaccgaaattagacttggtactggcttcatctgatattcgtaagctggctacggttttatttaatttaaaagctctcataatgaatacgaagggtgaggaacccactctaaccacgatgactagtgtccaaacgaacgaagagaaaaatgataacctggaacagaaatattcaagtctgctagatagatggaatgggaaagtagaagtgcatgattctcctttccttcaactccaacgggacagcacccttttgtttgctgagaggccggtacgttacgttagcactacagaaggtgaaggcgtggacatatctagtgaagagtttttcaggttagaggaagaacagtgccgaaggaattatgatgttttggtcgatgaacattctacaccatcaatcgggatgaaagacggccaatacggaccaaatataattcactttgaaccgtcgctgtaccacacatattcttctctaccaatgagtatgaaattttggttaaatggtctagaagacgacgaaacgacgatgatgaacattgatgagaagtcagccgaaaatctggatatattattacatggtttcaaaggattttcgaacaagcgcgttaaagga

SEQ ID NO: 79121 - DNA, 1530 bp, Saccharomyces pastorianus
atgaatatagagacgaagccgataggccatggtggagatttttcgatgaacaagagtatcggatcaatgaaaaggaaagatctcacaataaatggtatagttggttcaaacagggtacctcttttaaagaaaaaaaaattattaattaaattggatgtccttttagccttttattcttgtattgcttattgggtcaaatatttggatacggttaatataaacaacgcttacgtttcgggaatgaaggaagatttaggctttcaaggtaatgatttggtgcatactcaagtaatgtacacaattggtaatattatatttcaattgccatttttgatttacctgaacaagctcccattaaactatgttttaccaagcctcgacttatgttggtcgcttttaaccgttggtgctgcatatgtcaattctgtaccacacttgaaagcaattaggtttttcattggggcttttgaagcgccaagttatttggcataccaatatttgtttggttccttttacaaacatgatgaaatggtgcgtcgttctgctttttactatttgggccagtatatcggtattctatccgctggtgggatccagtcagccgtatattcatcgttaaatggtgtaaatggtttagagggatggagatggaactttattattgacgctattgtgtctgtcatagtgggccttattggattttactccctgccaggtgacccatacaattgttattctattttcttaactgatgacgaaattagattggcgaggaaaagattaaaagaaaaccaaacaggtaaaagtgattttgaaacaaaagtattcgatattaaactgtggaaaacaattttcagtgattggaaaatatacattttaactttatggaatattttctgttggaatgacagtaatgtttcatctggggcatacctactatggttgaaatctttgaaaagatactctattcctaagctcaatcagttatccatgattactccgggtttaggtatggtttatttgatgcttactggtgttattgcagataaattacactctcgttggtttgcgattatttttactcaggttttcaatatcattggtaactccatattagccgcttgggacgtcgcagaaggagccaaatggtttgcatttatgctgcaatgttttggttgggctatggctcctgttttatactcttggcagaacgatatttgtcgccgagatgctcaaactagagctattactttagttacaatgaatattatggctcaatcatctaccgcatggataagtgttttggtttggaaaacagaagaagctcccaggtatttaaaggggttcagtttcactgcatgctctgctttttgtctctccatttggacttttgttgtactctacttctataaacgtgatgaaaggaacaatgccaagaagaacggtattgtgctttataactctaaacacggtgtggaaaaggcaacgtcaaaagaagttgaaaccttatcagtatctgatgaaaaataa

SEQ ID NO: 79122 - DNA, 402 bp, Saccharomyces pastorianus
atgtattcaattgttaatgagattattgtagatccttacaaaagactaaaatggggttttattccagtaaagcggcatgtggaagacctgccagatgacttaaattcaacagaagttttcactatctccaacagtatccagagtcatgaaacagctgaaaatttcatcacgactacaagtgaaaaagatcaactacattttgagactagtagctatagtgaacataaagacaatgtgaaccttactagaagttatgaatatagagacgaagccgataggccatggtggagatttttcgatgaacaagagtatcggatcaatgaaaaggaaagatctcacaataaatggtatagttggttcaaacagggtacctcttttaaagaaaaaaaaattattaattaa

SEQ ID NO: 79123 - DNA, 471 bp, Saccharomyces pastorianus
atggacgcatgtgagcaacgtcgacattgccttgccctgtgctaccaaaacgaggtcagtggtgacgaagccaaggccctagtggcatctggcgttaagttcgttgccgaaggtgctaacatgggttctacacccgaggctatttctgttttcgaaacagcgcgtagcactgcaaccaatgccaaggatgcagtttggtttgggccaccaaaggcagctaacctgggcggcgtggcagtatccggtctggaaatggctcagaattctcaaaaagtaacttggactgccgagcgggtcgatcaagaactaaagaagataatgatcaactgcttcaacgactgcatacaggccgcacaagagtactctacggaaaaaaatacaaacaccttgccatcattggtcaagggggccaacattgccagcttcgtcatggtggctgacgcaatgcttgaccagggagacgttttttag

SEQ ID NO: 79124 - DNA, 984 bp, Saccharomyces pastorianus
atgacaagcgaaccagagtttcagcaggcttacgatgagatcgtttcttctgtggaggattccaaaatctttgaaaaattcccacagtataaaaaagtgttacctattgtttctgtcccggagaggatcattcaattcagggtcacgtgggaaaatgataatggcgagcaagaagtggctcaaggatatagggtgcagttcaattcagccaagggcccttacaagggtggcctacgcttccacccatcagtgaatctgtctatcctaaaatttttgggtttcgaacagatcttcaagaatgcgctcactgggctagatatgggcggtggtaagggtggcctgtgtgtggacttgaaaagcaagtctgacaacgagatcagaaggatttgttatgcgttcatgagagaattgagcaggcatatcggtaaggacacagacgtgcccgcaggagatattggtgtcggtggccgtgaaattggctacctattcggcgcttacagatcatacaagaactcctgggaaggtgtgttgactggtaagggtttaaactggggtggctcacttatcaggccggaggccaccgggttcggcctagtttactatacgcaagcaatgatcgattatgcaacaaacggcaaggagtcgtttgagggcaaacgtgtgacaatctccggaagtggcaatgttgcgcaatatgcagctttaaaagtgatcgagctgggtggtattgtggtgtctttatccgattcgaaggggtgcatcatctgtgagacgggcattacttctgagcaaattcacgatatcgcttccgccaagatccgtttcaagtcgttagaggaaatcgttgatgaatactctactttcagcgaaagtaagatgaagtacgttgcaggagcacgcccatggacgcatgtgagcaacgtcgacattgccttgccctgtgctaccaaaacgaggtcagtggtgacgaagccaaggccctag

SEQ ID NO: 79125 - DNA, 567 bp, Saccharomyces pastorianus
atggccaagaaaatatcaaagaattcaagagctgctagacaatcggatgctcttgagccagaagtaaaggatttaagtgaactacctagagctgaaaaaaccgatttgactaatattttgattagaacagcagccaagaatgaggcattgctggaagcaaagatatctaagaaagccaataaaagtaagaggggcaagaagttaaataaaaaggctctggaagacaaactggccaactctatttcatccatggacagggatcgtttagtgaaggccttgaattttaccaatcgtctggacggtaaaattgccaagtctatttctcgtgccaagtacattcaaaatacaagaaaggctggctgggatagcaccaatgagactataaaaaaagagctggcttttttgaacggagggttgtctgtgcaggaaaaaagtgctggtgaaggtaatgctgaaaaggaagatgaggagatcccagaagtttttgactctttagcagaggataacacagtgcagaagactcctacaaatagattcggtgtcctgccagacgatgttgaagaatag

SEQ ID NO: 79126 - DNA, 663 bp, Saccharomyces pastorianus
atgattccacatccagatggcactgaaccaccagaatggaacagctccatccccgaatacattcttgacccaaatgctcgaaagccctcgtggtggaaggaacttgagcacggggaatggataccgcccatgattaaaaaccctctttgcactgcagaacgtggttgtggccagcagataccagggctgataaataatgccaagcacaaaggtccaggcgaacccaatgaaatcataaatcccaattacatgggggaatggcatccaccggaaattgaaaacccgctatactacgaagagcagcacccattgcgcatcgaaaacgttatcagtggtgtgatcctcgaattttggagtggatctccaaacatgttgataaccaacatttatgttggtaaaaatgtaacagaggcgcaaattattgggaataagacttggctgatgagagaccgtgcgtttagaggctccgatggccccacagaacgcaaattcatgaatagcagactaggaaatctacaaacaactttccataacgaaagagaatcccctaatccatttgaccgcattatagatcgcatcttagagcaacctctgaaatttgtgcttactgcggccgtcgtgctcttgacgacgtcggttctttgttgtgtagtatttacatag

SEQ ID NO: 79127 - DNA, 1389 bp, Saccharomyces pastorianus
atgaaattttctgcgtatttatggtggctgtttttgaatctagcgttggtgaaaggcacttcattgctatccaacgttacattagcggaggattctttctgggagcattttcaggcttacactaatacaaaacatttaaaccaagagtggatcacaagtgaagccgtcaacaatgaaggctctaaaatatatggtgcacaatggcgactatcacagggtcgattgcaaggatccgcatgggataaaggaatcgcagttcggacaggcaatgccgcagctatgataggacatctcttggagacacctattaatgtttcagaaacggataccttggttgtccagtacgaaattaagttggacaattctttgacgtgcggcggtgcgtttattaagttaatgtctggtttcatgaatgttgaagcattaaaacactatgcacccgatacagagggtgtcgagttagtttttggtccggattattgtgctcctgaaataaatggcgtgcaatttgcaatcaataaggttgacaagatcacacatgaatctaaactaagatatttgcaagagatgcccctgtcaaaattaactgatacctcgcaatctcatctgtatacgctcataatagatgaatcagcgcagtcttttcaaattcttattgacggtaagacggttatggtaagagaacatatcgaagacaagaaaaaggtcaattttgagccacccattacaccgcctttaatgattcctgatgtttcagtagcgaaaccgcatgattgggatgatcgcatccgaatcccagatcctgaggcggtgaagctcagtgatcgggatgaacgagacccattgatgattccacatccagatggcactgaaccaccagaatggaacagctccatctccgaatacattcttgacccaaatgctcaaaagccctcgtggtggaaggaacttgagcacggggaatggataccgcccatgattaaaaatcctctttgcactgcagaacgtggttgtggccagcagatagcagggctgataaagaattccaagtacaaaggtccaggcgaactcaatgaaatcataaatcccaattacatgggggaatggcatccaccggaaattgaaaacccgctatactacgaagagcagcacccattgcgcatcgaaaacgttatcagtggtgtgatcctcgaattttggagtggatctccaaacatgttgataaccaacatttatgttggtaaaaatgtaacagaggcggaaattattgggaataagacttggctgatgagagaccgcgcgtttagaggctccgatggacccacagaacgcaaaatcatgaatagcagactaggaaatctacaaacaactttccataacgaaagagaa

SEQ ID NO: 79128 - DNA, 108 bp, Saccharomyces pastorianus
atgattttgcgttctgtgggtccatcggagcctctaaacgcgcggtctctcatcagccaagtcttattcccaataatttccgcctctgttacatttttaccaacataa

SEQ ID NO: 79129 - DNA, 1500 bp, Saccharomyces pastorianus
atgcattccaaacatttttttaagttgtatgagccttggtctattggccaaaatgcagccatcgaatttctctcttcaactttgcacaagatgagggttgatgaatcgcagcggttcataattaacaataaactggaattgcaatccttcctttataaacccgtgcaaaggctttgtagatatcccctgttggtcaaagaattgcttgctgaatcgagtgacgataataatacgaaagaacttgaagctgctttagatatttctaaaaatattgcgagaagtatcaacgaaaatcaaagaagaacagaaaatcatcaagtggtgaagaaactttatggtagagtggtcaactggaagggttatagaatttccaagttcggtgagttattatatttcgataaagtgttcatttcaacaacaaatagctcctcggaacctgaaagagaatttgaggtttatctttttgaaaaaatcatcatccttttttcagaggtagtgactaagaaatctgcatcatcactaatccttaagaagaaatcctcaacctcagcatcaatctccgcctcgaacataacggacaacaatggcagccctcaccacagttaccataagaggcatagcaatagtagtagcagtaataatatccatttatcttcgtcttcagcagcggcgataatacattccagtaccaatagtagtgacaacaattccaacaattcatcatcatcctcattattcaagctgtccgctaacgaacctaagctggatctaagaggtcgaattatgataatgaatctgaatcaaatcataccgcaaaacaaccggtcattaaatataacatgggaatccataaaagagcaaggtaatttccttttgaaattcaaaaatgaggaaacaagagataattggacatcgtgtttacaacagttgattcatgatctgaaaaatgagcagtttaagacaagacatcactcttcaacatcgacgacttcatcgacagccaaatcatcttcaatgatgtcacccaccacaactatgaatacaccgaatcatcacaacagccgccagacacacgatagtatggcttctttctcaagttctcatatgaaaagggtttcggatgtcctgcctaaacggaggaccacttcatcaagtttcgaaagtgaaattaaatccatttcagaaaatttcaagaactctattccagaatcatccatactcttcaggatatcatataataacaactctaataatacctctagtagcgagatcttcacacttttggtagaaaaagtttggaattttgacgacttgataatggcgatcaattctaaaatttcgaatacacataataacaacatttcaccaatcaccaagatcaaatatcaggacgaagcatggggagatgttgttgtgttaggtagcgatgaagattggaatgttgctaaagaaatgttggcagaaaacaatgagaaattcttgaacattcgtctgtattga

SEQ ID NO: 79130 - DNA, 1023 bp, Saccharomyces pastorianus
atggcgatccaaacccgttttgcctcgggcacatctttatccgatttgaaaccaaaaccaagtgcaacttccatctccatacccatgcaaaatgtcatgaacaagcctgtcacggaacaggactcactgttccatatatgcgcaaacatctggaaaagactggaggtgttacctcaactcaaaccttttttacaattggcctaccaatcgagcgaggttttgagtgaaaggcaatctcttttgctatcccaaaagcagcatcaggaactgctcaagtccaatggcgctaaccgggacagtagcgacttggcaccaactttaaggtctagctctatctccacagctaccagtctcatgtcgatggaaggtatatcatacacgaattcgaatccctcggccaccccaaatatggaggacactttactgacttttagtatgggtattttgcccattaccatggattgcgaccctgtgacacaactatcacagctgtttcaacaaggtgcgcccctctgtatacttttcaactctgtgaagccgcaatttaaattaccagtaatagcatctgacgatttgaaagtctgtaaaaaatccatttatgactttatattgggctgcaagaaacactttgcatttaacgatgaggagcttttcactatatccgacgtttttgccaactccacttcccagctggtcaaagtgctagaagtagtagaaacgctaatgaattccagccctactattttcccctctaagagtaagacacagcaaatcatgaacgcagaaaaccaacaccgacatcagcctcagcagtcttcgaagaagcataacgagtatgttaaaattatcaaggaattcgttgcaacggaaagaaaatatgttcacgatttggaaattttggataaatatagacagcagttattagacagcaatctaataacgtctgaagagttgtacatgttgttccctaatttgggtgatgctatagattttcaaagaagatttctaatatcctggaaataa

SEQ ID NO: 79131 - DNA, 486 bp, Saccharomyces pastorianus
atggtaaagggcagattgcgaacggcgaatcccggagatgcagtgagtccatgtgcagtccacacttttctaatgaaggtgctggcagaagtgctcgaatgggaaaaaccgcacacagatgaaagccacgtgcagcctaagttgctgaaattcatggggaaaccgggcgtattgagccctcgtgctcgctggatgcacctgtgcggcctactgtttccgtcccattttagccaagaactaccattcgacaggcacgactggattgtactccgaggcgagcgcaaagcggaacaacaacctccaaccttcaaggaagttagatacgtcttggatttctacggagggcccgacgacgaaaacggaatgcctactttccacgtggatgtccgtcctgccctagatagtctagataatgcgaaggaccggatgacccgtttcttggaccggatgatctcgggtccgtcctcttcgtcctccgccccttaa

SEQ ID NO: 79132 - DNA, 1635 bp, Saccharomyces pastorianus
atggctgaatatgaaaaacaaacttttgatgtcccaggtcttttggttattgataccccaggtcacgaatccttctctaacttacgttcaagaggttcttcattgtgtaacatcgcaattttggttattgacattatgcatggtttggaacaacagactattgaatctatcaaactgttaagagatagaaaggctccatttgtcgttgccctaaacaaaattgatagattatatgactggaaagccattccaaacaattcattcagagactcctttgcaaagcaatcaagagctgttcaagaggaatttcaatctaggtattctaagattcaattggaattagctgaacaaggtttgaattcggaattgtatttccaaaacaaaaacatgtctaagtatgtctccattgtcccaacatctgccgtcaccggtgagggtgttccagatttattgtggttgctattagaattgacccaaaagaggatgtccaaacaattgatgtacttgtctcacgtggaagcaaccattttggaagtgaaagtcgtggaaggttttggtaccacaattgatgttatcttgtccaacggttacctgagagaaggtgaccgtattgtactgtgtggtatgaatagtccaattgtaacgaatatcagagcattattaacaccacaaccattacgtgaactacgtttgaaatctgaatatgtccaccacaaagaagtcaaggctgctttaggtgtcaagattgccgctaatgatctagaaaaagccgtttctggttctaggctgctagttgtcggtcctgaagatgacgaagatgaattgatggacgacgttatggatgatttgactggtttgttggactccgttgacacaactggtaaaggtgttgtggtccaggcatccaccttgggttctttggaagctttgttggatttcttgaaagacatgaaaatccctgtgatgtctatcgggttaggtccagtgtacaagcgtgatgttatgaaagcctccactatgttggaaaaggctccagagtatgccgtgatgttatgttttgatgttaaagtggataaggaagctgaacaatacgctgaacaagaaggaattaagatctttaatgcagacgtcatctatcatttatttgattcatttacagcataccaagaaaagttattggaagaacgtcgtaaagatttcctagattacgctattttcccatgtgtcttacaaaccttacaaattattaacaaacgtggtccaatgattattggtgtagacgttctggaaggtactctacgtgtgggaactcctatttgcgctgtgaaaaccgaccctactacaaaggaaagacaaactttgatattaggtaaagtcatctctttagaaatcaaccatcaacctgtccaagaagtaaagaagggccaaaccgctgctggtgttgccgtccgtctagaagatccctccggtcaacaacctatctggggtcgtcatgttgacgagaatgatacattatactccttggtttcaagaagatctattgacactttgaaggataaagcttttagggaccaagttgctagatccgattggctgctattgaagaagctgaaggtcgttttcggcatcgaatga

SEQ ID NO: 79133 - DNA, 948 bp, Saccharomyces pastorianus
atgtctactttgaagcaatcgaagaagaagcaagaaaagaaggttattgaagagaagaaggatggtaagcctatactaaagtccaagaaggaaaaggagaaggaaaaaaaggaaaaggagaagcagaagaagaaagaacaagctgccagaaagaaggcccaacagcaagctcaaaaggagaagaacaaggagttgaacaagcaaaatgttgaaaaagctgctgctgagaaggctgctgctgagaaatcccaaaaatctaaaggtgaaagtgataaaccaagtgctagtgctaagaagccagccaagaaagtacctgccggtttggctgctttgagacgtcaattagaattgaagaaacaacttgaagaacaagaaaagttggaaagagaggaagaagaaagattggagaaagaagaggaggaaagattggccaacgaagaaaaaatgaaggaagaagctagagcagctaaaaaggaaaaggagaaggcaaagcgtgaaaaactaaaggctgaaggtaagctattgaccagaaagcaaaaggaagaaaagaaattattggaaagaagacgtgccgctttattgtcttccggtaacgtcaaagttgccggtctggccaagaaggatggagaagaaaacaaaccaaagaaggttgtttacagcaagaagaagaagagaacaactcaggaaaacgcctccgaagccattaaatctgactctaagaaagactcggaagttgtacctgatgacgaactcaaagaatccgaagatgttttgattgatgattgggaaaatttggctcttggtgatgatgacgaggagggaaccaacgaagaaacgcaagaatccaccgcaagccatgaaaatgaagaccaaaatcaaggcgaagaagaagaaaacgcgaagagaaggacagcaccacaccacgaccaccaagagccctgtgcctga

SEQ ID NO: 79134 - DNA, 198 bp, Saccharomyces pastorianus
atggcgaaaaagagtaaaaagaaccaacagaactactgggatgaggaattcgaagaagacgccgcccagaacgaagaatcagtgccacgccaactccaaatccagaaagcagcgcaggtgcagatgacacttccagagaagcaagtgcaagtgctgaaggtgctgaggccattgaaggcgacttcatgtctactttga

SEQ ID NO: 79135 - DNA, 1242 bp, Saccharomyces pastorianus
atgggattatattctccggaatctgaaaagtctcaattaaatatgaattacattggtaaggatgattcgcagtccattttcagacgtctgaatcagaatttgaaagcaagtaacaacaataacgatagtaataaaaacggtttaaacatgagtgattatagcaataattcaccctatgggcgctcgtacgacgtaagaattaaccagaactcacaaaataatggcaatggatgcttttctggcagcattgactccttggttgatgaacagataataccatcgccacctttgtcgcccaagctggagtcgaaaattagccacaatggctcaccccgcatggcctcttcagtgctagtgggatctacgcctaaaggcgctgtagagaatgtgctgttcgtgaagcctgtatggcccaatgggttatcaagaaaaaggtaccgctacgccacctacgggtttctgtctcaatacaaaattttcagcaatttggcccaaccatattctaagaacattatcaaccggtacaacaatctggcctataatgctagacataaatattccaaatacaatgatgatatgactcctcctcctctgccttcctcttcttctagattaccttccccgttagcatctccgaatttgaatagacaagcaagatataatatgaggaaacaggctctctacaataacaatctaggaaagtttgaatccgacactgaatggataccacggaaacgcaaggtatactcaccacaaagaagaacgatgactaccagtccacatcgcgccaagaagttctcaccctctgcatccactcctcacactaacattgcatccattgaggcgattcatgatgctcctcaatatataccaaacgtctcatggaaaaaattaccagattactctccgcccttatctacgcttcctacagacagtaacaagtcactcaagatcgagtggaaggggtctccaatggacctgtccacagacccgctgaggaacgagctgcaccctgctgaactagttctcgctcaaactctaaggttaccttgtgatttgtatctggattctaagagaaggttatttttggaaaaagtttatagactaaagaaagggttgccgtttagaaggaccgacgcccaaaaagcctgtaggatcgacgttaataaagcatcaagactattccaagctttcgagaaggttggctggctacaggattcgaattttacgaagtacttataa

SEQ ID NO: 79136 - DNA, 228 bp, Saccharomyces pastorianus
atgagagataacataaataaagtggcagaaagaggtgaaagattaacgtccattgaagataaagccgataacctagcggtctctgcccaaggctttaagaggggtgccaatagggtcagaaaagccatgtggtacaaggatctaaaaatgaagatgtgtctggctttagtaatcatcatattgcttgttgtaatcatcgtccccattgctgttcactttagtcgatag

SEQ ID NO: 79137 - DNA, 153 bp, Saccharomyces pastorianus
atgtcgtcatctactccctttgacccttatgctctatccgagcacgatgaagaacgaccccagaatgtacagtctaagtcaaggactgcggaactacaagctgtaagtacagaaagccacagagtaccatctaggaaattaacattatactaa

SEQ ID NO: 79138 - DNA, 1188 bp, Saccharomyces pastorianus
atgatacaggcagctcatgttggtgtcggtaatagtggtatggaaggtatgcaagcggctcgttcagctgatatagctgttggccaatttaaattttttaaaaaactattacttgtccatggctcctggtcttatcaaagaatttctgtcgcaattttgtactctttttacaagaatacagcattatacatgacgcagttttggtacgtttttgccaatgccttttcaggtcaatccattatggaatcatggacaatgagtttctacaacttattcttcactgtttggcccccttttgtcattggtgtatttgatcaatttgttagtagtagattacttgagcggtacccacaattgtacaaattaggacagaagggtcaatttttctctgtttacatcttctggggatggattattaatggctttttccattctgcaatagtatttattggcaccatattgatttacagatatgggtttgccttaaatatgcacggcgaactagctgatcattggtcttggggtgtaactgtctacactacaagtgtcattattgttttgggaaaggctgctttggtaactaatcaatggacgaaattcaccttaattgccattcctggttccctcttattttggttaatattcttcccaatttatgcttctatatttcctcatgctaacatctcaagagagtattatggtgtggttaaacacacgtatggatctggtgtattttggctaactttgatcgttttaccaatttttgcacttgtaagagattttctatggaagtactataaaagaatgtatgaaccagaaacgtatcatgttattcaagaaatgcagaaatacaatatcagcgactctaggccgcacgttcagcaatttcaaaatgccatcaggaaggtgaggcaagtgcaaagaatgaaaaaacaaagaggatttgccttttcacaggctgaagagggtgggcaagaaaaaattgtcagaatgtatgatactactcaaaagagaggtaagtacggtgaattacaagatgcttcggcgaacccctttaatgacaataatgtactgggaagtaacgactttgaaagtgcagaaccgttcattgaaaatccatttgctgatggtaatcaaaattcaaatagattcagttcttcgagagatgatatttcatttgatatatga

SEQ ID NO: 79139 - DNA, 2850 bp, Saccharomyces pastorianus
atgaatgacgacagagaaacccccccaaagaggaaacctggggaggacgacacgcttttcgatattgacttcttagacgacacgacttctcattctggatcccgttcaaaggtcaccaactcacatgcgaacgcgaattatataccaccaagtcatgtacttcccgaagagactatcgacttagacgctgatgatgataacattgaaaatgatgtccatgaaaatccatttatgagcaataaccatgacgaccaaacgtcttggaatgccaatagattcgactcagatgcatatcaaccacaatccctacgagcagtcaagcctcccggtttatttgctaggtttggtaatggtctcaaaaatgcctttacgttcaaacggaagaaagggcccgaaagtttcgaaatgaatcattacaatgcggtgactaataacgaattagacgataattatctagactcgaggaataagttcaacattaaaattcttttcaaccggtacattttaagaaagaacgttggcgacgcagagggcaatggtgaaccaagagtcatccacatcaacgattctctcgctaattcctccttcggttatagtgacaaccatatatctaccaccaagtataattttgcgacctttctgcctaaatttttgttccaagaattttccaaatacgctaatctgttttttttatgtacatctgccattcaacaggtgcctcacgtctcgccaactaatagatacaccacaattggtactttattagtggttttgattgtttctgccatgaaggaatgtatcgaagatatcaagagagctaattctgataaagaattaaataattcgacagcagaaatattttcagaagcacatgatgactttgttgagaaacgatggattgatattcgtgtaggtgacataattagagtaaaatcagaggaacctattcctgctgataccataattttgtcatcttcggaaccggagggtctttgctacattgaaactgccaacttggatggtgaaacaaatttgaaaatcaaacagtcgagagtagaaactgccaaatttatagacgttaaaactttgaagaacatgaacggaaaagttgtttccgaacagccgaactctagcttgtatacttatgaaggtacaatgactttaaatgatcgtcaaataccgttatctcctgaccaaatgattttaagaggtgcaactttaagaaatactgcatggatatttggtttagttatcttcactggtcatgaaactaagttattgcgtaatgctactgcaaccccaattaaaagaaccgcggttgagaaaattatcaacagacagattattgcattgttcacagttttaatcgtgctaattttaatttcttcaattggtaatgttattatgtctactgcagatgccaaacatttatcgtacctttacctggagggtaccaacaaggctggcttattcttcaaagactttttaacattttggattctattttcgaatctagttcctatttctctatttgtcaccgttgaattaatcaaatattatcaggcttttatgataggttcagatctagatttgtactacgaaaaaactgataccccaactgtggttcgtacatcctctttggttgaagaacttggtcaaatagaatatatattcagtgacaagacaggaactttaacaagaaatattatggaatttaaatcctgctctattgcaggccattgctatattgataaaatacctgaagataaaacggccactgttgaagatgggattgaagttggttatagaaaatttgacgatttgaagaacaagttaaatgatccctctgatgaggattcacctattatcaatgacttcttaacattactggctacctgtcatactgtcattccagtatttcaaagcgatggatctattaaatatcaagcagcctctccagatgaaggtgccctcgttcaaggtggtgcagatttagggtataagtttatcatccgtaaaccaaactctgtaactgttttattggaggaaactggcgaggaaaaagagtatcaactacttaacatttgtgaatttaattccaccaggaagagaatgagcgctatatttagatttccggatggttcgataaagttattctgtaaaggtgctgatactgtcattctggaaagattggatgatgaagctaatcaatatgtagaagctacaatgagacatttagaagattatgcatctgagggtttgcggacgttgtgtttggcgatgagagatatctctgaaggagaatatgaagaatggaatagcatttataatgaggctgccacaacattagataacagagccgagaagctagacgaagccgcaaatctaatcgagaaaaatctaatattaattggtgcaactgctattgaagataagttacaggacggtgttccagaaactatccacacattacaagaagcgggtattaaaatttgggttttaactggtgacagacaggaaactgctattaacattggtatgagttgccgtttattgagtgaagacatgaatttgttgatcatcaacgaggaaaccagagatgatactgagagaaatttgttagagaagattaacgctctaaacgagcatcaattgtcaacacatgatatgaataccttagcgctcgtcattgatgggaagtcattaggctttgccttggaaccagaattagaagattatttgctaactgtggcgaagctttgtaaagcggttatatgttgccgtgtatctccactacagaaagccttggttgttaaaatggtaaaagaaagtcgtcttcactactgctag

SEQ ID NO: 79140 - DNA, 2784 bp, Saccharomyces pastorianus
atggacaatttggatctgtatcaaaccgtaagttcaattgctcagtcagtcatctctttaactaatactttaaacaagcaactgcagaacaatgaatcgaatatgcagccatcaccctcgtatgatgcactgcaacgaaggaaagtaaaaagtctcacgacagcatattacaataaaatgcacggtagctactcagcagaaagtatgaggctctttgataaagataatagttcttcacgtacagacgagaatggacctcaaagattgttattccatgaaactgataaaaccaactcagaagcgattacaaatatgacaccaaggaggaaaaatcattcccaatcccaaaaaagcatgacttcttcgcctctgaaaaatgttctacctgatcttaaagaatcgtctcccttaaacgatagtagggaagacacagaatcaataacatactcatacgattccgagttgtcatccagctctccacccagagatactgtaacgaaaaagtcaagaaaagtcagaaacatcgtgaataatacagatagtccaactctaaaaacaaaaactggatttttaaatctaagagagtttacatttgaagataccaagtctttagatgagaaaaagagtactatagatggccttgaaaagaattatgataacaaagaaaatcaggaatcagaatatgagagcacaaaaaagctggacaactcactcgatgcatcatcagaagccaataattatgatataactacaagaaaaaaacattcatcttgcaatcacaagatcaaacaagcagttgtaagaccggctagtggaaggatcagcatttcaagagttcaaagcattgccataacaccaaccaaagagttatccatagtagatcctgagcaaaacaagtcaaactcagttatagaggaaataagtgaaatagaacctctcaacctggaatataataaaaaaagcgcgttgtactctgatacatcgtccaccgttatcagtatctcaacgagcaagctttttgaatctgctcagaatagtcctctaaaacaaactcaaaatccacagagagaatttcccaacgggaccagcgtgagtgaaaccaatagaatcagattatccatagcacccacaatagaatctgttgtaagtgatttgaattcgattaccactggtagcacagttgaaactttcgaaacgtccagagatttaccagtgccacaccaaaggataataaatttgagagaagaatatcaaaggggtaatcaagatataatctcaaatacttcttcattgcatgagttaaaaacaattgatttaagcgattccaataatgacctagaaagtccaagtacccatgcgaaaaacaacaagtattttttttcaccagatgacggtagcattgacgttgcttctccaatgaaaaacgttgaagagctgaaaagtaaatttctgaagaacgagagtgaaactaatagtaacatatcaggaagtgtattgacaatggacgatatcgacattaatgacacatctagtgcccggaacacacggagagcaaactctgagtcggcttttacaggctccttgaataagaaaaatttaaatgaaattgctaatatgctcgatgattcaattaatgacgatccaataaccgtggcattaatgaaactggaaggtacatacgagaaaattcccgaaaaaccagagaacaccaagagtagtgacgctattggaattaaaacgagcaagttagcagatgaagtggaaatgctaaaccttaacaacttgccgtcattccaaaatagccccgcagaaaaaagaaaatcgttattaatagaaagaaggagacaaactataatgaatatcccctttactccagatcaatccgagaaggaaggctttacttcctcctctcctgaaaaaatagacgtgtcagctaatgttgatgttgctgtgcaagcggcgcaaatccaggaattaatcggtcaatacaggattcacgattcgagattaatgatttctaataatgaaagtcacgttccatttatactaatgtacgattccctgtctgtagcgcaacaaatgaccttgatagagaaggaaattttaggagaaatagactggaaagatttattagatttaaagatgaagcatgaaggcccacaagttataagttggttgcaactactagtaaggaacgagaccttatctggcattgatttagctatatccagatttaacttaactgtggattggattatatcagaaatacttcttaccaagagcagcaaaatgaaaagaaatgtcattcaaaggtttatacacgttgcagaccactgcaggacatttcagaactttaacacattgatggaaatcattctagccttaagttcttcagttgttcaaaaattcactgatgcatggcgtctgattgaaccaggcgacttactgacttgggaagagctaaagaagattccctcgctagacaggaattattctacaataagaaatctacttaactctgtgaatccactggtgggttgcgtccctttcatcgtcgtatatctttcggacctatcagcaaacgcagagaagaaagactggatcttagaagataaagtagtgaattacaataaattcgatacgaacgttcaaatagtcaagaatttcattcaaagggttcaatggtccaagttttacactttcaaagttaaccacgaattgctgagtaagtgtgtttatattagcacattaacacaagaagagattaatgaactatccacatga

SEQ ID NO: 79141 - DNA, 1263 bp, Saccharomyces pastorianus
  modified_base (1245)..(1245): a, c, g, t, unknown, or other
  modified_base (1249)..(1249): a, c, g, t, unknown, or other
  modified_base (1252)..(1253): a, c, g, t, unknown, or other
atggaaatatttagccagaaagattactacccgactccatcctcaaatgttattagctatgaaagcgattgtgtatccaaaccagtgaatagtgcagacctgcccgcgttaattgtacacctttcttcccctttggaaggtgtagactacaacgcatctgcagactttttccttatttataggaattttataacgcctcaagacttacacgacttactcatctatagatttcgatggtgtattagggagatcacaacaaatgctgcaaaagctaagagaaggcgaattggtgaagttgccctcgtgaggacgtttgtgttgttgaggcattccatactgaattattttgtgcaagattttttaccgaacataacattaagacttcggttgatcgagtttctaaacgacaaacacattgaacagtacccaaaaataatttccagctgtataatcaatctgaaaaaaaactgggtgcattgttctaagttggtttgggagaatattgaactaaatgaacctgataaattagactttgatgcatggctgcattattcgttaaaggatttcacgcaactagaaagcctacacaaaagaggaagccgactgagcatttacgccaggcaaagttttgccagtcctgattttcgtaaccaaagcgttttatcattatataaaacttctgatgtatttagactgccggagaagctacagtcttcaaattcttccaaaaaccagagaagcccttctatgcttttatttcccgataatacatcaaatgtttactcgaagcaccgaatagcgaaagaaccttcagttgataatgaaagcgaggacatgtcagatagtaaacaaaagatcagccacttgtcaaaagtcactctagtatccacactaatgaaaggcgtagactacccgtcatcatatgcagtcgataaaataatgcctccaacaccggctaaaaaagttgaatttattctgaattccttatatattcctgaagatttaaatgaacaaagcggaacgcttcaaggtacatcgacgacatcatctctagataacaatagcaacagtaatagtagatctaatacatcttcaatgtctgtgttacatcgcagcgctattggtcttttagctaagtggatgaaaaaccataatcgccatgatagcagtaatgataaaaaatttatgagtgctattaaaccagcaaaccagaaacctgaaatggatgcgtttgtcaaatacgtntgtnatnncaatatcatc

SEQ ID NO: 79142 - DNA, 882 bp, Saccharomyces pastorianus
atgactaacaagcgaggaaaccaacctgttagtactttcctacgcacccccgaaaagaacatcggtgctcaaaagcatgttaagaagttttcggacttcgtaagtctgcaaaaaatgggtgaaggtgcatatggtaaggtcaacctatgtattcataagaagaataggtatattgtggtgattaagatgatttttaaagaaagaatccttgtagatacatgggttagagataggaaattaggcactataccttctgagatccaaattatggccacgttgaacaaaaaaccacatgagaatattttacggttactggatttttttgaagacgacgattactattatatcgaaactcccgtacatggtgaaacaggatgtatagatcttttcgatctaattgaatttaaaaccaacatgaccgaatttgaagcaaaattgatactcaagcaggttgtagcgggaataaaacatctacacgaccagggtattgttcacagagatatcaaggatgagaatgttatcgtagattctaaaggctttgttaagattattgattttggatctgctgcgtatgtcaaaagcggaccatttgatgtttttgttgggacaatagattatgctgcccctgaagtcttaggaggaaacccttatgagggccaaccacaggatatttgggctattggtattctattgtatacggtggtcttcaaagaaaaccccttctacaatatagatgaaatattagaaggcgacctgaaattcaataatgcagaggaagttagtgaagattgcattgagttaatcaagagtattttgaaccgttgcgtaccgaagagacccaccattgacgacataaataacgacaaatggttggttatttga

SEQ ID NO: 79143 - DNA, 2568 bp, Saccharomyces pastorianus
atgccctacatcggtgcttccaacctctcagaacattcatttgttaattggaaggaaaaacatgcgattacacataaaggtacgagcagttctgtagcatctttgcagacaccaccgagccccgatcaagagaaccatattgacaatgaattagaaaattacgatacgtctttgagtgacgtttcaaccccgaataaaaaggaaggtgatgagttcgagcaaagtttaagagatacatttgcgagctttcggaagactaaacccccacctcctttagattttgaacaaccaagacttccttcgacagcttcttcatccgttgattcaaccgtatcatcgcccttaacggatgaagacataaaggagttagagtttcttccgaatgaatcaactcattcttattcgtacaatccactttcgccaaattccctggcagtcagattgaggattttgaagagatcattggaaatcataatacaaaacccaagtatgctactggagcctactccagatgatttgcctcctttgaaagagtttgcgggccgtaggagcagtttaccaaggacatcggcttctgcaaaccatttaatgaacagaaataagagccagatttggaacactacttccgctactttaaatgcatttgtaaataatacctcttcctcctcagcagcatcttctgctttatctaacaaaaaaccgggcaccccagttttccctaatttggatccaacacattctcaaacattccatagagccaactcgttggcttatttaccttccatcttacctgagcaagatccgctgctcaaacataataattctttatttcgtggcgactatggaaacaacataagtcctgaaaggccaagttttagacaacccttcaaggatcaaactagcaatctccgcaatagcagtttactcaatgagagggcatatcaggaagatgaaacttttttaccgcaccatggaccctctatggatctattgaatgaacaaagagcgaacttgaaaagtcttctgaatttattaaacgaaacactggagaaaaatacttccgagagagcttcggatcttcatatgatatcgttgttcaatttgaataaactaatgcttggagatcccaagaaaaataattcagaacgcgataaaagaactgaaaagcttaaaaagattttgctggatagtcttgcagaaccattctttgagcactataattttattggagataatccgatcgcagatacagatgaactaaaggaggaaattgatgaatttacaggttctggagatacgacagcgataacagatatacggccccaacaggactatggccgcatattgaggacattcacttctaccaaaaattccgccccacaggcaatttttacatgtagtcaggaagacccttggcaattcagagctgcgaatgatctagcgtgcttagtattcggtatctcacagaatgccattcgcgctttaaccttgatggatttaattcacaccgatagcagaaattttgttttacacaaattactttctacggagggtcaagaaatggttttcacaggcgaaatcattggtatagttcaaccagaaacactcagctcatccaaagtagtatgggcatcgttttgggcaaaaaggaaaaacggcttattagtttgtgttttcgaaaaggttccttgcgattatgttgatgtacttttgaacctggatgattttggggccgagaatattgtagacaaatgtgagttattatcagatggacccacattgtcttcctcttctacattatcgctacctaagatggcttcttcaccaactggtagtaaattagagtattcgttggagaggaaaatcctggaaaagagttatactaagcctacttcaacagagaatcgcaacggcgatgaaaaccaacttgatggagatagtcattctgaaccatcgctgtcatcatcgccagtaaggtcgaagaaaagtgtaaagttcgcaaatgatattaaagacgtcaagagtataagccaatcgttagccaaattaatggatgatgtgaggaatggggttgtatttgatcccgatgacgaccttttgcctatgcccatcaaagtttgcaaccacattaatgaaacaagatattttactctaaatcatctatcttataatatcccatgcgcggtttcctccactgtgttggaggatgagctgaaattaaagattcacagtttaccttaccaggcgggtttgtttattgtggattcgcatactttagatattgtaagttccaataaatctattttaaaaaacatgtttggttatcattttgctgagctggtgggaaaatccattactgaaataattccttctttcccaaaattcctccaatttataaatgacaaatatcctgcgttggatatcacactccataaaaataaaggtttggtattaacagaacatttttttaggaaaattcaggcagagattatgggtgatcgtaaaagcttttatacgtcggtgggtattgatggccttcataggcatgtctgtgaaactctaaattga

SEQ ID NO: 79144 - DNA, 123 bp, Saccharomyces pastorianus
aatttaaatagagaaaactaccaactcattactgaagaaagtaagaagaacgacataccaagcattgtttctactggatatttttttgcattttcttttccaattactaatgtcctagaatga

SEQ ID NO: 79145 - DNA, 264 bp, Saccharomyces pastorianus
atgatctccttcagaatcaagggtggtgctgaagctgcttccaagttcgcctcctccacaagactgttcacattggccgaatcccttggtggtatcgaatctctattggaagtgcccgctgtgatgacccacggtggtatcccaaaggaggccagagaggcctctggtgtttttgacgacttggttagaatctctgtcggtattgaagacactgacgatcttttggaagacatcaagcaagccttgaaacaagccaccaattaa

SEQ ID NO: 79146 - DNA, 897 bp, Saccharomyces pastorianus
atgactctacaagaatctgataaatttgctaccaaggccattcatgccggtgaacatgtggacgttcacggttccgtgatcgaacccatttctttgtccaccactttcaaacaatcttctccagctaaccctatcggtacttacgaatactccagatctcaaaatcctaacagagaaaacttggaaagagcagttgccgctttagagaacgctcaatacgggttggctttctcctctggttctgccaccaccgccacaatcttgcaatcgcttcctcagggctcccatgcggtctctatcggtgatgtgtacggtggtacccacagatacttcaccaaagtcgccaacgctcacggtgtggaaacctccttcactaacgatttgttgaacgatctacctcaattgataaaggaaaacaccaaattggtctggatcgaaaccccaaccaacccaactttgaaggtcaccgacatccaaaaggtggcagaccttatcaagaagcacgctgccggccaagacgtgatcttggttgtcgacaacaccttcttgtccccatatatctccaatccattgaacttcggtgcagacatcgttgtccactccgctacaaagtacatcaacggtcactcagacgttgtgctcggtgtcctggccactaataacaagccattgtacgagcgtctgcagttcttacaaaacgccattggtgctatcccatctcctttcgatgcttggttgactcacagaggtttgaagactttgcatctacgtgtcagacaagctgccctcagcgccaacaaaatcgctgaattcttggcagcagacaaggaaaacgtcgtcgcagtcaactacccaggtttgaagacacaccctaactacgacgtagtgttaaagtaa

SEQ ID NO: 79147 - DNA, 240 bp, Saccharomyces pastorianus
atgacaatgaagttatcgggaattcacaaaagatttaaccaaatcatccgaaatagcgtttctccaatggaagaagttgttaaagaaatggaaaaaattctgcaaattggtactagattgtctggctataatctgtggtaccaattggatggatacgatgatgaagctttgagcgaaagtttgcggttcgaactaaatgagtgggagcacgccatgagaagcagaagacacaaaagataa

SEQ ID NO: 79148 - DNA, 1281 bp, Saccharomyces pastorianus
atgcgatttggaagtaacgctcgccgtagccaagtaagaatgcctgctgtcttgagaaccaggtccaaagaatcctctatagagcagaagcctgcttccagaactagaacgagatcaagaaggggcaagcgtggtcgtgacgatgatgatgatgacgacgatgaggaaagcgatgatgcatacgatgaagtaggtaatgactatgacgagtatgcttcaagagcgaagctggccaccaataggcccttcgaaatagtcgcggggctgcctgctagtgtggagctgcccaactataactcttcgcttacccatccgcaatcaattaaaaattctggggtgctttacgactctctggtcagttccagaagaacctgggttcagggtgagatgtttgaactgtattggcgaagacctaagaaaattgttagtgaatctaccccagcagcgacggagagtccgacatctggaacgattcctttgattcgagataagatgcagaaaatgtgcgattgtgtaatgagtggaggtcctcacacgttcaaagttagacttttcatactgaaaaatgacaaaatcgaacagaaatggcaagatgagcaagagttgaagaaaaaggaaaaggaactgaaacgaaagaacgatgcagaggccaaaagattgaggatggaggagaggaaaaggcagcagatgcaaaagaaaatagccaaggaacaaaaacttcaattgcagaaggaaaataaagccaagcagaagttggaacaggaggcgctgaagctaaaaagaaaggaagaaatgaaaaaactaaaggaacaaaataaaaataaacagggttcaccttcttcctccatgcatgacccaagaatgataatgaatttgaatttgatggcacaagaagatccaaaactaaacactttaatggagaccgtcgcaaagggtcttgccaataatagtcaactggaggaatttaaaaagtttattgaaattgccaaaaaaaggtcactagaggagaacccaattaataagcgtccatctgtcacaacaacgcgacctgcacctccctctaaagctaaagacgtagccgaagatcaccggttaaactcgataaccttggtgaaaagttccaaaaccgctgccacggaacctgaaccaaaaaaagctgatgacgagaatgcagagaagcaacagtttaaagaggcaaagacaactgccgaatcgactcaagtagatgtcaagaaagaagaagaagacgtgaaggaaaagggtgtcaaagcagaggataca

SEQ ID NO: 79149 - DNA, 1479 bp, Saccharomyces pastorianus
atgctacctatatggaccagtactaagggcattttatcagagcacccattggagtacgctaatagctacgaggatataacggccacatcgagaacattattagatttccgaattccctcagcaatacacctgcaaatttccaacaaatctactcccaatacattcaattctttagatttttctacgaggtccaggataaatggttctctgagttatttatactccgatgcacagcaattggagaatttcatgcgcaactctactgatatcccattacaagatgccaccgaaacatacagacaattgcaaccaaatctcaatttcagtgttagtagtgggaatacgttgagtagtgacaacaccacagtcgacaatgacaagaaattactacatgactcgaaatttgttaaaaaatccctttattatggtagaatgtactatcccagctctgatttagaagcaatgataataaaacgactaaatccacaaacccaatttatgcttaagggtgtcagtagtttcaaagaaagcttaaacgttttaacgtgctattttcaaagagattctcaccgcaatttacaggagtggatattttccaccagtgatctattatgtggttatagagtattacacaatttccttaccacgccttccaagtttaacacctcactgtacaataattcttcgttgtcgcttggtgctgaattttggttagggttagtaagtttaagccccggttgttcgacaactttaagatattacacacattctacaaacacaggacgaccactaactttgacattatcttggaatccattattcggccatatatcctccacatattcggccaagacagggacaaattctactttttgcgcgaagtatgattttaatctttattcgattgaatcaaatctttcatttgggtgcgaattttggcaaaaaaagcatcatttgcttgaaaccaataaaaacaataatgataaattagaaccaatctccgacgaattggttgatataaatccaaacagcagagcgactaaactactgcacgaaaatgtaccggatctgaattcagctgttaacgatattccttctacactagatatacctgttcacaaacaaaagctattaaatgatttaacttatgcattctcgtcgtcattaagaaaaatcgatgaagaaaggtctaccatcgaaaaatttgataacaaaataaatagttccatttttaccagtgtttggaaattaagcacgtcattacgtgacaagactttaaaactattatgggaaggcaaatggaggggatttttaatatctgccgggacagagctggtattcactagaggctttcaagaaagtttatccgatgatgaaaagaatgataatgcaatatctatatcagcaactgatacagaaaacggcaatataccagttttcccgacaaagtttggcatacaattccagtactccacatga

SEQ ID NO: 79150 - DNA, 564 bp, Saccharomyces pastorianus
gtcgaaaatcaagacgtgttcttccttacccttcttgtccaaaccgtaagcaatggcagcggcggtaggttcgttaataatacgcaagacattcaaaccagcaatggtaccagcatccttggtagcttgtctttgagaatcgttgaagtaagctgggacagtgacgacagcgtcattgaccttggcacccaagtaagattcggcagtttctttcatcttacccaagaccatagaggagatttgttctggggtaaagttcttggtttcacccttgaattcaacttgaatttgtggcttaccgtcaacatcgatcaacttgaatgggaagtgcttcatatcaccttggacctctgggtcattgaagtttctaccgatcaaacgcttagcgtcgaaaacagtgttagctgggttcatagcagcttggttcttagcagcgtcaccaatcaatctttcagtatcagtgaaaccaacgaaagatggagtggttctgttaccttggtcgttggcaataatgtcaacacgatcattagaaaagtgagcaacacaggagtaggtagtacctaa

SEQ ID NO: 79151 - DNA, 207 bp, Saccharomyces pastorianus
atggttgctaacgtcaaggccatcgaaatggaaggtttgacctggggtgctcaccaatttatcccaattggtttcggtatcaagaagttgcaaattaactgtgttgtcgaagatgacaaggtttccttggacgacttgcaacaaagcattgaagaagacgaagaccacgtccaatctaccgatattgctgctatgcaaaaattataa

SEQ ID NO: 79152 - DNA, 96 bp, Saccharomyces pastorianus
atggcatccaccgatttctccaagattgaaactttgaaacaattaaacgcttctttggctgacaagtcatacattgaagggtatgttccgatttag

SEQ ID NO: 79153 - DNA, 861 bp, Saccharomyces pastorianus
atgattctttggcttaatggtacagttctcagcaacgctgagagcttacaaattctggacttattgagtcaagactctaattttgaagctgcagctataattcacgaacgcttggaaagttttaacctagcagtcagggatttattaagctttattgaacaatgtctaaatgaagggaaaacaaatatatctactttattggaatctttgaggagggcctttgatgattgtaattctgctggtaccgagaaaaaatcgtgttggatattattgattacattcctgatcactctatatgggaaatatccttcacacgatgaaaggaaagatttatgtaataaactacttcaagaagcatttttgggattggttaggtccaagagttcctctcagaaggattcaggtggggaattctgggaaataatgtcttctgttcttgagcaccaagacgttattttaatgaaagttcaggatttaaagcaactgctactgaatgtttttaatacttataaattggaaagatctctttctgagttgattcaaaagattatagaggattcttcgcaagatcttgttcaacagtatagaaaatttctgagtgaagggtggtctatacacaccgacgactgcgaaatctgcgggaaaaaaatatggggagctggtctggacccattactttttctagcttgggaaaatgtacagcgccaccaagatatgattagtgtagatctcaaaactccccttgtcatattcaaatgtcaccatggctttcaccagacttgcctcgaaaacttggcccagaaacccgatgaatattcttgtttaatttgccagacggaatctaacccaaaaatagtataa

SEQ ID NO: 79154 - DNA, 1734 bp, Saccharomyces pastorianus
atgtttcaagaaactgttgaaccctcagtacaaaattctctagtcgtgaatagctctatttcatggactcaaaactgttccagggttgcttattccgtaaataataaaatttccgttatttccatatcttcatcagacttcaatgttcagtccgctagccattctcctgaatttgcagaatctatattatccattcaatggattgaccagctcctacttggtgttttaaccatatcgcaccaatttttggtattggacccccaacatgacttcaagatcctgttaagattggattttctgattcacgatttgatgatcccacctaataaatattttgtaataagtagaagaagtttctacctgttaacaaactactcatttaaaattggcaaatttgtgtcttggtcagatattactttaagacatattttgaaaggcgactacttgggtgcattggagttcatagaatcacttttgcaaccttactgtccactggcaaacttgttgaagctagataataatacggaagagaggactaagcaacttatggaaccattttacaatctgtccttggctgccctaaggtttcttataaaaaaagataatgccgactacaatagggtttaccaattattaatggtagttgttcgtgttttgcagcaatcttccaaaaaactaggctcaattccttctctagacgtctttttggaacagggtctggagttctttgaattgaaggacaacgcggtatattttgaagttgtagcaaatattgttgcccaaggatcagttacgtcaatttccccagttcttttcaggtccataattgattactatgctaaggaggagaatttaaaagtaattgaagacttaatcatcatgttaaatcctactacgcttgatgttgatcttgccgtcaaactatgccaaaagtataatttgttcgatttattaatatatatttggaacaagatctttgatgattatcaaaccccagtggtggacttgatatacaggatttctaaccaaagtgaaaaatgtgtgatcttcaatggtcctcaagcacctcctgaaacgactatatttgattacgtaacgtatatccttactggcaggcaatatccacaaaacttgtctatatcaccaagtaataaatgctccaaaatacaaagggaactttcagcatttatttttagtggcttctccataaaatggccgtcgaacagcaatcataaactttacatatgcgaaaatccagaagaagagccagcatttccttactttcaccttttattgaaatcgaatccgagtaggttcttagcaatgctcaatgaagtgtttgaagcgtccttgtttaacgatgacaatgacatggttgcatcagttggagaagcagaattggtaagtaggcaatatgttattgatctactattggatgctatgaaagatacgggaaattcagacaacatcagggtacttgttgcaattttcattgcaactagtatatcaaaatatcctcaatttattaaagtgtctaaccaagccctcgactgcgttgttaataccatatgctcctctagggttcaaggtatatatgaaatttctcaaatagctctggagtcgcttttaccctattatcattcaagaacaacagaaaattttatactggaactaaaagaaaaaaatttcaatcaagttcttttccatatctataaagtgaataataagtacgcc

SEQ ID NO: 79155 - DNA, 861 bp, Saccharomyces pastorianus
atggagcaaaatggccttgaccacgacagcagatctagcatcgatacgactattaatgacactcaaaagactttcctagaatttagatcgtatacccaactaagtgaaaaactggcatctagttcttcatatacggcacctcccccgaacgaagatggtcctaaaggggtagcttctgcagtgtcacaaggctccgaatccgtagtctcatggacaactttaacacacgtatattccatcctgggtgcttatggagggcccacgtgcttgtatccgacagccacgtattttttgatgggcacttctaaaggatgcgtactcatttttaattataatgaacatttgcagacaatcctagtgccgaccttatctgaggacccttctattcactcaataagaagtccagtgaaatcaattgtcatatgttccgatggtactcatgtagctgcctcatacgagaccggaaatatatgcatttggaacttgaacgtagggtatagagtgaaacccacttctgaaccaacaaatggtatgaccccaacgcctgccttaccggcagtcttacacatcgatgaccatgtgaacaaggaaatcacagggttagacttttttggtgctcggcatacagccctgattgttagtgattggacaggtaaagtatcactctataacggttacagaagaggcttttggcagttggtgtataattcaaaaaaaattttagatgtgaactcttccaaggagaaattaataaggtcaaagttgtctccactaatatcacgggagaaaatttccactaatttgttgagtgtactcacaactacacattttgcctatttagtatcgccacacgtttcttga

SEQ ID NO: 79156 - DNA, 117 bp, Saccharomyces pastorianus
atgataagtggtgcaagactaggaacgactgtgaaaaaactttgggttataggcggtgttgcggaagagacaaaggaaactcatttcttctcaatagaatgggctggatttggttaa

SEQ ID NO: 79157 - DNA, 621 bp, Saccharomyces pastorianus
atggctgaagaaggtggtacgcgcatagctattaacatatatgcaaaaagaacggcaaaaggcgaggaggtttttatgccgccgctagtatttgacatagatcacatcaaacttctaaggaaatggggtatttgtggtgtgttatctggaactttgcctactgcagcacagcaaaatgtatttttgtcggtacctttgaggcttatgttagaagatgtgctgtggctgcatttgaacaatcttgccgatgtgaaattaataagacaagagggacatgagattatggagggaataacattagagcggggcgccaaactatctaaaattgtcaacgatcgtttgaacaagtcatttgaatatcagagaaagttcaaaaaggatgaacacattgcaaaattaaagaaaatcggtagaatcaatgataaaaccacagctgaagaattgcaacggcttgataaatctagcaataatgaccagctaattgaatcttctttgttcattgacattgctaatacctctatgattttaagagacatacggagtgattcagacagcttatcccgcgatgatatcagtaactttgtatttaagcagtacagacaggcaggaaaaatgtcagac

SEQ ID NO: 79158 - DNA, 1314 bp, Saccharomyces pastorianus
atgataaccacgaatgacgataaaatacacaagtccgctattccttcttcttcctctctaccgttatcctcctcacccacgaggaactcaccagtgaattcggtacagtctccatcaaggtcccctgttcattctttgatggcaacgcgtccctcttctccaatgcgacacaagagcatttcaaactttccccatctgaccatatcttcaaaatcaagactactaattgaattaccggagggtttctttacctggctaacatctttttttgttgacatggcccaaatcaaagatttatctgtgttaaagtacttcaccaagctttgttaccttacagtacatataaacagcacttttttaaatgatctgcttgacaacgatgctttttttgcttttatccggaatattgataccatcattccctttatcgacgacgcaaagacagcagctttcatttggaaacaaatcactgctatatgcgttgaaatgagtttggatatggaccaaatgagtgcttctttattttctacagctatgaatttcatcagaaaaaagaataacacctccataagtggactggagatcatactgaactgcttgcattttacgttacgcaatgtaaatgatgatgtggctcctacagtgggctcatcagagtctcatagtgttttcctcataaaggtcaacaatgacgctgctattgaattaccgattgatcaattagttgacctgttttatgcattgaatgacgatgacgttaacctcagtaaactaattagcattttcacgaagatatgctcattgcccggttttgaaaaccttacaattaatatcatatttcacccgaacttttatgaaaagattgtttctttctttgatacctatttcaacagtttacttattcaaatcgatctattgaaattcataaagctaatattcacaaaatcgttattgaagctatatgactacacaggacagccggatcctataaagcaaaccgaaccaaatcgtcgtaataaggccactgttttcaaacttcgtgccattttagtacaaataacggagtttttaaacaacaactggaacaaggatgacccaaaaaggaattcaaatcaagttgggggggactcagttttgatctgtcagctatgtgaggatatccgttcattatcaaaaaaaggaagcctgcaaaaagtttcaagcgtcactgcagcaattggtagttctccaacaaaagatgagcgtagtaatttgcgatcctccaaagataaaagtgacggcttttccgtccccattacaacatttcaaacataa

SEQ ID NO: 79159 - DNA, 1197 bp, Saccharomyces pastorianus
atgaacagtatggccgataccgatagagtcaacttgactcccatccagagggcatctgagaaatccgtgcaataccacttgaagcaggtcattgggaggggttcttacggggtagtttacaaagccattaataaacatactgaccaagtcgtggcaataaaggaggtcgtgtacgaaaatgatgaggaacttaatgacattatggcagaaattagcttgttaaaaaatttaaaccataacaatattgttaaataccacggcttcatacgaaaaagctatgaattgtatatcctcctcgaatactgcgctaatggttctttgaggaggctcatttcaaggagctctaccggattaagtgaaaatgaatcgaaaacctatgtgacacagacactattggggctgaaatatttacacggtgaaggagtcatccacagggacatcaaggcggctaacatcctgctgagtgctgataacactgtcaaacttgctgattttggcgtttccactattgtgaactccagcgccttaacgctagcgggcacactcaattggatggctccagagatcctgggcaacaggggagcttctacgctcagcgacatttggtctctaggtgccactgtagttgaaatgctcacaaagaatccaccctaccacaatttgacagacgccaatatctactacgctgttgaaaatgatacctactacccacctagctctttctctgagccactaaaggatttcttatctaaatgctttgtgaaaaacatgtacaagaggccgacagccgaccagttactcaagcatgtgtggatcaactctaccgaaaatgtgaaggtcgacaagctcaacaagttcaaggaggactttaccgacgctgattatcattgggatgccgattttcaagaagagaaactaaatatatcaccctctaaattcagtcttgcagcggctcccgctgcctgggcagaaaacaatcaagaactagatttaatgccccccactgaaagtcaattgctgagccaattgaagagttcatctaagcctttgacggacttgcatgtgcttttcagtgtttgctccctcgagaacatcgctgatacaattatcgagtgtctgtcgcgcacaactgttgataaacgattaataactgcatttggctccatttttgtttacgatacccagcataacatctag

SEQ ID NO: 79160 - DNA, 723 bp, Saccharomyces pastorianus
atgcaaccttatttaaaaaaaaacactcatgtcacggacgatcctaaagcaaccccattgaaggaaggatctcctgacaaccctgaaagtcctttaatcccagctgatatcgtccttccagaggatgagtttgcatcataccagagttatttgctttacgaaattgtacgcgccaagtatataatgatcaatttcctcctttttgtcgtgacgattttggcgactttaacagacatttggttttctggtgttctctcccctgccatggtgatccggatatgtttaggtggctctatggtagtccttcagatatggtcattcagtagaccaataagtaatgaaacattccgtacaaaacttctactagaggtaataactcatagaccatcgatagctgggaaagaatgggaaaccataacgtataatatgaatcaatatttgttcaaggctggcttatggaaaacaccataccactttttttgtgaacaccagtgctatgaatttttcaaggatctcataaagggaaaatatcctgatgtacagtgggatacagcgaatacacagccgttcatcagtgttccagaaaatcaggctgcaactcaaaatcctgatgttgaaccaaccgtaaagtggtgcctctttaaagcagccgaaattcaagcccatgctgtgcgggaatattggcaaagtcaatatccagatgtgggcatacctgcaatatga

SEQ ID NO: 79161 - DNA, 3573 bp, Saccharomyces pastorianus
  modified_base (1367)..(1413): a, c, g, t, unknown, or other
atggaacaacctgatctatcgtctgtggccatcagtaagccgctgctgaagttgaaacttctcgacgcccttcgccagggaagtttccccaacctacaagatctcctaaagaaacaattccagccgctagacgacccaaacgtccaacaagtgctccatctcatgctccactatgccgtgcaagtcgcccccatggctgtcataaaggaaatcgtccatcattgggtctcaactacaaacaccacttttctaaacatccatcttgatctaaacgaacgggactccaacggcaacaccccattgcacatcgccgcctaccagtcccgcggtgatatcgtagccttcctcctggaccaaccaaccatcaacgactgcgtgctcaacaactcccacttgcaggccatcgaaatgtgcaagaacctaaacatcgcgcagatgatgcaggtgaaacgctccacatacgttgcagagaccgcccaggaattcagaacagcttttaacaacagggactttggccacctagaatctatcctctccagccctcgaaacgcagaactgctcgacatcaacggtatggacccggagactggcgataccgttctgcacgaattcgtcaagaaaagagacgtcatcatgtgccgctggttgcttgaacacggtgctgaccccttcaagagagaccgcaagggcaaactgcccatcgagctcgttaggaaagtcaatgaaaactacaccgccaccaacaccaagatcgccatcgacatcgaactgaaaaaactattggaaagggccaccagggagcaaagtgtcatcgacgtcacaaacaacaacttgcacgaggcccccacttacaaaggctacctgaaaaaatggaccaacttcgctcaaggctacaaattgcgttggttcatccttagtagcgatgggaaactatcctactacatcgatcaggccgacactaagaatgcctgcaggggctccctaaacatgtcttcgtgctctctgcatttggattcgtctgaaaagttgaaattcgaaattatcggcggtaacaacggtgttatcaggtggcatttaaaggggaaccaccccatcgaaacaaataggtgggtctgggccatccagggcgccataagatacgcaaaggacagagaaattttgctgcacaatggcccctattcgccttctttggccttaagccatggcttgtcatccaaagtgtccaataaagaaaacttgcatgcaacttcaaaacggttgaccaagagcccgcatctgtccaaatccacactgacacaaaacgatcacgataatgacgatgacagcactaacaacaacaacaacaaaagtaataatgattatgacgnnnnnnnnnnnnnnnnnnnnnnnnnnnnnnnnnnnnnnnnnnnnnnngatgatgatgaaagtagacccctcatagaaccattaccgttgatttcatccagaagccaaagcttaagcgaaatcgcttccggtccacattctaggaagtctacagtctcgtctacaagggcagccgatataccatcagacgacgagggttactctgaggacgattctgatgacgacggtaactcctcttacacaatggaaaacggcggtgaaaatgatggcgacgaagatctaaatgccatttatggtccctatattcaaaaactacacatgctacaaagatccatttccatcgagttggcatctttgaacgaattactgcaagataaacaacaacacgatgagtactggaacaccgtcaacacttctattgaaaccgtcagcgaatttttcgacaaattaaatcggttgacctctcaaagggaaaaaagaatgattgcccaaatgactaagcaacgggatgttaacaatgtatggattcaatcggtaaaagatctggaaatggaactggttgataaagacgaaaaattggttgccttggataaagaacggaaaaatctgaaaaaaatgcttcaaaaaaaattgaacaatcaaccacagattgaaactgaggctaatgaagaatccgatgatgcaaattcaatgataaaaggatcccaagaatcaacaaatacccttgaggaaatcgtaaaatttatcgaagcaacaaaggaaagtgatgaggattctgacgccgacgaatttttcgacgcagaagaagctgcttccgacaaaaaagccaatgattcggaagacttaaccacaaacaaggagactccagctaatgcgaaaccacaagaagaagctcctgaagacgagagccttattgtgatcagttctccacaggtggaaaagaagaaccaactattaaaagagggatcattcgtcggatatgaagacccagtgagaaccaaactggctttagacgaagataatcgtcccaagattggtctctggtctgttttaaagtctatggtcggtcaagacttaaccaaactaactctaccggtatcgttcaatgagccaacatccttactacagagagtatctgaagatattgagtattctcatattcttgaccaagctgccacttttgaagactcctctttaagaatgctatatgtagctgcctttactgcatcaatgtacgcatctaccactaacagagtgtctaaaccattcaaccccttactcggtgaaacttttgaatattccagaactgatggtcagtaccgatttttcacagaacaagtctctcatcacccacctatctctgctacttggacagaatcgcccaaatgggatttttacggtgaatgtaatgttgattcgtcattcaatgggcgcacgttcgccgtgcaacatttaggattatggtacattactatccggcccgatcataatattagtgttcccgaggaaacttattcctggaaaaaaccaaataacactgttatcggtattttaatggggaaaccacaagtagacaacagtggggacgtcaaagtcacaaaccataccacaggcgactattgtatgctgcattacaaagcccatggctggacctcagccggtgcatatgaagtcagaggtgaagtattcaacaaggacggtaaaaaattatgggttcttggtgggcattggaatgattccatttacgggaaaaaagtaactgctagaggcggagaactgacattagacagaataaaaacggcaaattctgccacgggaggaccaaaactagatgggtctaagtttctgatatggaaagcaaatgaaaggccttcagtgccatttaatttaacgtcgtttgcattgactttgaatgctttgccaccccacttggtaccatatttagcacccacagatagtcgtttaaggcccgatcaaagggctatggaaaatggtgaatacgataaagctgccgcggaaaagcatcgtgttgaagtaaaacaaagggcagcaaaaaaagaaagggaacaaaaaggagaagaatacagacctaagtggtttgtccaggaggagcaccccgttaccaaaagtctatactggaaatttaatggagagtattggaacaaaagaaaaaatcatgactttaaagattgtgctgatattttctaa

SEQ ID NO: 79162 - DNA, 255 bp, Saccharomyces pastorianus
atgtcacatgacgttacatccaagcggtttttattaaggaaaaagctagatgctctctttagtattataatgaaggataagtggatacctttgtatacaatgatatctttcagatccgatatctcgtattctagagctttagaaagggctggaaagcaaacacgtatcttgaaattcttagaatctctgacactcggtatgttatctattggcggttacaagcttttcaaatttttgacaagagaacgttcctga

SEQ ID NO: 79163 - DNA, 2265 bp, Saccharomyces pastorianus
atgactacacaactaaggtatgaaaataacgatgacgatgaaagagtagaacataatctctttaccaatagatccaccatgatggcaaattttgaagaatggatcaaaatggctacagataataaaatcaattcccgaaatagttggaatttcgcattgatcgactatttttatgacttggacgttttgaaagatggcgagaataacatcaattttcagaaagcatctgcaaccttggatgggtgtattaagatttactcttcgagagttgattcagtgacaacggaaacaggtaagttattgagcgggttggcacaaagaaagacgaatggggcatctaacggagatgacagtaacgggggaaatggtgaagggcttggaggtgacagtgacgaagcaaatatagagattgatcccttaactggtatgcctatatctaatgatcctgatgtgaataacactaggcggagagtgtacaacagagttttagaaacaacattggtggagttcgaaacgatcaagatgaaagagctagaccaggaattaataattgatccattattcaaaaaggccttggttgatttcgatgaaggtggcgccaagggtttattgttgaacacattaaacatagacaacactgcaagagtcattttcgatgcatcaattaaggatacacaaaacgtagggcaaggtaaacttcaaaggaaagaagaagaattaattgaaagagatagtttagtagatgacgaaaatgaacctagccagtcattgataagtactcgtaatgactcaaccgtaaatgattccgttattagtgcaccttccatggaagatgagattttatctcttggtatggattttataaaatttgatcaaattgcggtgtgtgaaatttcaggatcgattgagcaactaaggaacgttgtcgaagatattaatcaagcgaaagactttatcgaaaatgttaacaacagatttgataacttcttaactgaagaagaattgcaagcagctgtcccagataatgcagaagatgatagcgatggctttgatatgggcatgcaacaggagctgtgctatccagatgaaaatcatgacaatacatcacatgatgaacaagatgatgataatgtcaacagtaccacaggaagtatattcgaaaaagatttgatggcatactttgacgaaaatctaaatagaaactggagagggagagaacattggaaagtacgaaattttaagaaagcaaacttagtgaataaagaatccgacctgttggaagaaacgcgaactactataggagatactactgacaaaaacacaacggacgacaaatcgatggatacgaagaagaagcataaacaaaaaaaggttctggaaattgatttcttcaaaacggatgatagttttgaagacaaagtctttgcctcaaaaggaaggacaaagattgacatgccgattaagaacagaaagaacgacacacattatttactgccggatgacttccatttttccactgatagaataacaagattgtccattaaaccggggcagaaaatgagtctgttcagtcataggaagcataccagaggcgacgttagttcggggctttttgaaaaaagcacagtttctgccaaccattcaaataacgacattcctactattgcagatgagcacttttgggcggataattacgaaaggaaagaacaagaggaaaaagaaaaggagcagtctaaagaggttggtgatgtggtgggtggagcgctcgataatccgtttgaagatgacatggacggtgttgacttcaaccaagctttcgaaggaacagatgataacgaggaggccagtgtgaaacttgatttacaggatgacgaagatcataagttccccattcgagaaaataaagttacttattcaagagtttcgaaaaaagttgacgtaagaagattaaagaaaaacgtatggagatcgatcaacaatttgatacaagaacatgacagtaggaaaaatagagaacaaagctctaatgacagtgaaacccacacagaagatgaatcaacaaaggagctcaagttttctgatatcattcaaggtataagtaaaatgtattcggatgatacactaaaggacatttcaacaagcttttgttttatatgccttctacacttagccaatgagcatgggttgcagataactcataccgaaaactataatgacttgatagtgaattatgaggatctagcgacaacacaggcagcgtcatag

SEQ ID NO: 79164 - DNA, 348 bp, Saccharomyces pastorianus
atgaactgtgctgacaacagtggtgccagaaacttgtacattatcgccgtcaaaggctctggttccagattgaacagattgccagccgcctctctaggtgatatggttatggccaccgttaagaagggtaagccagaattgagaaagaaggttatgccagctattgttgtccgtcaagctaagtcttggagaagaagagacggtgtctttttgtacttcgaagacaatgctggtgtcatcgctaatcctaagggtgaaatgaagggttccgccatcactggtccagtcggtaaggaatgtgccgatttatggccaagagttgcatctaactccggtgttgttgtgtaa

SEQ ID NO: 79165 - DNA, 501 bp, Saccharomyces pastorianus
atggccaagtgggatgagctattccaatctttgaggatggaatttaataataccggaaagaaagaagattcaatgaacttcatcaacttactgtctaatgtactgattaaaattggtaaaaatgttcaggattctgaattcattttccccattttcgaactctttcccattgtctgtaattttttctacgaaacacttcctaaagaacatattgtatcagggtcgatagtttctatattcataacagcgggtgtttctttcaacaaaatgtactatattttaaaagaactaatcgagacatcagattccgataattccgtatttaataaagaaatgacctggttaattcacgaatggtacaaatcggacaggaaatttagggacattatttcctacaacgatatcattcatttgaaggaatacaacattgataatgatccaattgaaaagtacgttaagaacagcggcaataatttggggatttgtttctacaaagaataa
